United States Patent Application Publication US 2017/0114356 A1 - sequence listing, part 39

SEQ ID NO: 52142 - DNA, 5229 bp, Zea Mays
ctccggtctgcctctcaaatctcaccgcctgctcttcttcggtcccggctcgggctcctccatatgagcgcgcgctaggttctctctcgtcgtctctcgtggcggctggcgacgactggggaccgccggtaggcgcccaggccttcgtcgcgctggtctttctagggcccttcgccggcgacgatcaccctccgcgaccagagcttgtagaggttatggaaggtatgggtgtgccttcaccaccgacagttgggactccgtcggcctcgccctgccgcattacgtcccccgttgatgataccaatgcgtcgcttggccaagaaccagagtgcgcattgacatatatcagacaggacgatcctgacacattcattatctcgggaaattttcatccaaggcatcaaatcgattgggattcaattgaagtagaagaaaggtggaatgaggaaggaagacaggatgttactagtgaacgaggattgtatattcaactcggtttgcataatgaagatgagagggtatttaagcaaagggaagatgattcaagtgctcattgtgctggaaataatagggaagaatttcacgatgaagcttcaactgccatgccttgttctgattttgtattagatgggacaaggactatctatgatatgaacaatcctgtaatggagcctggtagcttgtacgcatcaatggagcagtttagacttgcaattagacagtacgccataaataaagaatttgagttgggcattgaggctaccaacaagactagattcagagggtactgtaaagggcctgattgtccttggagcattcatgcgaggtctgagatgaaaggatcacccactattcaagttattgtcttaaacgatgagcacacatgtacatcgagcgggagacgcaagacaacgacaccaacaggtgcttgggttgcggcaagggctcttccactacttatgaaaaaaccacatatgggtgctaaggagttacaaagtatgttgcaagatacatttggatgcactattacatatgatacaatttggcatgggaaagagaaagctctgaagcaattgtttgggagttgggaagagagtttccaacttctatggtcttggagagaagcagttatacagaagtcaccggatagtattatcgagttggatgttaaaatggatgagggccggccattttttagcagatttttttgtgcacttggtccttgcattactggtttcaaagagggatgtagaccttatcttagtgttgactcaactgctcttaatggaagatggaatggtcacctgtgttgtgccataggggttgatggacagaattggatgtaccctgttgcttatggattctttgaggcagaaacaacagaaaactggacatggttctttcagcagttgcgcaaggctgtgggagatcttcctctactagcattgtgttcagatgcttgcaaaggtctaaaaaatgccatgaacactgttttccctcaagctgaaaaaagggagtgtttcagacacctaatgcagaactacgtgaagcaatttgttggatccgagtacatgtatcctgcagctagagcatataggagggaggtgttcgaccattacttttccaatgtccaagaaattcccaaggtgtctagttggttatatgagcatcatgatagtttgtggtatcgtagtgggtttaatccagccatcaagtgcgactatgttaccaacaacatagcagaagtgttcaacaattggattaaggattggaaagatctgcctgtctgtgacttggctgacaagataaggaaggaaatcatggagttgtttcataggaggagggaaataggacagaggttgcaaggtcgaatactaccctccgtggtccatatcctccatgtaaggactagaggtttaggtcacttaacagttaagaaagctgacaattacattgcggaggtgagggataataataatgtgcactctaagcacattgtgaatgctcaattgagacaatgttcatgcaacgagtggcagcatacggggaagccatgtcaccatgcccttcgcttaataacaacacaacaatttagagatgttcggatggaagattttgtggatgactactactcagttgataagttcatgaaggcttactcgagggtagtggagccaattggtgacaaatctttctggcctacagtgccatttgcaaaagaggtgtgtgcttctattgggaagcgtggagttggccgtcaaaggaaaaacatgattaaagggtgcctagagggaggaagtggtaagaagccaaacgaaaatgaaaatgtcaaaactaagaagatgattcgtgggaagttcaagtgtccaaactgtggtgaattgggacacaggaaagccagctacaaatgtcctttgaatggaacaaaaaaacggaaaaggagagcaaggaaaaatgttactaaaggttggttcccaaaagatgttgaggcatgatgatggtgcatgcactagccacacaaccacccccatgtgatgattgtgatgccagtattgcgaaaatctctccactttcatctcccagacctatctagaggctagtgctggaccagtgtaccctaggagctgggtgccaggtgcggtggcgggcggggcctagcaaagcatgacgctgtaggagggatccagtcatccgatacgtcagcactccggcacagcagtaggcatctcggaagctggcagggccacagggcaccacgcccaaggcttagccgcgcaggcactgagcagccaagtagtcaggcagtcagtgagcagcagcagacggcagcaaggctggaagcgcgaagtacctatataggcatataagtttagttcgaccgggagtttacttctctgttatctgtgacttgcccgaccccgacttgatgtgcattgtagattatcagaaattgattaatgatttaatcacagattttaatcaactcaacacgtcgagaagaatatttttgtgctcatagttttttagttcaagcaatgttaatactagtggtacttccctgagttcatatcaatgcttagtcttgggctcctcagaaatgcaaattctttctttggcttgcaattagaaacaagtgttggactgctgataatctggagaagaggggttgcagcacccaagcagctgccctttgtgtgaccaagaaagggaaacgatacaacacatcatcactacctgtgtttttgcccggcaattctggtttcttatctttgacactcgggatgagtcacctcgctcttagggctgatgagcggtcgtttgaggactggtggaggaaggccagcaacagtacaaggataagagaaaagggatcaactgtgtcattattttgggggcttggtgcctctggctgcatagaaatagaacgttttttatgggaatcatccattcagagggtgcagcaacatttcagtgacgagttctcctgttggctcttggtgcgcgccaggagtttgggtcagcttggtctccctagttccatgagtaatatcggatctaatccttttactcctctataacctttttgcttttcttttgtttcttttttctgttttagctatggatgtaagtcatgttttctctctctctaatataaagatgtgcagctctcctgcgcgttctagaaaaaatgaatgtaaaatttgatcttcaattgtttattggcccattataaaattgtacaaagcttctccaaatatgccaattgatccattacaattgtttcataactactgtttatggattttgggactgcagaactgatggattctaacagatgtaacagacctacagtagggatgctaggccaaggagttaaaatatatccacatgttagaatatttcgtaactgtagtaacttcaacattatatagattaatcatgaacttttagttgtattaaacaaataagctctgtatgttcattgttgtagaactaagtttattgtgaatttgtgaacacatatatttgttcatgaaactgcattggatttggactaacaaagtttgtgtatgtgatatgtttttagtctggatctgcccttggtcaagattcaaatatggcttctgcagggttggctcgggtgggtgagtggtgcgactcgtcctctcatgaggctcgtcaccttgagcaacatgccgatcctgcagcagctgcacctggaggagcagctcctgcgccgcacatcggacaactggtgtgtcatcaacgatggcatggcccctgctaccattctcatgggactgcaggagagtctcggagcttgtcgacatacagccggtcctctgggaccaagtgccgattgtgaggaggttcagtggaggtggcacgtcattgttgattggggaacggtggttgtgactttcatttgcaacaagaatgccgttgccgggctgcagatttatggcaaaaaatttgacagatttggtgaatttcatctgcgtgagaatgactatgcatttagtcactcgaaagtttggcggaaatgctcaatcaataacaaaaaatcgttgggttcatcacacgtcgttcttgtgggattatgatgtaaaaaatatggattatctcaaaatcccaaagcgtgcacctgaatatcgactggcaagaaaccacagatttcttgtgccgcatgaaggagtacataccttcgcggtcagttttcaccgatgaggtcactgcggccctgggagaacacttctcagttcagcccgtggatctacaagcagttctttccggtgatgaaggatccgtgccttctacaaagctgctgtcacaacaggacctagaaagaaattgtttcgtccaaagaatcccttaacaatatagaaagttgaagcgtgaccatgcttgtcgtttttgttgtgaaatatgagcagttttgtcgagctgtgaattcattcaaacattatggtcaacccagtacgtacatacgaatgcccaccaccatctttagtaacaaatggttatgttttggattgtaggtctaccgttccaagcttgggttacacgttatttgcctatgggctctagaccgagtgctaaaactatgagagactggctccaacatactctgtaaatggttatgtactctaaattataaagaaattttttgtcttcttatttcagcagcgtcttttaaactacttatttcagcagcagcgtcttttaaac

SEQ ID NO: 52143 - DNA, 4645 bp, Zea Mays
ggactccggtctgcctctcaaatctcaccgcctgctcttcttcggtcccggctcgggctcctccatatgagcgcgcgctaggttctctctcgtcgtctctcgtggcggctggcgacgactggggaccgccggtaggcgcccaggccttcgtcgcgctggtctttctagggcccttcgccggcgacgatcaccctccgcgaccagagcttgtagaggttatggaaggtatgggtgtgccttcaccaccgacagttgggactccgtcggcctcgccctgccgcattacgtcccccgttgatgataccaatgcgtcgcttggccaagaaccagagtgcgcattgacatatatcagacaggacgatcctgacacattcattatctcgggaaattttcatccaaggcatcaaatcgattgggattcaattgaagtagaagaaaggtggaatgaggaaggaagacaggatgttactagtgaacgaggattgtatattcaactcggtttgcataatgaagatgagagggtatttaagcaaagggaagatgattcaagtgctcattgtgctggaaataatagggaagaatttcacgatgaagcttcaactgccatgccttgttctgattttgtattagatgggacaaggactatctatgatatgaacaatcctgtaatggagcctggtagcttgtacgcatcaatggagcagtttagacttgcaattagacagtacgccataaataaagaatttgagttgggcattgaggctaccaacaagactagattcagagggtactgtaaagggcctgattgtccttggagcattcatgcgaggtctgagatgaaaggatcacccactattcaagttattgtcttaaacgatgagcacacatgtacatcgagcgggagacgcaagacaacgacaccaacaggtgcttgggttgcggcaagggctcttccactacttatgaaaaaaccacatatgggtgctaaggagttacaaagtatgttgcaagatacatttggatgcactattacatatgatacaatttggcatgggaaagagaaagctctgaagcaattgtttgggagttgggaagagagtttccaacttctatggtcttggagagaagcagttatacagaagtcaccggatagtattatcgagttggatgttaaaatggatgagggccggccattttttagcagatttttttgtgcacttggtccttgcattactggtttcaaagagggatgtagaccttatcttagtgttgactcaactgctcttaatggaagatggaatggtcacctgtgttgtgccataggggttgatggacagaattggatgtaccctgttgcttatggattctttgaggcagaaacaacagaaaactggacatggttctttcagcagttgcgcaaggctgtgggagatcttcctctactagcattgtgttcagatgcttgcaaaggtctaaaaaatgccatgaacactgttttccctcaagctgaaaaaagggagtgtttcagacacctaatgcagaactacgtgaagcaatttgttggatccgagtacatgtatcctgcagctagagcatataggagggaggtgttcgaccattacttttccaatgtccaagaaattcccaaggtgtctagttggttatatgagcatcatgatagtttgtggtatcgtagtgggtttaatccagccatcaagtgcgactatgttaccaacaacatagcagaagtgttcaacaattggattaaggattggaaagatctgcctgtctgtgacttggctgacaagataaggaaggaaatcatggagttgtttcataggaggagggaaataggacagaggttgcaaggtcgaatactaccctccgtggtccatatcctccatgtaaggactagaggtttaggtcacttaacagttaagaaagctgacaattacattgcggaggtgagggataataataatgtgcactctaagcacattgtgaatgctcaattgagacaatgttcatgcaacgagtggcagcatacggggaagccatgtcaccatgcccttcgcttaataacaacacaacaatttagagatgttcggatggaagattttgtggatgactactactcagttgataagttcatgaaggcttactcgagggtagtggagccaattggtgacaaatctttctggcctacagtgccatttgcaaaagaggtgtgtgcttctattgggaagcgtggagttggccgtcaaaggaaaaacatgattaaagggtgcctagagggaggaagtggtaagaagccaaacgaaaatgaaaatgtcaaaactaagaagatgattcgtgggaagttcaagtgtccaaactgtggtgaattgggacacaggaaagccagctacaaatgtcctttgaatggaacaaaaaaacggaaaaggagagcaaggaaaaatgttactaaaggttggttcccaaaagatgttgaggcatgatgatggtgcatgcactagccacacaaccacccccatgtgatgattgtgatgccagtattgcgaaaatctctccactttcatctcccagacctatctagaggctagtgctggaccagtgtaccctaggagctgggtgccaggtgcggtggcgggcggggcctagcaaagcatgacgctgtaggagggatccagtcatccgatacgtcagcactccggcacagcagtaggcatctcggaagctggcagggccacagggcaccacgcccaaggcttagccgcgcaggcactgagcagccaagtagtcaggcagtcagtgagcagcagcagacggcagcaaggctggaagcgcgaagtacctatataggcatataagtttagttcgaccgggagtttacttctctgttatctgtgacttgcccgaccccgacttgatgtgcattgtagattatcagaaattgattaatgatttaatcacagattttaatcaactcaacacgtcgagaagaatatttttgtgctcatagttttttagttcaagcaatgttaatactagtggtacttccctgagttcatatcaatgcttagtcttgggctcctcagaaatgcaaattctttctttggcttgcaattagaaacaagtgttggactgctgataatctggagaagaggggttgcagcacccaagcagctgccctttgtgtgaccaagaaagggaaacgatacaacacatcatcactacctgtgtttttgcccggcaattctggtttcttatctttgacactcgggatgagtcacctcgctcttagggctgatgagcggtcgtttgaggactggtggaggaaggccagcaacagtacaaggataagagaaaagggatcaactgtgtcattattttgggggcttggtgcctctggctgcatagaaatagaacgttttttatgggaatcatccattcagagggtgcagcaacatttcagtgacgagttctcctgttggctcttggtgcgcgccaggagtttgggtcagcttggtctccctagttccatgaggttggctcgggtgggtgagtggtgcgactcgtcctctcatgaggctcgtcaccttgagcaacatgccgatcctgcagcagctgcacctggaggagcagctcctgcgccgcacatcggacaactggtgtgtcatcaacgatggcatggcccctgctaccattctcatgggactgcaggagagtctcggagcttgtcgacatacagccggtcctctgggaccaagtgccgattgtgaggaggttcagtggaggtggcacgtcattgttgattggggaacggtggttgtgactttcatttgcaacaagaatgccgttgccgggctgcagatttatggcaaaaaatttgacagatttggtgaatttcatctgcgtgagaatgactatgcatttagtcactcgaaagtttggcggaaatgctcaatcaataacaaaaaatcgttgggttcatcacacgtcgttcttgtgggattatgatgtaaaaaatatggattatctcaaaatcccaaagcgtgcacctgaatatcgactggcaagaaaccacagatttcttgtgccgcatgaaggagtacataccttcgcggtcagttttcaccgatgaggtcactgcggccctgggagaacacttctcagttcagcccgtggatctacaagcagttctttccggtgatgaaggatccgtgccttctacaaagctgctgtcacaacaggacctagaaagaaattgtttcgtccaaagaatcccttaacaatatagaaagttgaagcgtgaccatgcttgtcgtttttgttgtgaaatatgagcagttttgtcgagctgtgaattcattcaaacattatggtcaacccagtacgtacatacgaatgcccaccaccatctttagtaacaaatggttatgttttggattgtaggtctaccgttccaagcttgggttacacgttatttgcctatgggctctagaccgagtgctaaaactatgagagactggctccaacatactctgtaaatggttatgtactctaaattataaagaaattttttgtcttcttatttcagcagcgtcttttaaactacttatttcagcagcagcgtcttttaaac

SEQ ID NO: 52144 - DNA, 4712 bp, Zea Mays
tggactccggtctgcctctcaaatctcaccgcctgctcttcttcggtcccggctcgggctcctccatatgagcgcgcgctaggttctctctcgtcgtctctcgtggcggctggcgacgactggggaccgccggtaggcgcccaggccttcgtcgcgctggtctttctagggcccttcgccggcgacgatcaccctccgcgaccagcttgtagaggttatggaaggtatgggtgtgccttcaccaccgacagttgggactccgtcggcctcgccctgccgcattacgtcccccgttgatgataccaatgcgtcgcttggccaagaaccagagtgcgcattgacatatatcagacaggacgatcctgacacattcattatctcggtgagtaagctctatttgatctttgtagttcactagttatatttaatgagaagtgatttgctatgtagggaaattttcatccaaggcatcaaatcgattgggattcaattgaagtagaagaaaggtggaatgaggaaggaagacaggatgttactagtgaacgaggattgtatattcaactcggtttgcataatgaagatgagagggtatttaagcaaagggaagatgattcaagtgctcattgtgctggaaataatagggaagaatttcacgatgaagcttcaactgccatgccttgttctgattttgtattagatgggacaaggactatctatgatatgaacaatcctgtaatggagcctggtagcttgtacgcatcaatggagcagtttagacttgcaattagacagtacgccataaataaagaatttgagttgggcattgaggctaccaacaagactagattcagagggtactgtaaagggcctgattgtccttggagcattcatgcgaggtctgagatgaaaggatcacccactattcaagttattgtcttaaacgatgagcacacatgtacatcgagcgggagacgcaagacaacgacaccaacaggtgcttgggttgcggcaagggctcttccactacttatgaaaaaaccacatatgggtgctaaggagttacaaagtatgttgcaagatacatttggatgcactattacatatgatacaatttggcatgggaaagagaaagctctgaagcaattgtttgggagttgggaagagagtttccaacttctatggtcttggagagaagcagttatacagaagtcaccggatagtattatcgagttggatgttaaaatggatgagggccggccattttttagcagatttttttgtgcacttggtccttgcattactggtttcaaagagggatgtagaccttatcttagtgttgactcaactgctcttaatggaagatggaatggtcacctgtgttgtgccataggggttgatggacagaattggatgtaccctgttgcttatggattctttgaggcagaaacaacagaaaactggacatggttctttcagcagttgcgcaaggctgtgggagatcttcctctactagcattgtgttcagatgcttgcaaaggtctaaaaaatgccatgaacactgttttccctcaagctgaaaaaagggagtgtttcagacacctaatgcagaactacgtgaagcaatttgttggatccgagtacatgtatcctgcagctagagcatataggagggaggtgttcgaccattacttttccaatgtccaagaaattcccaaggtgtctagttggttatatgagcatcatgatagtttgtggtatcgtagtgggtttaatccagccatcaagtgcgactatgttaccaacaacatagcagaagtgttcaacaattggattaaggattggaaagatctgcctgtctgtgacttggctgacaagataaggaaggaaatcatggagttgtttcataggaggagggaaataggacagaggttgcaaggtcgaatactaccctccgtggtccatatcctccatgtaaggactagaggtttaggtcacttaacagttaagaaagctgacaattacattgcggaggtgagggataataataatgtgcactctaagcacattgtgaatgctcaattgagacaatgttcatgcaacgagtggcagcatacggggaagccatgtcaccatgcccttcgcttaataacaacacaacaatttagagatgttcggatggaagattttgtggatgactactactcagttgataagttcatgaaggcttactcgagggtagtggagccaattggtgacaaatctttctggcctacagtgccatttgcaaaagaggtgtgtgcttctattgggaagcgtggagttggccgtcaaaggaaaaacatgattaaagggtgcctagagggaggaagtggtaagaagccaaacgaaaatgaaaatgtcaaaactaagaagatgattcgtgggaagttcaagtgtccaaactgtggtgaattgggacacaggaaagccagctacaaatgtcctttgaatggaacaaaaaaacggaaaaggagagcaaggaaaaatgttactaaaggttggttcccaaaagatgttgaggcatgatgatggtgcatgcactagccacacaaccacccccatgtgatgattgtgatgccagtattgcgaaaatctctccactttcatctcccagacctatctagaggctagtgctggaccagtgtaccctaggagctgggtgccaggtgcggtggcgggcggggcctagcaaagcatgacgctgtaggagggatccagtcatccgatacgtcagcactccggcacagcagtaggcatctcggaagctggcagggccacagggcaccacgcccaaggcttagccgcgcaggcactgagcagccaagtagtcaggcagtcagtgagcagcagcagacggcagcaaggctggaagcgcgaagtacctatataggcatataagtttagttcgaccgggagtttacttctctgttatctgtgacttgcccgaccccgacttgatgtgcattgtagattatcagaaattgattaatgatttaatcacagattttaatcaactcaacacgtcgagaagaatatttttgtgctcatagttttttagttcaagcaatgttaatactagtggtacttccctgagttcatatcaatgcttagtcttgggctcctcagaaatgcaaattctttctttggcttgcaattagaaacaagtgttggactgctgataatctggagaagaggggttgcagcacccaagcagctgccctttgtgtgaccaagaaagggaaacgatacaacacatcatcactacctgtgtttttgcccggcaattctggtttcttatctttgacactcgggatgagtcacctcgctcttagggctgatgagcggtcgtttgaggactggtggaggaaggccagcaacagtacaaggataagagaaaagggatcaactgtgtcattattttgggggcttggtgcctctggctgcatagaaatagaacgttttttatgggaatcatccattcagagggtgcagcaacatttcagtgacgagttctcctgttggctcttggtgcgcgccaggagtttgggtcagcttggtctccctagttccatgaggttggctcgggtgggtgagtggtgcgactcgtcctctcatgaggctcgtcaccttgagcaacatgccgatcctgcagcagctgcacctggaggagcagctcctgcgccgcacatcggacaactggtgtgtcatcaacgatggcatggcccctgctaccattctcatgggactgcaggagagtctcggagcttgtcgacatacagccggtcctctgggaccaagtgccgattgtgaggaggttcagtggaggtggcacgtcattgttgattggggaacggtggttgtgactttcatttgcaacaagaatgccgttgccgggctgcagatttatggcaaaaaatttgacagatttggtgaatttcatctgcgtgagaatgactatgcatttagtcactcgaaagtttggcggaaatgctcaatcaataacaaaaaatcgttgggttcatcacacgtcgttcttgtgggattatgatgtaaaaaatatggattatctcaaaatcccaaagcgtgcacctgaatatcgactggcaagaaaccacagatttcttgtgccgcatgaaggagtacataccttcgcggtcagttttcaccgatgaggtcactgcggccctgggagaacacttctcagttcagcccgtggatctacaagcagttctttccggtgatgaaggatccgtgccttctacaaagctgctgtcacaacaggacctagaaagaaattgtttcgtccaaagaatcccttaacaatatagaaagttgaagcgtgaccatgcttgtcgtttttgttgtgaaatatgagcagttttgtcgagctgtgaattcattcaaacattatggtcaacccagtacgtacatacgaatgcccaccaccatctttagtaacaaatggttatgttttggattgtaggtctaccgttccaagcttgggttacacgttatttgcctatgggctctagaccgagtgctaaaactatgagagactggctccaacatactctgtaaatggttatgtactctaaattataaagaaattttttgtcttcttatttcagcagcgtcttttaaactacttatttcagcagcagcgtcttttaaac

SEQ ID NO: 52145 - DNA, 4605 bp, Zea Mays
ttggactccggtctgcctctcaaatctcaccgcctgctcttcttcggtcccggctcgggctcctccatatgagcgcgcgctaggttctctctcgtcgtctctcgtggcggctggcgacgactggggaccgccggtaggcgcccaggccttcgtcgcgctggtctttctagggcccttcgccggcgacgatcaccctccgcgaccagagcttgtagaggttatggaaggtatgggtgtgccttcaccaccgacagttgggactccgtcggcctcgccctgccgcattacgtcccccgttgatgataccaatgcgtcgcttggccaagaaccagagtgcgcattgacatatatcagacaggacgatcctgacacattcattatctcggcatcaaatcgattgggattcaattgaagtagaagaaaggtggaatgaggaaggaagacaggatgttactagtgaacgaggattgtatattcaactcggtttgcataatgaagatgagagggtatttaagcaaagggaagatgattcaagtgctcattgtgctggaaataatagggaagaatttcacgatgaagcttcaactgccatgccttgttctgattttgtattagatgggacaaggactatctatgatatgaacaatcctgtaatggagcctggtagcttgtacgcatcaatggagcagtttagacttgcaattagacagtacgccataaataaagaatttgagttgggcattgaggctaccaacaagactagattcagagggtactgtaaagggcctgattgtccttggagcattcatgcgaggtctgagatgaaaggatcacccactattcaagttattgtcttaaacgatgagcacacatgtacatcgagcgggagacgcaagacaacgacaccaacaggtgcttgggttgcggcaagggctcttccactacttatgaaaaaaccacatatgggtgctaaggagttacaaagtatgttgcaagatacatttggatgcactattacatatgatacaatttggcatgggaaagagaaagctctgaagcaattgtttgggagttgggaagagagtttccaacttctatggtcttggagagaagcagttatacagaagtcaccggatagtattatcgagttggatgttaaaatggatgagggccggccattttttagcagatttttttgtgcacttggtccttgcattactggtttcaaagagggatgtagaccttatcttagtgttgactcaactgctcttaatggaagatggaatggtcacctgtgttgtgccataggggttgatggacagaattggatgtaccctgttgcttatggattctttgaggcagaaacaacagaaaactggacatggttctttcagcagttgcgcaaggctgtgggagatcttcctctactagcattgtgttcagatgcttgcaaaggtctaaaaaatgccatgaacactgttttccctcaagctgaaaaaagggagtgtttcagacacctaatgcagaactacgtgaagcaatttgttggatccgagtacatgtatcctgcagctagagcatataggagggaggtgttcgaccattacttttccaatgtccaagaaattcccaaggtgtctagttggttatatgagcatcatgatagtttgtggtatcgtagtgggtttaatccagccatcaagtgcgactatgttaccaacaacatagcagaagtgttcaacaattggattaaggattggaaagatctgcctgtctgtgacttggctgacaagataaggaaggaaatcatggagttgtttcataggaggagggaaataggacagaggttgcaaggtcgaatactaccctccgtggtccatatcctccatgtaaggactagaggtttaggtcacttaacagttaagaaagctgacaattacattgcggaggtgagggataataataatgtgcactctaagcacattgtgaatgctcaattgagacaatgttcatgcaacgagtggcagcatacggggaagccatgtcaccatgcccttcgcttaataacaacacaacaatttagagatgttcggatggaagattttgtggatgactactactcagttgataagttcatgaaggcttactcgagggtagtggagccaattggtgacaaatctttctggcctacagtgccatttgcaaaagaggtgtgtgcttctattgggaagcgtggagttggccgtcaaaggaaaaacatgattaaagggtgcctagagggaggaagtggtaagaagccaaacgaaaatgaaaatgtcaaaactaagaagatgattcgtgggaagttcaagtgtccaaactgtggtgaattgggacacaggaaagccagctacaaatgtcctttgaatggaacaaaaaaacggaaaaggagagcaaggaaaaatgttactaaaggttggttcccaaaagatgttgaggcatgatgatggtgcatgcactagccacacaaccacccccatgtgatgattgtgatgccagtattgcgaaaatctctccactttcatctcccagacctatctagaggctagtgctggaccagtgtaccctaggagctgggtgccaggtgcggtggcgggcggggcctagcaaagcatgacgctgtaggagggatccagtcatccgatacgtcagcactccggcacagcagtaggcatctcggaagctggcagggccacagggcaccacgcccaaggcttagccgcgcaggcactgagcagccaagtagtcaggcagtcagtgagcagcagcagacggcagcaaggctggaagcgcgaagtacctatataggcatataagtttagttcgaccgggagtttacttctctgttatctgtgacttgcccgaccccgacttgatgtgcattgtagattatcagaaattgattaatgatttaatcacagattttaatcaactcaacacgtcgagaagaatatttttgtgctcatagttttttagttcaagcaatgttaatactagtggtacttccctgagttcatatcaatgcttagtcttgggctcctcagaaatgcaaattctttctttggcttgcaattagaaacaagtgttggactgctgataatctggagaagaggggttgcagcacccaagcagctgccctttgtgtgaccaagaaagggaaacgatacaacacatcatcactacctgtgtttttgcccggcaattctggtttcttatctttgacactcgggatgagtcacctcgctcttagggctgatgagcggtcgtttgaggactggtggaggaaggccagcaacagtacaaggataagagaaaagggatcaactgtgtcattattttgggggcttggtgcctctggctgcatagaaatagaacgttttttatgggaatcatccattcagagggtgcagcaacatttcagtgacgagttctcctgttggctcttggtgcgcgccaggagtttggggttggctcgggtgggtgagtggtgcgactcgtcctctcatgaggctcgtcaccttgagcaacatgccgatcctgcagcagctgcacctggaggagcagctcctgcgccgcacatcggacaactggtgtgtcatcaacgatggcatggcccctgctaccattctcatgggtatgtctgggagagtctcggagcttgtcgacatacagccggtcctctgggaccaagtgccgattgtgaggaggttcagtggaggtggcacgtcattgttgattggggaacggtggttgtgactttcatttgcaacaagaatgccgttgccgggctgcagatttatggcaaaaaatttgacagatttggtgaatttcatctgcgtgagaatgactatgcatttagtcactcgaaagtttggcggaaatgctcaatcaataacaaaaaatcgttgggttcatcacacgtcgttcttgtgggattatgatgtaaaaaatatggattatctcaaaatcccaaagcgtgcacctgaatatcgactggcaagaaaccacagatttcttgtgccgcatgaaggagtacataccttcgcggtcagttttcaccgatgaggtcactgcggccctgggagaacacttctcagttcagcccgtggatctacaagcagttctttccggtgatgaaggatccgtgccttctacaaagctgctgtcacaacaggacctagaaagaaattgtttcgtccaaagaatcccttaacaatatagaaagttgaagcgtgaccatgcttgtcgtttttgttgtgaaatatgagcagttttgtcgagctgtgaattcattcaaacattatggtcaacccagtacgtacatacgaatgcccaccaccatctttagtaacaaatggttatgttttggattgtaggtctaccgttccaagcttgggttacacgttatttgcctatgggctctagaccgagtgctaaaactatgagagactggctccaacatactctgtaaatggttatgtactctaaattataaagaaattttttgtcttcttatttcagcagcgtcttttaaactacttatttcagcagcagcgtcttttaaac

SEQ ID NO: 52146 - DNA, 5209 bp, Zea Mays
ttggactccggtctgcctctcaaatctcaccgcctgctcttcttcggtcccggctcgggctcctccatatgagcgcgcgctaggttctctctcgtcgtctctcgtggcggctggcgacgactggggaccgccggtaggcgcccaggccttcgtcgcgctggtctttctagggcccttcgccggcgacgatcaccctccgcgaccagagcttgtagaggttatggaaggtatgggtgtgccttcaccaccgacagttgggactccgtcggcctcgccctgccgcattacgtcccccgttgatgataccaatgcgtcgcttggccaagaaccagagtgcgcattgacatatatcagacaggacgatcctgacacattcattatctcggcatcaaatcgattgggattcaattgaagtagaagaaaggtggaatgaggaaggaagacaggatgttactagtgaacgaggattgtatattcaactcggtttgcataatgaagatgagagggtatttaagcaaagggaagatgattcaagtgctcattgtgctggaaataatagggaagaatttcacgatgaagcttcaactgccatgccttgttctgattttgtattagatgggacaaggactatctatgatatgaacaatcctgtaatggagcctggtagcttgtacgcatcaatggagcagtttagacttgcaattagacagtacgccataaataaagaatttgagttgggcattgaggctaccaacaagactagattcagagggtactgtaaagggcctgattgtccttggagcattcatgcgaggtctgagatgaaaggatcacccactattcaagttattgtcttaaacgatgagcacacatgtacatcgagcgggagacgcaagacaacgacaccaacaggtgcttgggttgcggcaagggctcttccactacttatgaaaaaaccacatatgggtgctaaggagttacaaagtatgttgcaagatacatttggatgcactattacatatgatacaatttggcatgggaaagagaaagctctgaagcaattgtttgggagttgggaagagagtttccaacttctatggtcttggagagaagcagttatacagaagtcaccggatagtattatcgagttggatgttaaaatggatgagggccggccattttttagcagatttttttgtgcacttggtccttgcattactggtttcaaagagggatgtagaccttatcttagtgttgactcaactgctcttaatggaagatggaatggtcacctgtgttgtgccataggggttgatggacagaattggatgtaccctgttgcttatggattctttgaggcagaaacaacagaaaactggacatggttctttcagcagttgcgcaaggctgtgggagatcttcctctactagcattgtgttcagatgcttgcaaaggtctaaaaaatgccatgaacactgttttccctcaagctgaaaaaagggagtgtttcagacacctaatgcagaactacgtgaagcaatttgttggatccgagtacatgtatcctgcagctagagcatataggagggaggtgttcgaccattacttttccaatgtccaagaaattcccaaggtgtctagttggttatatgagcatcatgatagtttgtggtatcgtagtgggtttaatccagccatcaagtgcgactatgttaccaacaacatagcagaagtgttcaacaattggattaaggattggaaagatctgcctgtctgtgacttggctgacaagataaggaaggaaatcatggagttgtttcataggaggagggaaataggacagaggttgcaaggtcgaatactaccctccgtggtccatatcctccatgtaaggactagaggtttaggtcacttaacagttaagaaagctgacaattacattgcggaggtgagggataataataatgtgcactctaagcacattgtgaatgctcaattgagacaatgttcatgcaacgagtggcagcatacggggaagccatgtcaccatgcccttcgcttaataacaacacaacaatttagagatgttcggatggaagattttgtggatgactactactcagttgataagttcatgaaggcttactcgagggtagtggagccaattggtgacaaatctttctggcctacagtgccatttgcaaaagaggtgtgtgcttctattgggaagcgtggagttggccgtcaaaggaaaaacatgattaaagggtgcctagagggaggaagtggtaagaagccaaacgaaaatgaaaatgtcaaaactaagaagatgattcgtgggaagttcaagtgtccaaactgtggtgaattgggacacaggaaagccagctacaaatgtcctttgaatggaacaaaaaaacggaaaaggagagcaaggaaaaatgttactaaaggttggttcccaaaagatgttgaggcatgatgatggtgcatgcactagccacacaaccacccccatgtgatgattgtgatgccagtattgcgaaaatctctccactttcatctcccagacctatctagaggctagtgctggaccagtgtaccctaggagctgggtgccaggtgcggtggcgggcggggcctagcaaagcatgacgctgtaggagggatccagtcatccgatacgtcagcactccggcacagcagtaggcatctcggaagctggcagggccacagggcaccacgcccaaggcttagccgcgcaggcactgagcagccaagtagtcaggcagtcagtgagcagcagcagacggcagcaaggctggaagcgcgaagtacctatataggcatataagtttagttcgaccgggagtttacttctctgttatctgtgacttgcccgaccccgacttgatgtgcattgtagattatcagaaattgattaatgatttaatcacagattttaatcaactcaacacgtcgagaagaatatttttgtgctcatagttttttagttcaagcaatgttaatactagtggtacttccctgagttcatatcaatgcttagtcttgggctcctcagaaatgcaaattctttctttggcttgcaattagaaacaagtgttggactgctgataatctggagaagaggggttgcagcacccaagcagctgccctttgtgtgaccaagaaagggaaacgatacaacacatcatcactacctgtgtttttgcccggcaattctggtttcttatctttgacactcgggatgagtcacctcgctcttagggctgatgagcggtcgtttgaggactggtggaggaaggccagcaacagtacaaggataagagaaaagggatcaactgtgtcattattttgggggcttggtgcctctggctgcatagaaatagaacgttttttatgggaatcatccattcagagggtgcagcaacatttcagtgacgagttctcctgttggctcttggtgcgcgccaggagtttgggtcagcttggtctccctagttccatgagtaatatcggatctaatccttttactcctctataacctttttgcttttcttttgtttcttttttctgttttagctatggatgtaagtcatgttttctctctctctaatataaagatgtgcagctctcctgcgcgttctagaaaaaatgaatgtaaaatttgatcttcaattgtttattggcccattataaaattgtacaaagcttctccaaatatgccaattgatccattacaattgtttcataactactgtttatggattttgggactgcagaactgatggattctaacagatgtaacagacctacagtagggatgctaggccaaggagttaaaatatatccacatgttagaatatttcgtaactgtagtaacttcaacattatatagattaatcatgaacttttagttgtattaaacaaataagctctgtatgttcattgttgtagaactaagtttattgtgaatttgtgaacacatatatttgttcatgaaactgcattggatttggactaacaaagtttgtgtatgtgatatgtttttagtctggatctgcccttggtcaagattcaaatatggcttctgcagggttggctcgggtgggtgagtggtgcgactcgtcctctcatgaggctcgtcaccttgagcaacatgccgatcctgcagcagctgcacctggaggagcagctcctgcgccgcacatcggacaactggtgtgtcatcaacgatggcatggcccctgctaccattctcatgggagagtctcggagcttgtcgacatacagccggtcctctgggaccaagtgccgattgtgaggaggttcagtggaggtggcacgtcattgttgattggggaacggtggttgtgactttcatttgcaacaagaatgccgttgccgggctgcagatttatggcaaaaaatttgacagatttggtgaatttcatctgcgtgagaatgactatgcatttagtcactcgaaagtttggcggaaatgctcaatcaataacaaaaaatcgttgggttcatcacacgtcgttcttgtgggattatgatgtaaaaaatatggattatctcaaaatcccaaagcgtgcacctgaatatcgactggcaagaaaccacagatttcttgtgccgcatgaaggagtacataccttcgcggtcagttttcaccgatgaggtcactgcggccctgggagaacacttctcagttcagcccgtggatctacaagcagttctttccggtgatgaaggatccgtgccttctacaaagctgctgtcacaacaggacctagaaagaaattgtttcgtccaaagaatcccttaacaatatagaaagttgaagcgtgaccatgcttgtcgtttttgttgtgaaatatgagcagttttgtcgagctgtgaattcattcaaacattatggtcaacccagtacgtacatacgaatgcccaccaccatctttagtaacaaatggttatgttttggattgtaggtctaccgttccaagcttgggttacacgttatttgcctatgggctctagaccgagtgctaaaactatgagagactggctccaacatactctgtaaatggttatgtactctaaattataaagaaattttttgtcttcttatttcagcagcgtcttttaaactacttatttcagcagcagcgtcttttaaac

SEQ ID NO: 52147 - DNA, 4630 bp, Zea Mays
ttggactccggtctgcctctcaaatctcaccgcctgctcttcttcggtcccggctcgggctcctccatatgagcgcgcgctaggttctctctcgtcgtctctcgtggcggctggcgacgactggggaccgccggtaggcgcccaggccttcgtcgcgctggtctttctagggcccttcgccggcgacgatcaccctccgcgaccagagcttgtagaggttatggaaggtatgggtgtgccttcaccaccgacagttgggactccgtcggcctcgccctgccgcattacgtcccccgttgatgataccaatgcgtcgcttggccaagaaccagagtgcgcattgacatatatcagacaggacgatcctgacacattcattatctcggcatcaaatcgattgggattcaattgaagtagaagaaaggtggaatgaggaaggaagacaggatgttactagtgaacgaggattgtatattcaactcggtttgcataatgaagatgagagggtatttaagcaaagggaagatgattcaagtgctcattgtgctggaaataatagggaagaatttcacgatgaagcttcaactgccatgccttgttctgattttgtattagatgggacaaggactatctatgatatgaacaatcctgtaatggagcctggtagcttgtacgcatcaatggagcagtttagacttgcaattagacagtacgccataaataaagaatttgagttgggcattgaggctaccaacaagactagattcagagggtactgtaaagggcctgattgtccttggagcattcatgcgaggtctgagatgaaaggatcacccactattcaagttattgtcttaaacgatgagcacacatgtacatcgagcgggagacgcaagacaacgacaccaacaggtgcttgggttgcggcaagggctcttccactacttatgaaaaaaccacatatgggtgctaaggagttacaaagtatgttgcaagatacatttggatgcactattacatatgatacaatttggcatgggaaagagaaagctctgaagcaattgtttgggagttgggaagagagtttccaacttctatggtcttggagagaagcagttatacagaagtcaccggatagtattatcgagttggatgttaaaatggatgagggccggccattttttagcagatttttttgtgcacttggtccttgcattactggtttcaaagagggatgtagaccttatcttagtgttgactcaactgctcttaatggaagatggaatggtcacctgtgttgtgccataggggttgatggacagaattggatgtaccctgttgcttatggattctttgaggcagaaacaacagaaaactggacatggttctttcagcagttgcgcaaggctgtgggagatcttcctctactagcattgtgttcagatgcttgcaaaggtctaaaaaatgccatgaacactgttttccctcaagctgaaaaaagggagtgtttcagacacctaatgcagaactacgtgaagcaatttgttggatccgagtacatgtatcctgcagctagagcatataggagggaggtgttcgaccattacttttccaatgtccaagaaattcccaaggtgtctagttggttatatgagcatcatgatagtttgtggtatcgtagtgggtttaatccagccatcaagtgcgactatgttaccaacaacatagcagaagtgttcaacaattggattaaggattggaaagatctgcctgtctgtgacttggctgacaagataaggaaggaaatcatggagttgtttcataggaggagggaaataggacagaggttgcaaggtcgaatactaccctccgtggtccatatcctccatgtaaggactagaggtttaggtcacttaacagttaagaaagctgacaattacattgcggaggtgagggataataataatgtgcactctaagcacattgtgaatgctcaattgagacaatgttcatgcaacgagtggcagcatacggggaagccatgtcaccatgcccttcgcttaataacaacacaacaatttagagatgttcggatggaagattttgtggatgactactactcagttgataagttcatgaaggcttactcgagggtagtggagccaattggtgacaaatctttctggcctacagtgccatttgcaaaagaggtgtgtgcttctattgggaagcgtggagttggccgtcaaaggaaaaacatgattaaagggtgcctagagggaggaagtggtaagaagccaaacgaaaatgaaaatgtcaaaactaagaagatgattcgtgggaagttcaagtgtccaaactgtggtgaattgggacacaggaaagccagctacaaatgtcctttgaatggaacaaaaaaacggaaaaggagagcaaggaaaaatgttactaaaggttggttcccaaaagatgttgaggcatgatgatggtgcatgcactagccacacaaccacccccatgtgatgattgtgatgccagtattgcgaaaatctctccactttcatctcccagacctatctagaggctagtgctggaccagtgtaccctaggagctgggtgccaggtgcggtggcgggcggggcctagcaaagcatgacgctgtaggagggatccagtcatccgatacgtcagcactccggcacagcagtaggcatctcggaagctggcagggccacagggcaccacgcccaaggcttagccgcgcaggcactgagcagccaagtagtcaggcagtcagtgagcagcagcagacggcagcaaggctggaagcgcgaagtacctatataggcatataagtttagttcgaccgggagtttacttctctgttatctgtgacttgcccgaccccgacttgatgtgcattgtagattatcagaaattgattaatgatttaatcacagattttaatcaactcaacacgtcgagaagaatatttttgtgctcatagttttttagttcaagcaatgttaatactagtggtacttccctgagttcatatcaatgcttagtcttgggctcctcagaaatgcaaattctttctttggcttgcaattagaaacaagtgttggactgctgataatctggagaagaggggttgcagcacccaagcagctgccctttgtgtgaccaagaaagggaaacgatacaacacatcatcactacctgtgtttttgcccggcaattctggtttcttatctttgacactcgggatgagtcacctcgctcttagggctgatgagcggtcgtttgaggactggtggaggaaggccagcaacagtacaaggataagagaaaagggatcaactgtgtcattattttgggggcttggtgcctctggctgcatagaaatagaacgttttttatgggaatcatccattcagagggtgcagcaacatttcagtgacgagttctcctgttggctcttggtgcgcgccaggagtttgggtcagcttggtctccctagttccatgaggttggctcgggtgggtgagtggtgcgactcgtcctctcatgaggctcgtcaccttgagcaacatgccgatcctgcagcagctgcacctggaggagcagctcctgcgccgcacatcggacaactggtgtgtcatcaacgatggcatggcccctgctaccattctcatgggactgcaggagagtctcggagcttgtcgacatacagccggtcctctgggaccaagtgccgattgtgaggaggttcagtggaggtggcacgtcattgttgattggggaacggtggttgtgactttcatttgcaacaagaatgccgttgccgggctgcagatttatggcaaaaaatttgacagatttggtgaatttcatctgcgtgagaatgactatgcatttagtcactcgaaagtttggcggaaatgctcaatcaataacaaaaaatcgttgggttcatcacacgtcgttcttgtgggattatgatgtaaaaaatatggattatctcaaaatcccaaagcgtgcacctgaatatcgactggcaagaaaccacagatttcttgtgccgcatgaaggagtacataccttcgcggtcagttttcaccgatgaggtcactgcggccctgggagaacacttctcagttcagcccgtggatctacaagcagttctttccggtgatgaaggatccgtgccttctacaaagctgctgtcacaacaggacctagaaagaaattgtttcgtccaaagaatcccttaacaatatagaaagttgaagcgtgaccatgcttgtcgtttttgttgtgaaatatgagcagttttgtcgagctgtgaattcattcaaacattatggtcaacccagtacgtacatacgaatgcccaccaccatctttagtaacaaatggttatgttttggattgtaggtctaccgttccaagcttgggttacacgttatttgcctatgggctctagaccgagtgctaaaactatgagagactggctccaacatactctgtaaatggttatgtactctaaattataaagaaattttttgtcttcttatttcagcagcgtcttttaaactacttatttcagcagcagcgtcttttaaac

SEQ ID NO: 52148 - DNA, 4613 bp, Zea Mays
ttggactccggtctgcctctcaaatctcaccgcctgctcttcttcggtcccggctcgggctcctccatatgagcgcgcgctaggttctctctcgtcgtctctcgtggcggctggcgacgactggggaccgccggtaggcgcccaggccttcgtcgcgctggtctttctagggcccttcgccggcgacgatcaccctccgcgaccagagcttgtagaggttatggaaggtatgggtgtgccttcaccaccgacagttgggactccgtcggcctcgccctgccgcattacgtcccccgttgatgataccaatgcgtcgcttggccaagaaccagagtgcgcattgacatatatcagacaggacgatcctgacacattcattatctcggcatcaaatcgattgggattcaattgaagtagaagaaaggtggaatgaggaaggaagacaggatgttactagtgaacgaggattgtatattcaactcggtttgcataatgaagatgagagggtatttaagcaaagggaagatgattcaagtgctcattgtgctggaaataatagggaagaatttcacgatgaagcttcaactgccatgccttgttctgattttgtattagatgggacaaggactatctatgatatgaacaatcctgtaatggagcctggtagcttgtacgcatcaatggagcagtttagacttgcaattagacagtacgccataaataaagaatttgagttgggcattgaggctaccaacaagactagattcagagggtactgtaaagggcctgattgtccttggagcattcatgcgaggtctgagatgaaaggatcacccactattcaagttattgtcttaaacgatgagcacacatgtacatcgagcgggagacgcaagacaacgacaccaacaggtgcttgggttgcggcaagggctcttccactacttatgaaaaaaccacatatgggtgctaaggagttacaaagtatgttgcaagatacatttggatgcactattacatatgatacaatttggcatgggaaagagaaagctctgaagcaattgtttgggagttgggaagagagtttccaacttctatggtcttggagagaagcagttatacagaagtcaccggatagtattatcgagttggatgttaaaatggatgagggccggccattttttagcagatttttttgtgcacttggtccttgcattactggtttcaaagagggatgtagaccttatcttagtgttgactcaactgctcttaatggaagatggaatggtcacctgtgttgtgccataggggttgatggacagaattggatgtaccctgttgcttatggattctttgaggcagaaacaacagaaaactggacatggttctttcagcagttgcgcaaggctgtgggagatcttcctctactagcattgtgttcagatgcttgcaaaggtctaaaaaatgccatgaacactgttttccctcaagctgaaaaaagggagtgtttcagacacctaatgcagaactacgtgaagcaatttgttggatccgagtacatgtatcctgcagctagagcatataggagggaggtgttcgaccattacttttccaatgtccaagaaattcccaaggtgtctagttggttatatgagcatcatgatagtttgtggtatcgtagtgggtttaatccagccatcaagtgcgactatgttaccaacaacatagcagaagtgttcaacaattggattaaggattggaaagatctgcctgtctgtgacttggctgacaagataaggaaggaaatcatggagttgtttcataggaggagggaaataggacagaggttgcaaggtcgaatactaccctccgtggtccatatcctccatgtaaggactagaggtttaggtcacttaacagttaagaaagctgacaattacattgcggaggtgagggataataataatgtgcactctaagcacattgtgaatgctcaattgagacaatgttcatgcaacgagtggcagcatacggggaagccatgtcaccatgcccttcgcttaataacaacacaacaatttagagatgttcggatggaagattttgtggatgactactactcagttgataagttcatgaaggcttactcgagggtagtggagccaattggtgacaaatctttctggcctacagtgccatttgcaaaagaggtgtgtgcttctattgggaagcgtggagttggccgtcaaaggaaaaacatgattaaagggtgcctagagggaggaagtggtaagaagccaaacgaaaatgaaaatgtcaaaactaagaagatgattcgtgggaagttcaagtgtccaaactgtggtgaattgggacacaggaaagccagctacaaatgtcctttgaatggaacaaaaaaacggaaaaggagagcaaggaaaaatgttactaaaggttggttcccaaaagatgttgaggcatgatgatggtgcatgcactagccacacaaccacccccatgtgatgattgtgatgccagtattgcgaaaatctctccactttcatctcccagacctatctagaggctagtgctggaccagtgtaccctaggagctgggtgccaggtgcggtggcgggcggggcctagcaaagcatgacgctgtaggagggatccagtcatccgatacgtcagcactccggcacagcagtaggcatctcggaagctggcagggccacagggcaccacgcccaaggcttagccgcgcaggcactgagcagccaagtagtcaggcagtcagtgagcagcagcagacggcagcaaggctggaagcgcgaagtacctatataggcatataagtttagttcgaccgggagtttacttctctgttatctgtgacttgcccgaccccgacttgatgtgcattgtagattatcagaaattgattaatgatttaatcacagattttaatcaactcaacacgtcgagaagaatatttttgtgctcatagttttttagttcaagcaatgttaatactagtggtacttccctgagttcatatcaatgcttagtcttgggctcctcagaaatgcaaattctttctttggcttgcaattagaaacaagtgttggactgctgataatctggagaagaggggttgcagcacccaagcagctgccctttgtgtgaccaagaaagggaaacgatacaacacatcatcactacctgtgtttttgcccggcaattctggtttcttatctttgacactcgggatgagtcacctcgctcttagggctgatgagcggtcgtttgaggactggtggaggaaggccagcaacagtacaaggataagagaaaagggatcaactgtgtcattattttgggggcttggtgcctctggctgcatagaaatagaacgttttttatgggaatcatccattcagagggtgcagcaacatttcagtgacgagttctcctgttggctcttggtgcgcgccaggagtttgggtcagcttggtctccctagttccatgagtaatatcggatctaatccttttactcctctataacctttttgcttttcttttgtttcttttttctgttttagctatggatgtaagtcatgttttctctctctctaatataaagatgtgcagctctcctgcgcgttctagaaaaaatgaatgtaaaatttgatcttcaattgtttattggcccattataaaattgtacaaagcttctccaaatatgccaattgatccattacaattgtttcataactactgtttatggattttgggactgcagaactgatggattctaacagatgtaacagacctacagtagggatgctaggccaaggagttaaaatatatccacatgttagaatatttcgtaactgtagtaacttcaacattatatagattaatcatgaacttttagttgtattaaacaaataagctctgtatgttcattgttgtagaactaagtttattgtgaatttgtgaacacatatatttgttcatgaaactgcattggatttggactaacaaagtttgtgtatgtgatatgtttttagtctggatctgcccttggtcaagattcaaatatggcttctgcagggttggctcgggtgggtgagtggtgcgactcgtcctctcatgaggctcgtcaccttgagcaacatgccgatcctgcagcagctgcacctggaggagcagctcctgcgccgcacatcggacaactggtgtgtcatcaacgatggcatggcccctgctaccattctcatgggactgcaggagagtctcggagcttgtcgacatacagccggtcctctgggaccaagtgccgattgtgaggaggttcagtggaggtggcacgtcattgttgattggggaacggtggttgtgactttcatttgcaacaagaatgccgttgccgggctgcagatttatggcaaaaaatttgacagatttggtgaatttcatctgcgtgagaatggtatggacaaacagcaccaagtttcaccatttggcagcttaatatttatttattacagcgagcgaaaatttcatgttccaatgcattgtatgattgtatcgcagcatattctttaa

SEQ ID NO: 52149 - DNA, 1293 bp, Zea Mays
ccagttggggaagctgccaactatgcggtgattgagcagagatacttcgattgcgagatgttcccagcaaacgatgaccatccgtcgcatgatgtggcgagggggcagaggttcgtgaaagaggtgtatgagacactaagggccagtccgcagtggaacgagactgccctgatcatcacatatgatgagcatggtggattctatgaccatgtacctacgccggtcgttggagtgccccagcctgatggaatagttgggcctgatccatactacttcaagttcgaacggcttggggtgcgcgttcccacctttctcatctcaccttggatcgacaagggcactgtgatccataaaccaaacggtccacaggatacttcacaatatgagcattcgtccattcctgcaacagtaaagaagctattcaatttacattctaactttctgacaaagagagacgcatgggctgggacctttgagaactactttaaaatccggagaacgccaagaacagactgtcctgctgccacggcggtacttcgtcaatgaactgttaacaaaaacgaaggtcaactgatagtgtagcatgttctgctcctggagttatcaatgtggagaatgatggattttactagggtcctaaccagatttttttttctctcccaaacagagaagctcccagaggtgacaaagtcactgcgaccatttggtcccaaggaagattcgtctctctcagagttccaagtggagttgattcaacttgcctcgcagcttaacggcgaccatgtactgaacacgtacccagatattggcaggaccatgactgtcggggaagcgaaccgctacgcagaggatgctgtcgccagattcctggaagctggtcggattgctttgagagctggtgcgaatgaatctgctttggtgacgatgaggcccgctctcacaagcagggcctcaatgtcctctggtttatcatcagagctctagtagatggttccagtctgcccacaaattacacatcgccattccctctgattcagctcttgggtggtgtagtgcaaatatgatagtttggttctgtaaatagacagtcggtacatgtcaaagcctcaatgtgtagtggggatttctaaaagcaatttgtgggtacctgcttgtcaagcagctggactgcactctggagtaaatgtatgatactgtacagtaactgaattttcatgtctgtaaacatgggcttaaacatgtgtaatatgatacttaaacatttgcttgggaggatgagggttaacacttaac

SEQ ID NO: 52150 - DNA, 686 bp, Zea Mays
ggccaccttcgccgccagcgcgtcggtcagtagcacgcctgacgaccggatgccgccatggatgatcggacgctctgcaacccaccatggtaggtgatggcctgagcaacgtcgatcgcgatgttgagccgttgcgcgagctctaaaccatttccacatgattctgcagggttttttccacaccgcaaaatcaatgcatcagtatcctatcctcctagagtgacaaacaccagttcaatgcagattctatgatagaacatagaagtatagaacagaacagtttatactgaaacagtggtctactgactactgaaagaatgtagacgagaaactagcacagtcaacaggatgatattccatagcaacaccgcataccatccaaatgttccctcaaggaaccattgccgacatactcgactacgacgagactatcagctgcgcgttcgaagaatccaaagagcctcgccagattcctgtgctggatcttctcaagctccctccagagttcagccgtcggactctggtcgttcagctgaggagaggtaattagtaacactgctgcaattcgcctgctctatgagcaatccaaagcatggatgacggtggtgttcggttcccaaccttcgtgacacatttgacggcgatctgagaaccatccctgagctttcctctgtacatggtgcttg

SEQ ID NO: 52151 - DNA, 700 bp, Zea Mays
caaagccggccaccttcgccgccagcgcgtcggtcagtagcacgcctgacgaccggatgccgccatggatgatcggacgctctgcaacccaccatggtaccttgtaggtgatggcctgagcaacgtcgatcgcgatgttgagccgttgcgcgagctctaaaccatttccacatgattctgcagggttttttccacaccgcaaaatcaatgcatcagtatcctatcctcctagagtgacaaacaccagttcaatgcagattctatgatagaacatagaagtatagaacagaacagtttatactgaaacagtggtctactgactactgaaagaatgtagacgagaaactagcacagtcaacaggatgatattccatagcaacaccgcataccatccaaatgttccctcaaggaaccattgccgacatactcgactacgacgagactatcagctgcgcgttcgaagaatccaaagagcctcgccagattcctgtgctggatcttctcaagctccctccagagttcagccgtcggactctggtcgttcagctgaggagaggtaattagtaacactgctgcaattcgcctgctctatgagcaatccaaagcatggatgacggtggtgttcggttcccaaccttcgtgacacatttgacggcgatctgagaaccatccctgagctttcctctgtacatggtgcttg

SEQ ID NO: 52152 - DNA, 2307 bp, Zea Mays
aaaaatggaggcagcatattttaaaagcgagattttgaaaagtgctgtgaagtgagtgagaaccaacagatatgctcggtggaaaaagaaaacaattcgcgagtatatatatataatgctcggcggggcgagggagaaaggcagcaaacaggttgcacagcgggggaaggaagagcggaaaagcccatcgccaccttcctcctcggatccacaacccggacgccccacccgggtcctttcttcctccctcccagtcccactcccaacaccgaccgcccctcctcatcacacctcgcaactattttagtctaaccgagtccaaccagtggcaagcgagcgagaggtggtggacggaaccgtcgcctgctgcgggctgccctacgagatctaggcaagcgagcgagcgagcgcggccatgggtgctcgctgctccaagctctccgtctgctggtggcctccccgcttcaaatcgccgatgctcgagaatggcgccgccgaagatgacggcagcggcgtgccggtgttcgccgagtacagcctcgccgagctccgggtggccaccgacggcttcgccaccgaccgcatcgtgtcggagcacggcgagaaggcgcccaacgtggtctaccgcggcacgctcttcagctccggccgcaccgtcgccatcaagcgcttcggccgctccgcctggccggactcacgacagttcctggaggaggcgagggctgttgggcagctgcgcagtcgccggctggccaatctgatcggttgctgctacgagagcggcgagcgtctcctcgtcgccgagttcatgccgcacgagaccttggcaaagcatcttttccactgggagacaaatccgttgagttgggcaatgaggacgagggctgcattttatgtggcacaggcgttggaatactgcagtagcaaagggagggcactctatcatgacctgcatgcatacagggtcgtcttcgatgcggaaggtaacccaagactatcatgttttggtctgatgaagaacagccgtgatggaaagagctacagtactaatttggccttcacgcctcctgagtatcttaagacaggcagagtaagtcctgagagtgtggtttacagttttggcactgtcttgcttgatctcctgagtggaaagcacattccaccaagtcatgcactcgaccttataagagggaagaactttctagtgctgatggattcttgcttggaaggtcatgtatccagctccgatggaactgacttgatgcgattagcatcccgctgcttgcaatatgaagcacgtgaccggccaaatttgaaaacggtgactccttcacacactttgctggggatccaacatgataataaaaactcagatcgaatttctttatccgctattgggaaagcttttgccagagcagacctgaatgaggtgcacgaaatattactgcatgatggatatgatgaggatgacactgctaatgctgagctatctctccagtcatggaatgatgatgtatctgagagctttgttgttaagaggcatgcagacaacgcctttaggtctaaggattactcgactgcaattgagtgttactcaaggttcatcgactcaggtgcaggggtggctccaaccatgctggggcggagatgcttcgcatatgtggtggctggcaacccacaggaaggccttgaggatgcaaagagagccgaggttattgcatcggactggccgatgggacactacctgcaggccttggcacttcacaacctgggaagggaggctgaaagccaagaagcactgaagaatggcactgccttggaagctgcaatgaatagtagagctagaactgtatagccctgaatttgtgataccctgtcctgcttgtacctagatcgcctccctccaatgcttcgtcaccagtaggggctgtttttggtattccctaacttgtatcggtatttcccctagtttcacaagtcgaaaaaactcctaggggctagtttggatactttgggattagagtgttttgaagggattggagagggtgtaaatccctaatagatcaaatactctctcaatacatctcaatccactccaatcccactcgttactagagtatccaaactaggcctaggctggctgttgttacacctccaatatatttatgaatacaggaatgggcaactagcattctgttgatgtgagtttgtaaagtgagagtttctatttatttcaacaaattcatgtacatacacacttttgaaccctgcaacttaagatatttgaggtcaggcaaacttcaactc

SEQ ID NO: 52153 - DNA, 1319 bp, Zea Mays
atggctgcaccggtgccggcgaggcttcttctgggaggacattaaacaccgcacaaattccgcttgttgcgagccatccagatgtgtatgagccatgtgatgattcctttgcccttgttgatgcactactctcagacaaggcacaactcttgacactacagccaaggttatgtatggaggtagggtctggtagtggttatgtcatcacctcgcttgcaatcatgctcaggcagttaggctctggagcccagtacctagcaactgacatcaaccaacatgctgccgagacaactcaagcgacccttgaagctcatggggtgcatgcagatgtgattgttactgacatcatgtctggtcttgataaacgccttgctggtatggttgatgtggcagttgttaaccctccttatgtgccaactcctgtggaagaagtcggatgtagaggcattgcttcgtcctgggcaggcggtttgaatggccgccaagtgattgacaggatccttcctgctgtgcgtgagatgctatcagaaagggggtggctgtacatggtggccctcgaagataatgatccttcagacatatgccatctgatgagcgagatggggtatgcatcccgcgttatcttgaagaggtgtactgaggaggagagcctttatgttctcaagttctggcgagacccacacgctgttacaagtgtgtcgccgaaatcttcaggctctgaatcatggttttctcagttgcatttcaaatccctttggcacaagggctcgtagcagttcatgccctcatcattttggcagtttggcgtcttcatcagctccaaaacatagcaagagatcttctgcaaatctgagatggcagtatgtttagatgtgtttggataaaatggttactgttggtttctgaccgtctcaggcacagtgaaagaatcaagaatcagcctagcttgattggtttaaggcgcagagcaaacatgtccttagaccagaaagtactgaaccttattaatttggtagcttaaatcgttaccttatgttctcttggtgtgtgtggtgtgtcaatgtttttaaggttctcttggtgtgtgtgtgtgtgtcattgtttttaaggtgtcgccaaggcgtccaaaaatcataggcgccttgctcgcctaggcgtccagtcgataggccaacgtcttatctcgacttatgctttaagaaccatggtttgtgtatgctacgttgctactatggattctttgccttgctaggtttggaatatgtgttttctttatatatcattgcgtctaaatgcttatttcaagatgagaggaaagt

SEQ ID NO: 52154 - DNA, 1599 bp, Zea Mays
gagcagtagtcgtctttctgatagattgtgattatcctgcaaaggcaaattatctttcttcggaggaatcagctactagtttacaatctgaaaacacggttcttgatttcttcatccccaatccgtccagttctctgacgattccttcgcctgcctgcctgcctgggcgctaatgtagtttagcgctttcccaaatttcttttgcattgctgccagcctgcatggtgtgtgagatatttaagattttttggatcataacagaagttttgctcaagtgcccttttccattgatcccaactaatgatacaaatctatttcctcaagttcttatcttctggatttaacagaaggtttgctcaagtgccctttaagatggcatcgtcagaaagaagaacacaagttcatggaatatagctgtgaaaatacactcagcagtttcactagatgcttagagacccaaatgagttcattaagtgacatggtaatatagaggacgcccgaagggcgccaaatgcactaagtaataataataataataataataataataataataaccacaagtccacaacaaacaaccacaaaatgtgcactctgaagactgggtccaccattcagcgactctgttgaccacaggtctgtgcacccacccacctgtcagcttcccggttcattcatcctctgattagcgattacacagaattccctcccaatcggcggcgccacgatgcgcctccgcagccgggcaatctttcccctcgtccgcaccaccgccaccaccacgtcggccgcgtcttcgtctccggcggtgctgagcatcggccacgcgctgcgcgagcgccggctgttcacgggggacgacgtggcggcgtacgcggcgatcagcggtgaccgcaacccggtgcacctcgacgacgccgtcgcccgggagctgagcgggttccagcgaggccgcgtggtgcacggcatgctcgtggcgtccctcttcccttccatcatcgctggcacctggcgctgtgtacgcgagccagacgctcaagtttgcggcgccggtgtacgtcggggatgaggtggttgctcgagtccaggcactcaacatcaggacgacggcggcggcgacgaacagctgcacggcaagacgatatgtcgtcaagttcgcaaccaaatgcttcatggacgaagaggagggctctgttgcgattgaaggcgaagcaatggctgtcctgcctacactggagctcagctctcagtcgactagaaactaggagtggcctcaaaccgggtcactagtcacaagttgctgttgcttaatcatacccgacctggtaatccctctcttctgcaacactgtgtagaatgcgtgtaaactgaacttagtgtagccttcacattgtaagcgaggagtgaaataaagctgttgtttatgcctatgaatctctttgattatgtgcagcgtacaatcactcatccatgaacagtctctagtctctgccggttaattctgtattttttttctcgaaaaagagaaaatcacgaggaagaccaagaccccaagtacagatcaaaacactaggaccagccagaaaaaaaaacaaaaaa

SEQ ID NO: 52155 - DNA, 524 bp, Zea Mays
acagatcttccaggcactcaacatcaggacgacggcggcggcgacgaacagctgcacggcaagacgatatgtcgtcaagttcgcaaccaaatgcttcatggacgaagaggagggctctgttgcgattgaaggcgaagcaatggctgtcctgcctacactggagctcagctctcagtcgactagaaactaggagtggcctcaaaccgggtcactagtcacaagttgctgttgcttaatcatacccgacctggtaatccctctcttctgcaacactgtgtagaatgcgtgtaaactgaacttagtgtagccttcacattgtaagcgaggagtgaaataaagctgttgtttatgcctatgaatctctttgattatgtgcagcgtacaatcactcatccatgaacagtctctagtctctgccggttaattctgtattttttttctcgaaaaagagaaaatcacgaggaagaccaagaccccaagtacagatcaaaacactaggaccagccagaaaaaaaaacaaaaaa

SEQ ID NO: 52156 - DNA, 942 bp, Zea Mays
agccaaccggcccaaccccgtctaggtttaggcacccgaccgccgcagcgtccccgccgccacgaccacgagcgaaaggaggtcgccggaagagggggcgcggagatgagcgggagcgcgttcaacgcgttcaagtcgcgggtgccggtggcgtggagtccccggctgtacatcacgctggtgcggggcctccccgggacgcggcgcctccaccgccgcacgctcgaggccatgcgcctccgccgctgccaccgcaccgtcgagcaccgcaccacgccgtcgctcctcgggatgctcacccaggtgaagcgcctcgtcgccgtggagaccgaggagatgtacaacgcgcggaagcaggccgaggcggagaggcgcgcgcccagacccccgctcgtcgtctcccaccagccacagccgccggctccgaagccggcagccgccgccgcggtgggtgccgctaccactgcgcagtagcctccgacgatcgctttgggtcttcttgctcaacgagatctagcaacggatttgatcgatcttctcaagatcgttgtgtggtgcaacctgcattgaccctgtattttagattgttttatatgaactaggcgcacggttttccaatgcttttgtctagaatcaagtccaatgatttggtttaaattactaaattctctgtaaatgctcttcaagatgtgtaggcggttaaggcttcttgcgtaattgaaccagaggattgctagcgtctaaagttgctcggttgtgattgttggttcttagcgaaaggatttataacgttgattgggttctgggagtgagaacgtactgtgatcttgactacttcggtctccccaccgaatctccgaagaaaaagggtaccgatcaggggctcagggctgagcttggacggaccgggccatgcacggccaagttgattgaaaaaaaaaa

SEQ ID NO: 52157 - DNA, 744 bp, Zea Mays
agccaaccggcccaaccccgtctaggtttaggcacccgaccgccgcagcgtccccgccgccacgaccacgagcgaaaggaggtcgccggaagagggggcgcggagatgagcgggagcgcgttcaacgcgttcaagtcgcggccgccggctccgaagccggcagccgccgccgcggtgggtgccgctaccactgcgcagtagcctccgggcatcagaagcctttcatcacagttcagcggcataataattgatttgcctgtgtttgggtctgctggttttcagacgatcgctttgggtcttcttgctcaacgagatctagcaacggatttgatcgatcttctcaagatcgttgtgtggtgcaacctgcattgaccctgtattttagattgttttatatgaactaggcgcacggttttccaatgcttttgtctagaatcaagtccaatgatttggtttaaattactaaattctctgtaaatgctcttcaagatgtgtaggcggttaaggcttcttgcgtaattgaaccagaggattgctagcgtctaaagttgctcggttgtgattgttggttcttagcgaaaggatttataacgttgattgggttctgggagtgagaacgtactgtgatcttgactacttcggtctccccaccgaatctccgaagaaaaagggtaccgatcaggggctcagggctgagcttggacggaccgggccatgcacggccaagttgattgaaaaaaaaaa

SEQ ID NO: 52158 - DNA, 2590 bp, Zea Mays
caccggccagcccttctcgatcagcctcactagcgctctccaagagcatgaacaatcgtctgctgctctactagacggacggaccaaaccaaaccctcctttttcgtcactagcaaattaaagggaagcgagatcgacctcaccgtccgtgagtccgtcttcttcaactccatcgtcggcgtcgcgcgcgcggagtgtttggttgctcgggagaggagactatatatggagacgaccaagagcttggaggttgctaggggcgccatggacgacgacgaccacgaggaggcgtgggtgcacgactcctccgtcgatcaccgcgggaggtctcccgcccgcgccaccaccgggtcctggaaggccgccatgttcatcatcctgatcgagttcagcgagaggctgagctacttcggcatagccacgagcctcatgatctacctcaccaaggtgctgcaagaggagatgaaggcggccgccaagaatgccaactactggatgagcgtcaccacgctcatgcccctgctcggcggcttcctcgccgacggctacctcggcaggttctccaccgtcgtcgtctccaccgccgtctacctgctgggcctgacggtgctggcgacggcgcagctggcgccggggctggggcccgaccgctcgccgcgcctgcacgaggcgctcttcttcgccggcatctacctggtgtccgccggcaccggcgggcacaagccggccctggagagcttcggcgcggaccagttcgacgaggcccacgcggcggagcgggtgcgcaagatgtccttcttcaactggtggaactgcgcgctctgctcgggcgtcctgctcggcgtcaccgccgtcgtctacgcgcaggaccgcgccggctggggcgccgccaccgtcgcgctcgccgccgtcatggccgcctcgctcgccgtcttcctcgccggccgccggtactaccgctacagggtgcccgagggcagcccgctcacgccgctgctccaggtcctcgtcgccgccttcaggaataggcgactcccgctgccggacgacgacgccgagctgtacgaggtcaggcggccgcagagtggcaagaggaggctgctttgccacacctaccagctgaggtcacgttgcattcacttctcattcccattctccccggcggccttaatttagcttccctttcaaataaacaaaaaaaaaaagcgatcgcgaaatgcaatggatcctttagatagaactgacgaaacagtcgctagtgcatcgtgattgcgatccgagttcatccgtttttgccatctatctttactgctcgtggacgaacaaataaatcgatctggatgagatctccgaaaagcaaaaggaccagcgtaatcgaattggagcatgagcgccagcggtggtgggttgttgagccttgagcgtgacgcgtgcgtggcatggtgcgtgcaggttcctcgacaaggcagccatagtagtggagcccggcgccggcgaggacgcctgcgggccgtggcggctggcgacggtgacgcaggtggaggagacaaagctggtgctggcgatggtgcccatctgggtgtgcacgctgcccttcggcatggcggtggcgcaggtgtccaccttcttcatcaagcagagcagcgtgatggaccgtcgcctgggcccgcacttcgagcccccgccggcgtcggtgttcgcgctgtcggcggtggccatgatcggcacggtggcggcctacgacaaggcgctggtgccgtacctgcggcgcgccacgggaggggagcgcgggatcagcatccttgggcgcgtgggcatcggcatggcgttcgccatcgcggggctgggcgtggcggcggcggtggagcggcggcgcctgctgtcggcgggcgccgcgcggccgtcgacgtcggtgctgtggcttgtgccgcagttcgcgctgatgggcgtggccgacgggttcgcgctggtgggcctgcaggagtacttctacgagcaggtccccgacggcatgcgcagcctgggcatcggcctctacctcagcgtcattggcgccgggagcttcctgagcagcctggtgatcacggcggcggaccgcgccagctcccgcggagggcgcgccggctggttcgccaaggacctcaaccgcagcaggctggacctcttctactggctgctggcgtgcatcagcgccgtcaacctggcattctacgcgctggtcgccaccaagtgctcgtacaagcagaccgtcagggccggcagggtcggcgacgaggtcgagtgcgccgcgtagctgctgctgtacgtggtggtcatgaaaccaaccatgcatcagccgcacgaccatgtgtattattactattataggggctaataggaactagctactcgttgatcgtgttgttgctctagctagcttgggtacaagtagtacattcatgccacgtcgtgttgtatatgctgctcgtagacgttggtgtatgtgtactggcgcctggcgcgtcgtcgaaacgatacgtgtacatacaagtgatgtttggttcgttgtagcagtgatttctcagctaaattaattactactataatataa

SEQ ID NO: 52159 - DNA, 2074 bp, Zea Mays
taaagatttattttttgcaaagatgtataacgagaaaaaattggagaacttgctatttcaaacggtgaaatggaagttttgagatgatagaatttaaatctcacgattctaattgtcaagatgagcatatttctacacattttttgttgcgtcgtttcgaaaaacaatcaaaaaatgttttataagatgtagatgattcgtgaaaactttagtgggcccatactctgtcaaagaactccggtgaaaatgggccctcagatgtcaaattcttggcccacatacgtacattatggacgccgccggccacacaaaccgcaggctcgggagtgctccggaacccgccgccgcatccgcacgacgccacggctgacgactgggagccccgttcgcctccaccgccacctccccccgcgtagaagtagagagggaagctttgcagcgagaagccgagaaccctgtcgatctttcctgaagcaatccgctcctgtcgtgagctgaaccctacagttcgtatcacctcctctcgcagcagctgcagaaagagcaagggggatggccaaggacggaggccccgactggaacggcctgttcaagtggagcatcgcccacggagacggcaccaacccgccgcgtgctctcaggttcagtatatgctgaaaaaaaaactgcacttagtccaagagaagtgggataaaaaatcgtgtggttcttaatttcagtgaagaagacagaaaatggtttatggaggctatgcaagccaacacgatagatgttgtgaagaggatgaaggagatcactcgggtgatgagaactccacaagatgtcttgcagtctcagggtgtgaccccagagaacattgaagatatgttggatgagctacacgagcatgttgagtccattgacatggcaaatgatttacattctattggtgggctggatcccctgctcggttacttgaaaaattcaaatgctggcatccgcgcaaaggcagcagaagttgttagtacagtcgtgcagaataatcccaagagtcagcaacttgtcatagaatccaatggactcgagccactgttgataaacttcaaatcagatccaagtacaaatgcacgcacaaaagctttaggagccatatcttagtgtcttgtgttcgtacaattgttttgcagctataatacgtcataaccagcctggagtttccgcatttcgcctgggaaatggctatgctggattgaaggatgctcttggttcctatgatgccaaacttcaatggaaagctctcaatctcatacaatacctgttacacaacaaggcagacaggagttttgctacagagcttggtcttccaaagctgatgatgcatcttgcggctagcgatgatcacttggtgcgtgaagctgctctaagcggcctccttgagttgtcacaggaccagacatctggtaatgcgctacctgaccaagacaagctgaaaagagatcctgaagagccgaatcgaagggatcagtgcgatggactctgacgatctccatgccgcacacgagaagcgcagctggtggacacactaatgtaaatgttgttaattaggaagcggatcccagtgtgtgcacgtattgtgcagttgacacttgaaatagcggcgagcataagtgatgattggcgtctacttcatctcttcgctaatggcaaaaatcgtcaacctaggtcagctagggaagaagaagagcggcgtctgccgaagcagcaacagactgtgttgtcggaaaaccgacagataataaaatggaagaagccaccgagcagagtgctcaagatcagctttgcaatatgggtagggggggttgctaatgattttgcagctttcggttgtaaactccaaagtggacttcgtacaacttgggagttgggacgatgtgcatcgctttgtttgaggacttggtgtccaacgatgagcgatctatgctatgtgagctaaaaaatacttatctgttctaaattaaaattcgttttatctttttagtagattcataaaatagttgatgtatatatatgttctatgtatctatctatattcatt

SEQ ID NO: 52160 - DNA, 3219 bp, Zea Mays
accagactcgctctcgcttgcgtagctgcgtcgccattgcgctgcttgcctgctctgtgcctgtcgcgagaggcggaggacgggcgccgcttgtggtcgtcatcccggccgagagaggagggagagtcggagagatggaggtggagcacggcggagagatgatgatgttggtcgaggcggctgcggcggatgaggaggggtggcagacgccgaggcgcgaggactgccgcatccctgtggtgccgccgtgcccggcggcgccgtcgaggaagaaggccgtcgcgatggcgccggaggcggccggagggagcaggcggcgggacccgcccaagggcgggtacttccagccaccggacctcgagtccctgttcgtgctcgcgccgccgagggcacaggcggcggcctcaagccgcgcgtggtaaggcggggcacgtacgcttcggcccgccatggtcctccggccggtgagccgacaatagctagcggaatggtggtagagtagctgtatatgtctacgtgtagttccctactaggtgtacgtaggggttcagctagcagcacatcttacctttccttttggggggagtccttttttgtgtgaagattgctgctctggtgcctctgtgttagctagagattgacaaaagcagtaggagatccatggaggtccaaaaggttcctcaaaagcttggaatctgcgtacgtgcgtgtgtgtgtgaagtacttacctgttacgagcatatgttgtgaatctactttgtgaatctcccgttttccgaatcttctctcttggaatcgccgatggatctatacatctgccgatctgcgattgtgcatcaaccttccatcctcgactttccctctttgtcatttccgctctttggcttcatcatccatacgatatgtaaaataaaaaaaaaacctatagcttcatcattcgtgtgcaccattcttattttcaaggagataggcaaattatataattatatctcaaaaagtatatactagatggataaataacaaaaatagctaaaaggctgtaaaaaagctgcgtgttgccatgttgaaactattttctatcaaaacaattgagataattttaattggatctatagaattataaatctgaatattattccgatctatcgcttcagatcctaaatggataaatgacaaaaagagctaaaaggctgtaaatcttgccatactgttaactttttctataaagatttattttttgcaaagatgtataacgagaaaaaattggagaacttgctatttcaaacggtgaaatggaagttttgagatgatagaatttaaatctcacgattctaattgtcaagatgagcatatttctacacattttttgttgcgtcgtttcgaaaaacaatcaaaaaatgttttataagatgtagatgattcgtgaaaactttagtgggcccatactctgtcaaagaactccggtgaaaatgggccctcagatgtcaaattcttggcccacatacgtacattatggacgccgccggccacacaaaccgcaggctcgggagtgctccggaacccgccgccgcatccgcacgacgccacggctgacgactgggagccccgttcgcctccaccgccacctccccccgcgtagaagtagagagggaagctttgcagcgagaagccgagaaccctgtcgatctttcctgaagcaatccgctcctgtcgtgagctgaaccctacagttcgtatcacctcctctcgcagcagctgcagaaagagcaagggggatggccaaggacggaggccccgactggaacggcctgttcaagtggagcatcgcccacggagacggcaccaacccgccgcgtgctctcagtgaagaagacagaaaatggtttatggaggctatgcaagccaacacgatagatgttgtgaagaggatgaaggagatcactcgggtgatgagaactccacaagatgtcttgcagtctcagggtgtgaccccagagaacattgaagatatgttggatgagctacacgagcatgttgagtccattgacatggcaaatgatttacattctattggtgggctggatcccctgctcggttacttgaaaaattcaaatgctggcatccgcgcaaaggcagcagaagttgttagtacagtcgtgcagaataatcccaagagtcagcaacttgtcatagaatccaatggactcgagccactgttgataaacttcaaatcagatccaagtacaaatgcacgcacaaaagctttaggagccatatcttagtgtcttgtgttcgtacaattgttttgcagctataatacgtcataaccagcctggagtttccgcatttcgcctgggaaatggctatgctggattgaaggatgctcttggttcctatgatgccaaacttcaatggaaagctctcaatctcatacaatacctgttacacaacaaggcagacaggagttttgctacagagcttggtcttccaaagctgatgatgcatcttgcggctagcgatgatcacttggtgcgtgaagctgctctaagcggcctccttgagttgtcacaggaccagacatctggtaatgcgctacctgaccaagacaagctgaaaagagatcctgaagagccgaatcgaagggatcagtgcgatggactctgacgatctccatgccgcacacgagaagcgcagctggtggacacactaatgtaaatgttgttaattaggaagcggatcccagtgtgtgcacgtattgtgcagttgacacttgaaatagcggcgagcataagtgatgattggcgtctacttcatctcttcgctaatggcaaaaatcgtcaacctaggtcagctagggaagaagaagagcggcgtctgccgaagcagcaacagactgtgttgtcggaaaaccgacagataataaaatggaagaagccaccgagcagagtgctcaagatcagctttgcaatatgggtagggggggttgctaatgattttgcagctttcggttgtaaactccaaagtggacttcgtacaacttgggagttgggacgatgtgcatcgctttgtttgaggacttggtgtccaacgatgagcgatctatgctatgtgagctaaaaaatacttatctgttctaaattaaaattcgttttatctttttagtagattcataaaatagttgatgtatatatatgttctatgtatctatctatattcatt

SEQ ID NO: 52161 - DNA, 1268 bp, Zea Mays
attctattttatgcttattgccctgcggaagttaattacctaggtcagttctgtcatcccaaccttgtcaagctgattggatactgcttagaggatgagcaccgactgctagtgtacgagttcatgccccgcgggagcttggaaaatcatctgtttaggagaggctcatatttccaacctctgtcatggaaccttagaatgaaggttgcactaggagcagcaaaaggactggcttaccttcatagtggagaggcaaaagttatttaccgagatttcaagacttccaacatcctgcttgatacagattattctgcaaagctttctgattttggattggctaaggatggtcctgttggtgagaagagccatgtgtccacaagagtcatgggaacatatggttatgcagctcctgagtatctctcaacaggccacctaaccgcaaagagcgacatctatagctttggagtcgtacttctggaggtgctgtcaggccggcgggccattgacaagaaccgcccccagggtgagcacaaccttgtggagtgggctcgaccttacctcacacacaagcgcaagatattccggatcctggataccaggctggaaggccaatacaatctcgacggcgcacaagccattgccgccctttctcttgagtgcctgtcctacgaagctaagatgaggccgactatggatgccgtggtaactatcctagaggagctccaagactctggtgaggccgagaagcgtcaaggacccaaggctggaaccaaacaggcgcctgctgctgctgccgcgagcgctagcaagagcagtcgcaagcttcgccggagaaccctgggagggacgaaggagacgactgttggtccaaatccaaaaccattattggcccgttctcgttagcgaggaaagggaaagcgttgcttggtcaggtggtttgggtaggtagactgtagcttgtgaatatgatctgtcctgtgtataacgagggtaaacggattcttttttttggcaacgagtcttgtcgttttttattttatcgtgagctgctcggtttctgcattatctggatcctggatgtcgaaacccatggcatggcatcaagggaggagaggccatgttccgagtgtttaacctgagtcattatgttttgctgcaggctgcatttgttccaggtaataggatgttcagttcagttgactgttccgcagccaggacatgccttagtgccgttgactgttccccagccaggacatgatatgtatccg

SEQ ID NO: 52162 - DNA, 1598 bp, Zea Mays
aacaaagcaaaaaatatattagaaatcggaatgttctcaaagagtggtggtaaggatgggagtaggcttagcggctgtagtagtcgagcctcttcagcttccatgcctccaagtgtgaagactgaatgtgaaatcctgcaatccgccaatgttaagatcttcaccttcaataatctcaaggcagccacaaggaatttccgtcctgatagtgttctaggtgaaggagggttcggctctgtctataaaggatgggtcgatgagaacacattatcaccttgcaggcctggcactggaattgctgttgctgtgaaaagactaaatcatgagggtttgcaagggcaccgagagtggtgggcggaagttaattacctaggtcagttctgtcatcccaaccttgtcaagctgattggatactgcttagaggatgagcaccgactgctagtgtacgagttcatgccccgcgggagcttggaaaatcatctgtttaggagaggctcatatttccaacctctgtcatggaaccttagaatgaaggttgcactaggagcagcaaaaggactggcttaccttcatagtggagaggcaaaagttatttaccgagatttcaagacttccaacatcctgcttgatacagattattctgcaaagctttctgattttggattggctaaggatggtcctgttggtgagaagagccatgtgtccacaagagtcatgggaacatatggttatgcagctcctgagtatctctcaacaggccacctaaccgcaaagagcgacatctatagctttggagtcgtacttctggaggtgctgtcaggccggcgggccattgacaagaaccgcccccagggtgagcacaaccttgtggagtgggctcgaccttacctcacacacaagcgcaagatattccggatcctggataccaggctggaaggccaatacaatctcgacggcgcacaagccattgccgccctttctcttgagtgcctgtcctacgaagctaagatgaggccgactatggatgccgtggtaactatcctagaggagctccaagactctggtgaggccgagaagcgtcaaggacccaaggctggaaccaaacaggcgcctgctgctgctgccgcgagcgctagcaagagcagtcgcaagcttcgccggagaaccctgggagggacgaaggagacgactgttggtccaaatccaaaaccattattggcccgttctcgttagcgaggaaagggaaagcgttgcttggtcaggtggtttgggtaggtagactgtagcttgtgaatatgatctgtcctgtgtataacgagggtaaacggattcttttttttggcaacgagtcttgtcgttttttattttatcgtgagctgctcggtttctgcattatctggatcctggatgtcgaaacccatggcatggcatcaagggaggagaggccatgttccgagtgtttaacctgagtcattatgttttgctgcaggctgcatttgttccaggtaataggatgttcagttcagttgactgttccgcagccaggacatgccttagtgccgttgactgttccccagccaggacatgatatgtatccg

SEQ ID NO: 52163 - DNA, 1595 bp, Zea Mays
gaacaaagcaaaaaatatattagaaatcggaatgttctcaaagagtggtggtaaggatgggagtaggcttagcggctgtagtagtcgagcctcttcagcttccatgcctccaagtgtgaagactgaatgtgaaatcctgcaatccgccaatgttaagatcttcaccttcaataatctcaaggcagccacaaggaatttccgtcctgatagtgttctaggtgaaggagggttcggctctgtctataaaggatgggtcgatgagaacacattatcaccttgcaggcctggcactggaattgctgttgctgtgaaaagactaaatcatgagggtttgcaagggcaccgagagtggcggaagttaattacctaggtcagttctgtcatcccaaccttgtcaagctgattggatactgcttagaggatgagcaccgactgctagtgtacgagttcatgccccgcgggagcttggaaaatcatctgtttaggagaggctcatatttccaacctctgtcatggaaccttagaatgaaggttgcactaggagcagcaaaaggactggcttaccttcatagtggagaggcaaaagttatttaccgagatttcaagacttccaacatcctgcttgatacagattattctgcaaagctttctgattttggattggctaaggatggtcctgttggtgagaagagccatgtgtccacaagagtcatgggaacatatggttatgcagctcctgagtatctctcaacaggccacctaaccgcaaagagcgacatctatagctttggagtcgtacttctggaggtgctgtcaggccggcgggccattgacaagaaccgcccccagggtgagcacaaccttgtggagtgggctcgaccttacctcacacacaagcgcaagatattccggatcctggataccaggctggaaggccaatacaatctcgacggcgcacaagccattgccgccctttctcttgagtgcctgtcctacgaagctaagatgaggccgactatggatgccgtggtaactatcctagaggagctccaagactctggtgaggccgagaagcgtcaaggacccaaggctggaaccaaacaggcgcctgctgctgctgccgcgagcgctagcaagagcagtcgcaagcttcgccggagaaccctgggagggacgaaggagacgactgttggtccaaatccaaaaccattattggcccgttctcgttagcgaggaaagggaaagcgttgcttggtcaggtggtttgggtaggtagactgtagcttgtgaatatgatctgtcctgtgtataacgagggtaaacggattcttttttttggcaacgagtcttgtcgttttttattttatcgtgagctgctcggtttctgcattatctggatcctggatgtcgaaacccatggcatggcatcaagggaggagaggccatgttccgagtgtttaacctgagtcattatgttttgctgcaggctgcatttgttccaggtaataggatgttcagttcagttgactgttccgcagccaggacatgccttagtgccgttgactgttccccagccaggacatgatatgtatccg

SEQ ID NO: 52164 - DNA, 1958 bp, Zea Mays
ggtaacagtacacacgcctcccttgcccgccattaactgcctcacgctcttctcttgctcgctcggctcactccctccacaaagcggcagcctcacgcgctccaccacgccaccaccctccttcctctctatatactcactcctcccgttttccgtccattttcatccatccgcccacagcttcgcagcccgcgcccctaaaaccctagccccggcggatcgcggggcgcctctggtgccagcgacgcggctcgtttgatccgattggttggtcgggccccgccctcgctgccgcgcttcgctccggcggtgtggcggggagagcaccgagcacgcgggaatggggaactgctggggcgcgcggatcaaggacgggagcgctggcgcctcaggaatgttctcaaagagtggtggtaaggatgggagtaggcttagcggctgtagtagtcgagcctcttcagcttccatgcctccaagtgtgaagactgaatgtgaaatcctgcaatccgccaatgttaagatcttcaccttcaataatctcaaggcagccacaaggaatttccgtcctgatagtgttctaggtgaaggagggttcggctctgtctataaaggatgggtcgatgagaacacattatcaccttgcaggcctggcactggaattgctgttgctgtgaaaagactaaatcatgagggtttgcaagggcaccgagagtggcggaagttaattacctaggtcagttctgtcatcccaaccttgtcaagctgattggatactgcttagaggatgagcaccgactgctagtgtacgagttcatgccccgcgggagcttggaaaatcatctgtttaggagaggctcatatttccaacctctgtcatggaaccttagaatgaaggttgcactaggagcagcaaaaggactggcttaccttcatagtggagaggcaaaagttatttaccgagatttcaagacttccaacatcctgcttgatacagattattctgcaaagctttctgattttggattggctaaggatggtcctgttggtgagaagagccatgtgtccacaagagtcatgggaacatatggttatgcagctcctgagtatctctcaacaggccacctaaccgcaaagagcgacatctatagctttggagtcgtacttctggaggtgctgtcaggccggcgggccattgacaagaaccgcccccagggtgagcacaaccttgtggagtgggctcgaccttacctcacacacaagcgcaagatattccggatcctggataccaggctggaaggccaatacaatctcgacggcgcacaagccattgccgccctttctcttgagtgcctgtcctacgaagctaagatgaggccgactatggatgccgtggtaactatcctagaggagctccaagactctggtgaggccgagaagcgtcaaggacccaaggctggaaccaaacaggcgcctgctgctgctgccgcgagcgctagcaagagcagtcgcaagcttcgccggagaaccctgggagggacgaaggagacgactgttggtccaaatccaaaaccattattggcccgttctcgttagcgaggaaagggaaagcgttgcttggtcaggtggtttgggtaggtagactgtagcttgtgaatatgatctgtcctgtgtataacgagggtaaacggattcttttttttggcaacgagtcttgtcgttttttattttatcgtgagctgctcggtttctgcattatctggatcctggatgtcgaaacccatggcatggcatcaagggaggagaggccatgttccgagtgtttaacctgagtcattatgttttgctgcaggctgcatttgttccaggtaataggatgttcagttcagttgactgttccgcagccaggacatgccttagtgccgttgactgttccccagccaggacatgatatgtatccg

SEQ ID NO: 52165 - DNA, 2230 bp, Zea Mays
ctgccttctcttctctcccgtatatatgtttcacatccattatatattatataatataaataacgcaaggcctcctccactaaccaccaaaacaaacaaacaaaaaataaaggggccgggaagctaaggcaaatgaacaagctagctagccccgcatccggcctcctttaattttattccactcgctcgcttttgccatccgcccggcgggatcccatctctttcttctcctagctagctttagtttccccggcccccttcttcttcctctctatccctagtggcactagcgcagagaggcccttatctcctctccgtctcttccgcttcgccgtcatgcattccattccagtggtcgctcgcggcatgcagcagcctgctagcgtagagagcgagagcgagagcgagagggctcgccgctagtggatgttattctccgatccacctttaccatcgatgatgcacccctccctcgcccccatccttgcatgatccgatcccctaaagcgcctatatacccttatcttgcaaactaaagcaagcaggagagagctgggcgactgcgaggaggaacaaacaaacaaaccaaccagaaaagaagctctctcacacaagtagtagcaaaagatcaaaagaaatcaattctataccatggtcttttcttcggttcctgtctaccttgatccacccaattggagccagcaccaccaccagccgcagcagcagcagcagcacgctcaacatggccagcttccaagtggcggcaacggcggcggcggcggcggcatggacacgcatgcgcatcatcatcatcatcagctgccgccggtgccacctcctcctagcggggctctcatggctcctcgccctgacatgtcggctatggtccctgctgcgagcggtggtggcgggccgactagcggcggcaccgctatccgtccgggctccatgaccgagcgggccaagctcgccaagatcccgcagccggagccggggctcaagtgcccgcgctgcgagtccaccaacaccaagttctgctacttcaacaactactcgctctcccagccgcgccacttctgcaagacgtgccgccggtactggacgcgcggcggcgcgctccggaacgtccccgtgggcggcgggtgccgccgtaacaagcgcaccaagtcgtccaagtccaactcgtcatcggccgccgcctctgcttcaggcggcgcgggcgggacgtcgtcgtccacctcgtccaccgctaccggcggcagcagcagcgcgggcgccatcatgccgtctcatcaggggcagctgcagccgttcctggcctcgttgcaccaccctcttgccggcggcggcggcggcggggatcactacagcaccggcgcgtcaaggttagggttcccaggactgagctcgctggaccccatggactaccaccagttcggcgcgggcgcgggcgccggcgccagcagcgctgccatcgggctagagcagtggcgtctgccgcatatacagcagttccccttcctaagcggccgccccgaccccgtgcaaccaacaatgtctagcatttacccgttcgacttggaagggcacggcggggacgctcccggcttccccggcgggcacatgctaggtgcctccaaggtgcccggctcagccggactaatcacgcagctggcatcggttaagatggaggacaacccagcgtctgcggcgatggcgagcagctcgccgagggagttccttagcctccctgggaacctccaattctggggcggcggcggcaacaacaacggcggtgcaagtggcaacaatggaggaggcgctggcaacggcggtggtggtggcggcggtggcgctgtcgctccgggcagcagctgggtggacctgtcaggattcaactcgtcttcgtctgggaacgtcctgtgacatgccctctggtctgcatgctagctgcattaaaaaggtagccctattatttatgcaaagccttgaatcttcattttagtcatggcttctgagaaagttcaacagaaaaaaggagttgtggttgcaagattataggggctatatatatctgatagctatcgtctgcggtgacgatcgagatggcggatatggtgaatcggtctctagaaatggtaggcaaacgaaatttattcagttcttcatgcgctgttcttgtttctgctgggtggggtggggcggggcgggcgtgcatctctatattgtt

SEQ ID NO: 52166 - DNA, 1090 bp, Zea Mays
attgaccggagctgctgcacgattatactggaatatctagcggcaaacgcgagatcgggtgtcgctgtgaatgacgagtgcatgctcaagttcggcgagctgcagtcgaagaggctgcaccgcttcctaactttcaagatggacgacaagttcaaggagatcgttgtggaccaggtcggggatcgcgctaccagctacgaggacttcacaaacagcctccccgagaatgactgccgatacgcgatctatgatttcgactttgtcactgcagaagatgtccagaagagcaggatcttctatatcctatggtccccatcctccgccaaggtgaagagcaagatgctttatgcaagctcaaaccaaaaattcaagagtgggctcaatggcattcaggtggaactgcaggctactgatgcaagtgaaatcagccttgatgagatcaaggatcgggctcgctaggcatcatgatcatgcatcatggactcggcctactactgtggatttgtatgccattatagacttggtgctgtgaaagactgcttgatgatttgcgggtttgttgctgtgtaaaaaaaggtcccatggctcccagaagaccatgaaggttcggatctatcatgtaattccttgttatctgccaattatgtatggactatggacatgtgttgcgctgttcaacttactactacaaataagtaatcgatatgttcccttcccatgtctcggtgacaattgtctggagaagcttaggggtcgtttgtttgggattatgtctggagaaacttattttaaactaagtgtgagttcaagttaagttagattatataatctaggcagattataattccaagcgaacaggtccttagtgtttttggaaaatcctaggtgttcttttggctacattgttgtgtgtgcagatcccttgttggtctgtaagcgtggggaagtaagaatcgtccgtttctactgaagacctgctcgagttaggcaccgaggatgccggtaaccaaacagagcaatagtgtctctgtgggcacagtggagtgtgaatctgtgtgatgcaaatccgtcatttgtttagcaaaatttc

SEQ ID NO: 52167 - DNA, 817 bp, Zea Mays
gcccagctgaagagcaggatcttctatatcctatggtccccatcctccgccaaggtgaagagcaagatgctttatgcaagctcaaaccaaaaattcaagagtgggctcaatggcattcaggtggaactgcaggctactgatgcaagtgaaatcagccttgatgagatcaaggatcgggctcgctaggcatcatgatcatgcatcatggactcggcctactactgtggatttgtatgccattatagacttggtgctgtgaaagactgcttgatgatttgcgggtttgttgctgtgtaaaaaaaggtcccatggctcccagaagaccatgaaggttcggatctatcatgtaattccttgttatctgccaattatgtatggactatggacatgtgttgcgctgttcaacttactactacaaataagtaatcgatatgttcccttcccatgtctcggtgacaattgtctggagaagcttaggggtcgtttgtttgggattatgtctggagaaacttattttaaactaagtgtgagttcaagttaagttagattatataatctaggcagattataattccaagcgaacaggtccttagtgtttttggaaaatcctaggtgttcttttggctacattgttgtgtgtgcagatcccttgttggtctgtaagcgtggggaagtaagaatcgtccgtttctactgaagacctgctcgagttaggcaccgaggatgccggtaaccaaacagagcaatagtgtctctgtgggcacagtggagtgtgaatctgtgtgatgcaaatccgtcatttgtttagcaaaatttc

SEQ ID NO: 52168 - DNA, 1757 bp, Zea Mays
ctttgtttccacaaccgccaagacaccaagataagtagggaattaaacgaaaatgttgcgtcaaggagcactgtgttatagaatcaaaaccagatcacttcttggatgatttgcgacttcacaatccatggactgaactaaagcaatgaagaaaattacaaagaagctgtggactcatcatataaagtctcagtcactccaggaatcagtaatgagatccatcagataattgatgatgactctgcggaagtcaattcatcatcagaagatttctggattttagtagctgctttaaaggagtttatttccaaggagggtaatggtgagctacctctggagggaacaatacctgatatgacttcccttactgagtattatgtaagcttacaaaagatttaccaagctaaggcagaatttgactgtcttgccctggagcatcatgtaaaggaaatcttgaaacagattggtagagatccggattctatttcaagagcatatatcaaaacattttgtaaaaattctaggaaactaaggatttgtagatatcgtagtttcaaggaggaatttagctccccgattgtctctgagattcagaggtatttcagcgatgaagactgcagttacgcaatgaacttctacattctactacgggctgtcgatcgattggctgccaattatagccgattacctggaatcttcgacagtgagattgacgaggatatccctaggctgaagacagttgcggcttcagtgctaagcgagatgggtttgaacggagcatccttatcccaagacctggtaaccgagatgtgccggttcgggggtgcggagattcatccagtggctgctttcatcggtggagtcgcttcacaagaagtgattaagctggtcaccaagcagtttgtgcctttggggggaacattcatttttaatggaatcgatctcaaatctcaagttttggtgctataacatggatgtggagcgttggatttgagctggtccagattttgtgccagggcaccgcgctgcccaacgagtacccaagtctcgcagaaaatatcaatacttgcttcgtatgattttttgccaaatgactagcaaattcctagctcacgcggctgttatgcgtaaaaccagaagagctgctgcttttagactacgcctgttatatattagtaggcgaagtaatatgtcagtggggctgatgtgataagatggatggtgttaaagactagcgtgtgcgcgatttgacgaagacgactacgagacgggatgagcaatgagcatgtcggccgagctatggacgcttccatcatatcatggaccgacatcaatgtgcatatgatctcaggtgtccatcgacagaccgaatcttccgtggccagtattccttcggcgacgcggttgccgttagacgaaggaaactgtcgtgtgacagcgaaatgtggttgctacatgctggtagcgcacatagcacactttgggcgtgtttggttcggcttttttctaaatagcttttctgaaaagctggctgtggagaaaagctggctgttgggaaaaactggtggttagaatttaggtgtttggttcgccagctgtgcaaaaaagttgttcgttagaatataggtgtttggatacacagattctcagactgcagattctgtttgaaaaaactatacacattaacaccgaaccaacaaaaggtcattacatataattagtagagttcattacaacataactaccgttacatttac

SEQ ID NO: 52169 - DNA, 1876 bp, Zea Mays
ctttgtttccacaaccgccaagacaccaagataagtagggaattaaacgaaaatgttgcgtcaaggagcactgtgttatagaatcaaaaccagatcacttcttggatgatttgcgacttcacaatccatggactgaactaaagcaatttgcaaaatcaattgatataaatgataaagatcctgttgtccacaaacatactccatacattgttgtccttgtgagacttgctgaaaaatgggcagatgcccatgatggtaacatgccttcaactaggcaagaaaagaaggaatttaagatgaagaaaattacaaagaagctgtggactcatcatataaagtctcagtcactccaggaatcagtaatgagatccatcagataattgatgatgactctgcggaagtcaattcatcatcagaagatttctggattttagtagctgctttaaaggagtttatttccaaggagggtaatggtgagctacctctggagggaacaatacctgatatgacttcccttactgagtattatgtaagcttacaaaagatttaccaagctaaggcagaatttgactgtcttgccctggagcatcatgtaaaggaaatcttgaaacagattggtagagatccggattctatttcaagagcatatatcaaaacattttgtaaaaattctaggaaactaaggatatcgtagtttcaaggaggaatttagctccccgattgtctctgagattcagaggtatttcagcgatgaagactgcagttacgcaatgaacttctacattctactacgggctgtcgatcgattggctgccaattatagccgattacctggaatcttcgacaggctgaagacagttgcggcttcagtgctaagcgagatgggtttgaacggagcatccttatcccaagacctggtaaccgagatgtgccggttcgggggtgcggagattcatccagtggctgctttcatcggtggagtcgcttcacaagaagtgattaagctggtcaccaagcagtttgtgcctttggggggaacattcatttttaatggaatcgatctcaaatctcaagttttggtgctataacatggatgtggagcgttggatttgagctggtccagattttgtgccagggcaccgcgctgcccaacgagtacccaagtctcgcagaaaatatcaatacttgcttcgtatgattttttgccaaatgactagcaaattcctagctcacgcggctgttatgcgtaaaaccagaagagctgctgcttttagactacgcctgttatatattagtaggcgaagtaatatgtcagtggggctgatgtgataagatggatggtgttaaagactagcgtgtgcgcgatttgacgaagacgactacgagacgggatgagcaatgagcatgtcggccgagctatggacgcttccatcatatcatggaccgacatcaatgtgcatatgatctcaggtgtccatcgacagaccgaatcttccgtggccagtattccttcggcgacgcggttgccgttagacgaaggaaactgtcgtgtgacagcgaaatgtggttgctacatgctggtagcgcacatagcacactttgggcgtgtttggttcggcttttttctaaatagcttttctgaaaagctggctgtggagaaaagctggctgttgggaaaaactggtggttagaatttaggtgtttggttcgccagctgtgcaaaaaagttgttcgttagaatataggtgtttggatacacagattctcagactgcagattctgtttgaaaaaactatacacattaacaccgaaccaacaaaaggtcattacatataattagtagagttcattacaacataactaccgttacatttac

SEQ ID NO: 52170 - DNA, 2033 bp, Zea Mays
ctttgcgtgtgttccatttggatgaccctgatactcttcctgaacctgcttccagagagttctttactgaagctagatgatatttgcaggaaagcagacatcgttttggttgctgcacgttcatatggtctaactggtttggtcagggttagcgtcaaggagcactgtgttatagaatcaaaaccagatcacttcttggatgatttgcgacttcacaatccatggactgaactaaagcaatttgcaaaatcaattgatataaatgataaagatcctgttgtccacaaacatactccatacattgttgtccttgtgagacttgctgaaaaatgggcagatgcccatgatggtaacatgccttcaactaggcaagaaaagaaggaatttaaggacctaattcgagcccacatgcttaatgtagatgaagaaaattacaaagaagctgtggactcatcatataaagtctcagtcactccaggaatcagtaatgagatccatcagataattgatgatgactctgcggaagtcaattcatcatcagaagatttctggattttagtagctgctttaaaggagtttatttccaaggagggtaatggtgagctacctctggagggaacaatacctgatatgacttcccttactgagtattatgtaagcttacaaaagatttaccaagctaaggcagaatttgactgtcttgccctggagcatcatgtaaaggaaatcttgaaacagattggtagagatccggattctatttcaagagcatatatcaaaacattttgtaaaaattctaggaaactaaggatttgtagatatcgtagtttcaaggaggaatttagctccccgattgtctctgagattcagaggtatttcagcgatgaagactgcagttacgcaatgaacttctacattctactacgggctgtcgatcgattggctgccaattatagccgattacctggaatcttcgacagtgagattgacgaggatatccctaggctgaagacagttgcggcttcagtgctaagcgagatgggtttgaacggagcatccttatcccaagacctggtaaccgagatgtgccggttcgggggtgcggagattcatccagtggctgctttcatcggtggagtcgcttcacaagaagtgattaagctggtcaccaagcagtttgtgcctttggggggaacattcatttttaatggaatcgatctcaaatctcaagttttggtgctataacatggatgtggagcgttggatttgagctggtccagattttgtgccagggcaccgcgctgcccaacgagtacccaagtctcgcagaaaatatcaatacttgcttcgtatgattttttgccaaatgactagcaaattcctagctcacgcggctgttatgcgtaaaaccagaagagctgctgcttttagactacgcctgttatatattagtaggcgaagtaatatgtcagtggggctgatgtgataagatggatggtgttaaagactagcgtgtgcgcgatttgacgaagacgactacgagacgggatgagcaatgagcatgtcggccgagctatggacgcttccatcatatcatggaccgacatcaatgtgcatatgatctcaggtgtccatcgacagaccgaatcttccgtggccagtattccttcggcgacgcggttgccgttagacgaaggaaactgtcgtgtgacagcgaaatgtggttgctacatgctggtagcgcacatagcacactttgggcgtgtttggttcggcttttttctaaatagcttttctgaaaagctggctgtggagaaaagctggctgttgggaaaaactggtggttagaatttaggtgtttggttcgccagctgtgcaaaaaagttgttcgttagaatataggtgtttggatacacagattctcagactgcagattctgtttgaaaaaactatacacattaacaccgaaccaacaaaaggtcattacatataattagtagagttcattacaacataactaccgttacatttac

SEQ ID NO: 52171 - DNA, 2350 bp, Zea Mays
acgctaaagacccttttgcgtttgttaggatatggggtgatcaaggccaaactgcactggagaaggccagcatatgcttgcttaactgtggtcctaccggaacagaagcattgaagaatctcgtgcttggaggaataggaagtgtgactgctgttgatggctccaaagttgaagcatctgatctggggaacaattttatgttggatgaaggatgtttggggcaaccaagagctaaatctatatgttcattcctacaagagcttaatgacgctgttaaagccaagtttgttgaggagtttccaacgcatttgatagacactaatccttcattcttttcccagtttactgttgtcattgctactcagcttccagagagttctttactgaagctagatgatatttgcaggaaagcagacatcgttttggttgctgcacgttcatatggtctaactggtttggtcagggttagcgtcaaggagcactgtgttatagaatcaaaaccagatcacttcttggatgatttgcgacttcacaatccatggactgaactaaagcaatttgcaaaatcaattgatataaatgataaagatcctgttgtccacaaacatactccatacattgttgtccttgtgagacttgctgaaaaatgggcagatgcccatgatggtaacatgccttcaactaggcaagaaaagaaggaatttaaggacctaattcgagcccacatgcttaatgtagatgaagaaaattacaaagaagctgtggactcatcatataaagtctcagtcactccaggaatcagtaatgagatccatcagataattgatgatgactctgcggaagtcaattcatcatcagaagatttctggattttagtagctgctttaaaggagtttatttccaaggagggtaatggtgagctacctctggagggaacaatacctgatatgacttcccttactgagtattatgtaagcttacaaaagatttaccaagctaaggcagaatttgactgtcttgccctggagcatcatgtaaaggaaatcttgaaacagattggtagagatccggattctatttcaagagcatatatcaaaacattttgtaaaaattctaggaaactaaggatttgtagatatcgtagtttcaaggaggaatttagctccccgattgtctctgagattcagaggtatttcagcgatgaagactgcagttacgcaatgaacttctacattctactacgggctgtcgatcgattggctgccaattatagccgattacctggaatcttcgacagtgagattgacgaggatatccctaggctgaagacagttgcggcttcagtgctaagcgagatgggtttgaacggagcatccttatcccaagacctggtaaccgagatgtgccggttcgggggtgcggagattcatccagtggctgctttcatcggtggagtcgcttcacaagaagtgattaagctggtcaccaagcagtttgtgcctttggggggaacattcatttttaatggaatcgatctcaaatctcaagttttggtgctataacatggatgtggagcgttggatttgagctggtccagattttgtgccagggcaccgcgctgcccaacgagtacccaagtctcgcagaaaatatcaatacttgcttcgtatgattttttgccaaatgactagcaaattcctagctcacgcggctgttatgcgtaaaaccagaagagctgctgcttttagactacgcctgttatatattagtaggcgaagtaatatgtcagtggggctgatgtgataagatggatggtgttaaagactagcgtgtgcgcgatttgacgaagacgactacgagacgggatgagcaatgagcatgtcggccgagctatggacgcttccatcatatcatggaccgacatcaatgtgcatatgatctcaggtgtccatcgacagaccgaatcttccgtggccagtattccttcggcgacgcggttgccgttagacgaaggaaactgtcgtgtgacagcgaaatgtggttgctacatgctggtagcgcacatagcacactttgggcgtgtttggttcggcttttttctaaatagcttttctgaaaagctggctgtggagaaaagctggctgttgggaaaaactggtggttagaatttaggtgtttggttcgccagctgtgcaaaaaagttgttcgttagaatataggtgtttggatacacagattctcagactgcagattctgtttgaaaaaactatacacattaacaccgaaccaacaaaaggtcattacatataattagtagagttcattacaacataactaccgttacatttac

SEQ ID NO: 52172 - DNA, 2723 bp, Zea Mays
acgctaaagacccttttgcgtttgttaggatatggggtgatcaaggccaaactgcactggagaaggccagcatatgcttgcttaactgtggtcctaccggaacagaagcattgaagaatctcgtgcttggaggaataggaagtgtgactgctgttgatggctccaaagttgaagcatctgatctggggaacaattttatgttggatgaaggatgtttggggcaaccaagagctaaatctatatgttcattcctacaagagcttaatgacgctgttaaagccaagtttgttgaggagtttccaacgcatttgatagacactaatccttcattcttttcccagtttactgttgtcattgctactcagcttccagagagttctttactgaagctagatgatatttgcaggaaagcagacatcgttttggttgctgcacgttcatatggtctaactggtttggtcagggttagcgtcaaggtacttttttctctcgaacacgcaggagaactgcgcgtcattatattaagaggaaaaaaggtcccaagtggaccaagaaaacaaagtgcccgagaaggcagcagacgagaagagggggacaaaaagaaaaaagagaagaacaaaaataaaagaaactagaaacaagagggaaaaagggggaggggggacaacccccaccaccccatctaaattaatgccacaactgtctaatatcttttgctcctgccattccccaaagcttaacatcctcatgaatctcttgcaaaatgttgcggatactcggaggtaccccatcaaacacgcaagcattcctttgtttccacaaccgccaagacaccaagataagtagggaattaaacgaaaatgttgcgtcaaggagcactgtgttatagaatcaaaaccagatcacttcttggatgatttgcgacttcacaatccatggactgaactaaagcaatttgcaaaatcaattgatataaatgataaagatcctgttgtccacaaacatactccatacattgttgtccttgtgagacttgctgaaaaatgggcagatgcccatgatggtaacatgccttcaactaggcaagaaaagaaggaatttaaggacctaattcgagcccacatgcttaatgtagatgaagaaaattacaaagaagctgtggactcatcatataaagtctcagtcactccaggaatcagtaatgagatccatcagataattgatgatgactctgcggaagtcaattcatcatcagaagatttctggattttagtagctgctttaaaggagtttatttccaaggagggtaatggtgagctacctctggagggaacaatacctgatatgacttcccttactgagtattatgtaagcttacaaaagatttaccaagctaaggcagaatttgactgtcttgccctggagcatcatgtaaaggaaatcttgaaacagattggtagagatccggattctatttcaagagcatatatcaaaacattttgtaaaaattctaggaaactaaggatttgtagatatcgtagtttcaaggaggaatttagctccccgattgtctctgagattcagaggtatttcagcgatgaagactgcagttacgcaatgaacttctacattctactacgggctgtcgatcgattggctgccaattatagccgattacctggaatcttcgacaggctgaagacagttgcggcttcagtgctaagcgagatgggtttgaacggagcatccttatcccaagacctggtaaccgagatgtgccggttcgggggtgcggagattcatccagtggctgctttcatcggtggagtcgcttcacaagaagtgattaagctggtcaccaagcagtttgtgcctttggggggaacattcatttttaatggaatcgatctcaaatctcaagttttggtgctataacatggatgtggagcgttggatttgagctggtccagattttgtgccagggcaccgcgctgcccaacgagtacccaagtctcgcagaaaatatcaatacttgcttcgtatgattttttgccaaatgactagcaaattcctagctcacgcggctgttatgcgtaaaaccagaagagctgctgcttttagactacgcctgttatatattagtaggcgaagtaatatgtcagtggggctgatgtgataagatggatggtgttaaagactagcgtgtgcgcgatttgacgaagacgactacgagacgggatgagcaatgagcatgtcggccgagctatggacgcttccatcatatcatggaccgacatcaatgtgcatatgatctcaggtgtccatcgacagaccgaatcttccgtggccagtattccttcggcgacgcggttgccgttagacgaaggaaactgtcgtgtgacagcgaaatgtggttgctacatgctggtagcgcacatagcacactttgggcgtgtttggttcggcttttttctaaatagcttttctgaaaagctggctgtggagaaaagctggctgttgggaaaaactggtggttagaatttaggtgtttggttcgccagctgtgcaaaaaagttgttcgttagaatataggtgtttggatacacagattctcagactgcagattctgtttgaaaaaactatacacattaacaccgaaccaacaaaaggtcattacatataattagtagagttcattacaacataactaccgttacatttac

SEQ ID NO: 52173 - DNA, 2756 bp, Zea Mays
gtaaccattacgctaaagacccttttgcgtttgttaggatatggggtgatcaaggccaaactgcactggagaaggccagcatatgcttgcttaactgtggtcctaccggaacagaagcattgaagaatctcgtgcttggaggaataggaagtgtgactgctgttgatggctccaaagttgaagcatctgatctggggaacaattttatgttggatgaaggatgtttggggcaaccaagagctaaatctatatgttcattcctacaagagcttaatgacgctgttaaagccaagtttgttgaggagtttccaacgcatttgatagacactaatccttcattcttttcccagtttactgttgtcattgctactcagcttccagagagttctttactgaagctagatgatatttgcaggaaagcagacatcgttttggttgctgcacgttcatatggtctaactggtttggtcagggttagcgtcaaggtacttttttctctcgaacacgcaggagaactgcgcgtcattatattaagaggaaaaaaggtcccaagtggaccaagaaaacaaagtgcccgagaaggcagcagacgagaagagggggacaaaaagaaaaaagagaagaacaaaaataaaagaaactagaaacaagagggaaaaagggggaggggggacaacccccaccaccccatctaaattaatgccacaactgtctaatatcttttgctcctgccattccccaaagcttaacatcctcatgaatctcttgcaaaatgttgcggatactcggaggtaccccatcaaacacgcaagcattcctttgtttccacaaccgccaagacaccaagataagtagggaattaaacgaaaatgttgcgtcaaggagcactgtgttatagaatcaaaaccagatcacttcttggatgatttgcgacttcacaatccatggactgaactaaagcaatttgcaaaatcaattgatataaatgataaagatcctgttgtccacaaacatactccatacattgttgtccttgtgagacttgctgaaaaatgggcagatgcccatgatggtaacatgccttcaactaggcaagaaaagaaggaatttaaggacctaattcgagcccacatgcttaatgtagatgaagaaaattacaaagaagctgtggactcatcatataaagtctcagtcactccaggaatcagtaatgagatccatcagataattgatgatgactctgcggaagtcaattcatcatcagaagatttctggattttagtagctgctttaaaggagtttatttccaaggagggtaatggtgagctacctctggagggaacaatacctgatatgacttcccttactgagtattatgtaagcttacaaaagatttaccaagctaaggcagaatttgactgtcttgccctggagcatcatgtaaaggaaatcttgaaacagattggtagagatccggattctatttcaagagcatatatcaaaacattttgtaaaaattctaggaaactaaggatttgtagatatcgtagtttcaaggaggaatttagctccccgattgtctctgagattcagaggtatttcagcgatgaagactgcagttacgcaatgaacttctacattctactacgggctgtcgatcgattggctgccaattatagccgattacctggaatcttcgacagtgagattgacgaggatatccctaggctgaagacagttgcggcttcagtgctaagcgagatgggtttgaacggagcatccttatcccaagacctggtaaccgagatgtgccggttcgggggtgcggagattcatccagtggctgctttcatcggtggagtcgcttcacaagaagtgattaagctggtcaccaagcagtttgtgcctttggggggaacattcatttttaatggaatcgatctcaaatctcaagttttggtgctataacatggatgtggagcgttggatttgagctggtccagattttgtgccagggcaccgcgctgcccaacgagtacccaagtctcgcagaaaatatcaatacttgcttcgtatgattttttgccaaatgactagcaaattcctagctcacgcggctgttatgcgtaaaaccagaagagctgctgcttttagactacgcctgttatatattagtaggcgaagtaatatgtcagtggggctgatgtgataagatggatggtgttaaagactagcgtgtgcgcgatttgacgaagacgactacgagacgggatgagcaatgagcatgtcggccgagctatggacgcttccatcatatcatggaccgacatcaatgtgcatatgatctcaggtgtccatcgacagaccgaatcttccgtggccagtattccttcggcgacgcggttgccgttagacgaaggaaactgtcgtgtgacagcgaaatgtggttgctacatgctggtagcgcacatagcacactttgggcgtgtttggttcggcttttttctaaatagcttttctgaaaagctggctgtggagaaaagctggctgttgggaaaaactggtggttagaatttaggtgtttggttcgccagctgtgcaaaaaagttgttcgttagaatataggtgtttggatacacagattctcagactgcagattctgtttgaaaaaactatacacattaacaccgaaccaacaaaaggtcattacatataattagtagagttcattacaacataactaccgttacatttac

SEQ ID NO: 52174 - DNA, 2953 bp, Zea Mays
aagaccaccctcccggtattatattaaaaagagatcgaaacatggttccaacgagaaaattcccccccccctcactagcgggccgtcaccgctcactctgcaacggcccagccggagggtggcgcacaagacgtaacccgggagcgggaggagattttttttaaccaagccagaaaatcgcccccgagggagatcgaacccaggacctgtaggtgctactcggaagccgtaaccattacgctaaagacccttttgcgtttgttaggatatggggtgatcaaggccaaactgcactggagaaggccagcatatgcttgcttaactgtggtcctaccggaacagaagcattgaagaatctcgtgcttggaggaataggaagtgtgactgctgttgatggctccaaagttgaagcatctgatctggggaacaattttatgttggatgaaggatgtttggggcaaccaagagctaaatctatatgttcattcctacaagagcttaatgacgctgttaaagccaagtttgttgaggagtttccaacgcatttgatagacactaatccttcattcttttcccagtttactgttgtcattgctactcagcttccagagagttctttactgaagctagatgatatttgcaggaaagcagacatcgttttggttgctgcacgttcatatggtctaactggtttggtcagggttagcgtcaaggtacttttttctctcgaacacgcaggagaactgcgcgtcattatattaagaggaaaaaaggtcccaagtggaccaagaaaacaaagtgcccgagaaggcagcagacgagaagagggggacaaaaagaaaaaagagaagaacaaaaataaaagaaactagaaacaagagggaaaaagggggaggggggacaacccccaccaccccatctaaattaatgccacaactgtctaatatcttttgctcctgccattccccaaagcttaacatcctcatgaatctcttgcaaaatgttgcggatactcggaggtaccccatcaaacacgcaagcattcctttgtttccacaaccgccaagacaccaagataagtagggaattaaacgaaaatgttgcgtcaaggagcactgtgttatagaatcaaaaccagatcacttcttggatgatttgcgacttcacaatccatggactgaactaaagcaatttgcaaaatcaattgatataaatgataaagatcctgttgtccacaaacatactccatacattgttgtccttgtgagacttgctgaaaaatgggcagatgcccatgatggtaacatgccttcaactaggcaagaaaagaaggaatttaagatgaagaaaattacaaagaagctgtggactcatcatataaagtctcagtcactccaggaatcagtaatgagatccatcagataattgatgatgactctgcggaagtcaattcatcatcagaagatttctggattttagtagctgctttaaaggagtttatttccaaggagggtaatggtgagctacctctggagggaacaatacctgatatgacttcccttactgagtattatgtaagcttacaaaagatttaccaagctaaggcagaatttgactgtcttgccctggagcatcatgtaaaggaaatcttgaaacagattggtagagatccggattctatttcaagagcatatatcaaaacattttgtaaaaattctaggaaactaaggatttgtagatatcgtagtttcaaggaggaatttagctccccgattgtctctgagattcagaggtatttcagcgatgaagactgcagttacgcaatgaacttctacattctactacgggctgtcgatcgattggctgccaattatagccgattacctggaatcttcgacagtgagattgacgaggatatccctaggctgaagacagttgcggcttcagtgctaagcgagatgggtttgaacggagcatccttatcccaagacctggtaaccgagatgtgccggttcgggggtgcggagattcatccagtggctgctttcatcggtggagtcgcttcacaagaagtgattaagctggtcaccaagcagtttgtgcctttggggggaacattcatttttaatggaatcgatctcaaatctcaagttttggtgctataacatggatgtggagcgttggatttgagctggtccagattttgtgccagggcaccgcgctgcccaacgagtacccaagtctcgcagaaaatatcaatacttgcttcgtatgattttttgccaaatgactagcaaattcctagctcacgcggctgttatgcgtaaaaccagaagagctgctgcttttagactacgcctgttatatattagtaggcgaagtaatatgtcagtggggctgatgtgataagatggatggtgttaaagactagcgtgtgcgcgatttgacgaagacgactacgagacgggatgagcaatgagcatgtcggccgagctatggacgcttccatcatatcatggaccgacatcaatgtgcatatgatctcaggtgtccatcgacagaccgaatcttccgtggccagtattccttcggcgacgcggttgccgttagacgaaggaaactgtcgtgtgacagcgaaatgtggttgctacatgctggtagcgcacatagcacactttgggcgtgtttggttcggcttttttctaaatagcttttctgaaaagctggctgtggagaaaagctggctgttgggaaaaactggtggttagaatttaggtgtttggttcgccagctgtgcaaaaaagttgttcgttagaatataggtgtttggatacacagattctcagactgcagattctgtttgaaaaaactatacacattaacaccgaaccaacaaaaggtcattacatataattagtagagttcattacaacataactaccgttacatttac

SEQ ID NO: 52175 - DNA, 3259 bp, Zea Mays
aaacttagagagtgaagactgaagactcccgcgctttacgggtttggacctcacctgtcaggctgtcacctcatacagtacgctcggctctaccgggcagatgcacccatctgtttcgcggagaagcccgtcctcgtcggagtgtagaggggcgaagcgatccgaactccgagaaccccagggccagggctcagtccacagcgagagcagagaacgcagcggcctgccggcctccgccccgcactcccgcagccatggccgccgccgccgccgtggttgccgagcccaagaccaagtacgatcgccagctcaggatatggggtgatcaaggccaaactgcactggagaaggccagcatatgcttgcttaactgtggtcctaccggaacagaagcattgaagaatctcgtgcttggaggaataggaagtgtgactgctgttgatggctccaaagttgaagcatctgatctggggaacaattttatgttggatgaaggatgtttggggcaaccaagagctaaatctatatgttcattcctacaagagcttaatgacgctgttaaagccaagtttgttgaggagtttccaacgcatttgatagacactaatccttcattcttttcccagtttactgttgtcattgctactcagcttccagagagttctttactgaagctagatgatatttgcaggaaagcagacatcgttttggttgctgcacgttcatatggtctaactggtttggtcagggttagcgtcaaggtacttttttctctcgaacacgcaggagaactgcgcgtcattatattaagaggaaaaaaggtcccaagtggaccaagaaaacaaagtgcccgagaaggcagcagacgagaagagggggacaaaaagaaaaaagagaagaacaaaaataaaagaaactagaaacaagagggaaaaagggggaggggggacaacccccaccaccccatctaaattaatgccacaactgtctaatatcttttgctcctgccattccccaaagcttaacatcctcatgaatctcttgcaaaatgttgcggatactcggaggtaccccatcaaacacgcaagcattcctttgtttccacaaccgccaagacaccaagataagtagggaattaaacgaaaatgttgcgtcaaggtactttgatacatttatgtccaaaacatagttaattatcatgacatcacagttgcagatagcaagacattgtgattttgtacgctcatacattcatattagtgtatggaaaaatactgttgtatatgatttttcccttttctgggagttatgtctctactaccttggcgggaagtcataacaaaagtattttgggaagattcacatatttatttattgttctccaggagcactgtgttatagaatcaaaaccagatcacttcttggatgatttgcgacttcacaatccatggactgaactaaagcaatttgcaaaatcaattgatataaatgataaagatcctgttgtccacaaacatactccatacattgttgtccttgtgagacttgctgaaaaatgggcagatgcccatgatggtaacatgccttcaactaggcaagaaaagaaggaatttaaggacctaattcgagcccacatgcttaatgtagatgaagaaaattacaaagaagctgtggactcatcatataaagtctcagtcactccaggaatcagtaatgagatccatcagataattgatgatgactctgcggaagtcaattcatcatcagaagatttctggattttagtagctgctttaaaggagtttatttccaaggagggtaatggtgagctacctctggagggaacaatacctgatatgacttcccttactgagtattatgtaagcttacaaaagatttaccaagctaaggcagaatttgactgtcttgccctggagcatcatgtaaaggaaatcttgaaacagattggtagagatccggattctatttcaagagcatatatcaaaacattttgtaaaaattctaggaaactaaggatttgtagatatcgtagtttcaaggaggaatttagctccccgattgtctctgagattcagaggtatttcagcgatgaagactgcagttacgcaatgaacttctacattctactacgggctgtcgatcgattggctgccaattatagccgattacctggaatcttcgacagtgagattgacgaggatatccctaggctgaagacagttgcggcttcagtgctaagcgagatgggtttgaacggagcatccttatcccaagacctggtaaccgagatgtgccggttcgggggtgcggagattcatccagtggctgctttcatcggtggagtcgcttcacaagaagtgattaagctggtcaccaagcagtttgtgcctttggggggaacattcatttttaatggaatcgatctcaaatctcaagttttggtgctataacatggatgtggagcgttggatttgagctggtccagattttgtgccagggcaccgcgctgcccaacgagtacccaagtctcgcagaaaatatcaatacttgcttcgtatgattttttgccaaatgactagcaaattcctagctcacgcggctgttatgcgtaaaaccagaagagctgctgcttttagactacgcctgttatatattagtaggcgaagtaatatgtcagtggggctgatgtgataagatggatggtgttaaagactagcgtgtgcgcgatttgacgaagacgactacgagacgggatgagcaatgagcatgtcggccgagctatggacgcttccatcatatcatggaccgacatcaatgtgcatatgatctcaggtgtccatcgacagaccgaatcttccgtggccagtattccttcggcgacgcggttgccgttagacgaaggaaactgtcgtgtgacagcgaaatgtggttgctacatgctggtagcgcacatagcacactttgggcgtgtttggttcggcttttttctaaatagcttttctgaaaagctggctgtggagaaaagctggctgttgggaaaaactggtggttagaatttaggtgtttggttcgccagctgtgcaaaaaagttgttcgttagaatataggtgtttggatacacagattctcagactgcagattctgtttgaaaaaactatacacattaacaccgaaccaacaaaaggtcattacatataattagtagagttcattacaacataactaccgttacatttac

SEQ ID NO: 52176 - DNA, 3312 bp, Zea Mays
aaacttagagagtgaagactgaagactcccgcgctttacgggtttggacctcacctgtcaggctgtcacctcatacagtacgctcggctctaccgggcagatgcacccatctgtttcgcggagaagcccgtcctcgtcggagtgtagaggggcgaagcgatccgaactccgagaaccccagggccagggctcagtccacagcgagagcagagaacgcagcggcctgccggcctccgccccgcactcccgcagccatggccgccgccgccgccgtggttgccgagcccaagaccaagtacgatcgccagctcaggatatggggtgatcaaggccaaactgcactggagaaggccagcatatgcttgcttaactgtggtcctaccggaacagaagcattgaagaatctcgtgcttggaggaataggaagtgtgactgctgttgatggctccaaagttgaagcatctgatctggggaacaattttatgtgtaatttctttgctatgtgattccacctgttcttctgaattcatccccagaaattgatggaactcatattctggtaccttatatttgcattcagtggatgaaggatgtttggggcaaccaagagctaaatctatatgttcattcctacaagagcttaatgacgctgttaaagccaagtttgttgaggagtttccaacgcatttgatagacactaatccttcattcttttcccagtttactgttgtcattgctactcaggaaagcagacatcgttttggttgctgcacgttcatatggtctaactggtttggtcagggttagcgtcaaggtacttttttctctcgaacacgcaggagaactgcgcgtcattatattaagaggaaaaaaggtcccaagtggaccaagaaaacaaagtgcccgagaaggcagcagacgagaagagggggacaaaaagaaaaaagagaagaacaaaaataaaagaaactagaaacaagagggaaaaagggggaggggggacaacccccaccaccccatctaaattaatgccacaactgtctaatatcttttgctcctgccattccccaaagcttaacatcctcatgaatctcttgcaaaatgttgcggatactcggaggtaccccatcaaacacgcaagcattcctttgtttccacaaccgccaagacaccaagataagtagggaattaaacgaaaatgttgcgtcaaggtactttgatacatttatgtccaaaacatagttaattatcatgacatcacagttgcagatagcaagacattgtgattttgtacgctcatacattcatattagtgtatggaaaaatactgttgtatatgatttttcccttttctgggagttatgtctctactaccttggcgggaagtcataacaaaagtattttgggaagattcacatatttatttattgttctccaggagcactgtgttatagaatcaaaaccagatcacttcttggatgatttgcgacttcacaatccatggactgaactaaagcaatttgcaaaatcaattgatataaatgataaagatcctgttgtccacaaacatactccatacattgttgtccttgtgagacttgctgaaaaatgggcagatgcccatgatggtaacatgccttcaactaggcaagaaaagaaggaatttaaggacctaattcgagcccacatgcttaatgtagatgaagaaaattacaaagaagctgtggactcatcatataaagtctcagtcactccaggaatcagtaatgagatccatcagataattgatgatgactctgcggaagtcaattcatcatcagaagatttctggattttagtagctgctttaaaggagtttatttccaaggagggtaatggtgagctacctctggagggaacaatacctgatatgacttcccttactgagtattatgtaagcttacaaaagatttaccaagctaaggcagaatttgactgtcttgccctggagcatcatgtaaaggaaatcttgaaacagattggtagagatccggattctatttcaagagcatatatcaaaacattttgtaaaaattctaggaaactaaggatttgtagatatcgtagtttcaaggaggaatttagctccccgattgtctctgagattcagaggtatttcagcgatgaagactgcagttacgcaatgaacttctacattctactacgggctgtcgatcgattggctgccaattatagccgattacctggaatcttcgacagtgagattgacgaggatatccctaggctgaagacagttgcggcttcagtgctaagcgagatgggtttgaacggagcatccttatcccaagacctggtaaccgagatgtgccggttcgggggtgcggagattcatccagtggctgctttcatcggtggagtcgcttcacaagaagtgattaagctggtcaccaagcagtttgtgcctttggggggaacattcatttttaatggaatcgatctcaaatctcaagttttggtgctataacatggatgtggagcgttggatttgagctggtccagattttgtgccagggcaccgcgctgcccaacgagtacccaagtctcgcagaaaatatcaatacttgcttcgtatgattttttgccaaatgactagcaaattcctagctcacgcggctgttatgcgtaaaaccagaagagctgctgcttttagactacgcctgttatatattagtaggcgaagtaatatgtcagtggggctgatgtgataagatggatggtgttaaagactagcgtgtgcgcgatttgacgaagacgactacgagacgggatgagcaatgagcatgtcggccgagctatggacgcttccatcatatcatggaccgacatcaatgtgcatatgatctcaggtgtccatcgacagaccgaatcttccgtggccagtattccttcggcgacgcggttgccgttagacgaaggaaactgtcgtgtgacagcgaaatgtggttgctacatgctggtagcgcacatagcacactttgggcgtgtttggttcggcttttttctaaatagcttttctgaaaagctggctgtggagaaaagctggctgttgggaaaaactggtggttagaatttaggtgtttggttcgccagctgtgcaaaaaagttgttcgttagaatataggtgtttggatacacagattctcagactgcagattctgtttgaaaaaactatacacattaacaccgaaccaacaaaaggtcattacatataattagtagagttcattacaacataactaccgttacatttac

SEQ ID NO: 52177 - DNA, 2909 bp, Zea Mays
aaacttagagagtgaagactgaagactcccgcgctttacgggtttggacctcacctgtcaggctgtcacctcatacagtacgctcggctctaccgggcagatgcacccatctgtttcgcggagaagcccgtcctcgtcggagtgtagaggggcgaagcgatccgaactccgagaaccccagggccagggctcagtccacagcgagagcagagaacgcagcggcctgccggcctccgccccgcactcccgcagccatggccgccgccgccgccgtggttgccgagcccaagaccaagtacgatcgccagctcaggatatggggtgatcaaggccaaactgcactggagaaggccagcatatgcttgcttaactgtggtcctaccggaacagaagcattgaagaatctcgtgcttggaggaataggaagtgtgactgctgttgatggctccaaagttgaagcatctgatctggggaacaattttatgtgtaatttctttgctatgtgattccacctgttcttctgaattcatccccagaaattgatggaactcatattctggtaccttatatttgcattcagtggatgaaggatgtttggggcaaccaagagctaaatctatatgttcattcctacaagagcttaatgacgctgttaaagccaagtttgttgaggagtttccaacgcatttgatagacactaatccttcattcttttcccagtttactgttgtcattgctactcagatatatggtgttttgacagtaatatgacattggactaagccactgaatgcatacacaatagctaatgcatagctgccctcttggcattggtgatggcaaaaccttgcactaagggctcgttggatgagaccctggagtatttttgcctggataggtctttgcgtgtgttccatttggatgaccctgatactcttcctgaacctgcttccagagagttctttactgaagctagatgatatttgcaggaaagcagacatcgttttggttgctgcacgttcatatggtctaactggtttggtcagggttagcgtcaaggagcactgtgttatagaatcaaaaccagatcacttcttggatgatttgcgacttcacaatccatggactgaactaaagcaatttgcaaaatcaattgatataaatgataaagatcctgttgtccacaaacatactccatacattgttgtccttgtgagacttgctgaaaaatgggcagatgcccatgatggtaacatgccttcaactaggcaagaaaagaaggaatttaaggacctaattcgagcccacatgcttaatgtagatgaagaaaattacaaagaagctgtggactcatcatataaagtctcagtcactccaggaatcagtaatgagatccatcagataattgatgatgactctgcggaagtcaattcatcatcagaagatttctggattttagtagctgctttaaaggagtttatttccaaggagggtaatggtgagctacctctggagggaacaatacctgatatgacttcccttactgagtattatgtaagcttacaaaagatttaccaagctaaggcagaatttgactgtcttgccctggagcatcatgtaaaggaaatcttgaaacagattggtagagatccggattctatttcaagagcatatatcaaaacattttgtaaaaattctaggaaactaaggatttgtagatatcgtagtttcaaggaggaatttagctccccgattgtctctgagattcagaggtatttcagcgatgaagactgcagttacgcaatgaacttctacattctactacgggctgtcgatcgattggctgccaattatagccgattacctggaatcttcgacaggctgaagacagttgcggcttcagtgctaagcgagatgggtttgaacggagcatccttatcccaagacctggtaaccgagatgtgccggttcgggggtgcggagattcatccagtggctgctttcatcggtggagtcgcttcacaagaagtgattaagctggtcaccaagcagtttgtgcctttggggggaacattcatttttaatggaatcgatctcaaatctcaagttttggtgctataacatggatgtggagcgttggatttgagctggtccagattttgtgccagggcaccgcgctgcccaacgagtacccaagtctcgcagaaaatatcaatacttgcttcgtatgattttttgccaaatgactagcaaattcctagctcacgcggctgttatgcgtaaaaccagaagagctgctgcttttagactacgcctgttatatattagtaggcgaagtaatatgtcagtggggctgatgtgataagatggatggtgttaaagactagcgtgtgcgcgatttgacgaagacgactacgagacgggatgagcaatgagcatgtcggccgagctatggacgcttccatcatatcatggaccgacatcaatgtgcatatgatctcaggtgtccatcgacagaccgaatcttccgtggccagtattccttcggcgacgcggttgccgttagacgaaggaaactgtcgtgtgacagcgaaatgtggttgctacatgctggtagcgcacatagcacactttgggcgtgtttggttcggcttttttctaaatagcttttctgaaaagctggctgtggagaaaagctggctgttgggaaaaactggtggttagaatttaggtgtttggttcgccagctgtgcaaaaaagttgttcgttagaatataggtgtttggatacacagattctcagactgcagattctgtttgaaaaaactatacacattaacaccgaaccaacaaaaggtcattacatataattagtagagttcattacaacataactaccgttacatttac

SEQ ID NO: 52178 - DNA, 2594 bp, Zea Mays
aaacttagagagtgaagactgaagactcccgcgctttacgggtttggacctcacctgtcaggctgtcacctcatacagtacgctcggctctaccgggcagatgcacccatctgtttcgcggagaagcccgtcctcgtcggagtgtagaggggcgaagcgatccgaactccgagaaccccagggccagggctcagtccacagcgagagcagagaacgcagcggcctgccggcctccgccccgcactcccgcagccatggccgccgccgccgccgtggttgccgagcccaagaccaagtacgatcgccagctcaggatatggggtgatcaaggccaaactgcactggagaaggccagcatatgcttgcttaactgtggtcctaccggaacagaagcattgaagaatctcgtgcttggaggaataggaagtgtgactgctgttgatggctccaaagttgaagcatctgatctggggaacaattttatgtgtaatttctttgctatgtgattccacctgttcttctgaattcatccccagaaattgatggaactcatattctggtaccttatatttgcattcagtggatgaaggatgtttggggcaaccaagagctaaatctatatgttcattcctacaagagcttaatgacgctgttaaagccaagtttgttgaggagtttccaacgcatttgatagacactaatccttcattcttttcccagtttactgttgtcattgctactcaggagcactgtgttatagaatcaaaaccagatcacttcttggatgatttgcgacttcacaatccatggactgaactaaagcaatttgcaaaatcaattgatataaatgataaagatcctgttgtccacaaacatactccatacattgttgtccttgtgagacttgctgaaaaatgggcagatgcccatgatggtaacatgccttcaactaggcaagaaaagaaggaatttaaggacctaattcgagcccacatgcttaatgtagatgaagaaaattacaaagaagctgtggactcatcatataaagtctcagtcactccaggaatcagtaatgagatccatcagataattgatgatgactctgcggaagtcaattcatcatcagaagatttctggattttagtagctgctttaaaggagtttatttccaaggagggtaatggtgagctacctctggagggaacaatacctgatatgacttcccttactgagtattatgtaagcttacaaaagatttaccaagctaaggcagaatttgactgtcttgccctggagcatcatgtaaaggaaatcttgaaacagattggtagagatccggattctatttcaagagcatatatcaaaacattttgtaaaaattctaggaaactaaggatttgtagatatcgtagtttcaaggaggaatttagctccccgattgtctctgagattcagaggtatttcagcgatgaagactgcagttacgcaatgaacttctacattctactacgggctgtcgatcgattggctgccaattatagccgattacctggaatcttcgacaggctgaagacagttgcggcttcagtgctaagcgagatgggtttgaacggagcatccttatcccaagacctggtaaccgagatgtgccggttcgggggtgcggagattcatccagtggctgctttcatcggtggagtcgcttcacaagaagtgattaagctggtcaccaagcagtttgtgcctttggggggaacattcatttttaatggaatcgatctcaaatctcaagttttggtgctataacatggatgtggagcgttggatttgagctggtccagattttgtgccagggcaccgcgctgcccaacgagtacccaagtctcgcagaaaatatcaatacttgcttcgtatgattttttgccaaatgactagcaaattcctagctcacgcggctgttatgcgtaaaaccagaagagctgctgcttttagactacgcctgttatatattagtaggcgaagtaatatgtcagtggggctgatgtgataagatggatggtgttaaagactagcgtgtgcgcgatttgacgaagacgactacgagacgggatgagcaatgagcatgtcggccgagctatggacgcttccatcatatcatggaccgacatcaatgtgcatatgatctcaggtgtccatcgacagaccgaatcttccgtggccagtattccttcggcgacgcggttgccgttagacgaaggaaactgtcgtgtgacagcgaaatgtggttgctacatgctggtagcgcacatagcacactttgggcgtgtttggttcggcttttttctaaatagcttttctgaaaagctggctgtggagaaaagctggctgttgggaaaaactggtggttagaatttaggtgtttggttcgccagctgtgcaaaaaagttgttcgttagaatataggtgtttggatacacagattctcagactgcagattctgtttgaaaaaactatacacattaacaccgaaccaacaaaaggtcattacatataattagtagagttcattacaacataactaccgttacatttac

SEQ ID NO: 52179 - DNA, 3481 bp, Zea Mays
aaacttagagagtgaagactgaagactcccgcgctttacgggtttggacctcacctgtcaggctgtcacctcatacagtacgctcggctctaccgggcagatgcacccatctgtttcgcggagaagcccgtcctcgtcggagtgtagaggggcgaagcgatccgaactccgagaaccccagggccagggctcagtccacagcgagagcagagaacgcagcggcctgccggcctccgccccgcactcccgcagccatggccgccgccgccgccgtggttgccgagcccaagaccaagtacgatcgccagctcagtttgttaggtaacaaaaaactcgtccgatgagggaaagaccaccctcccggtattatattaaaaagagatcgaaacatggttccaacgagaaaattcccccccccctcactagcgggccgtcaccgctcactctgcaacggcccagccggagggtggcgcacaagacgtaacccgggagcgggaggagattttttttaaccaagccagaaaatcgcccccgagggagatcgaacccaggacctgtaggtgctactcggaagccgtaaccattacgctaaagacccttttgcgtttgttaggatatggggtgatcaaggccaaactgcactggagaaggccagcatatgcttgcttaactgtggtcctaccggaacagaagcattgaagaatctcgtgcttggaggaataggaagtgtgactgctgttgatggctccaaagttgaagcatctgatctggggaacaattttatgttggatgaaggatgtttggggcaaccaagagctaaatctatatgttcattcctacaagagcttaatgacgctgttaaagccaagtttgttgaggagtttccaacgcatttgatagacactaatccttcattcttttcccagtttactgttgtcattgctactcagatatatggtgttttgacagtaatatgacattggactaagccactgaatgcatacacaatagctaatgcatagctgccctcttggcattggtgatggcaaaaccttgcactaagggctcgttggatgagaccctggagtatttttgcctggataggtctttgcgtgtgttccatttggatgaccctgatactcttcctgaacctgcttccagagagttctttactgaagctagatgatatttgcaggaaagcagacatcgttttggttgctgcacgttcatatggtctaactggtttggtcagggttagcgtcaaggtacttttttctctcgaacacgcaggagaactgcgcgtcattatattaagaggaaaaaaggtcccaagtggaccaagaaaacaaagtgcccgagaaggcagcagacgagaagagggggacaaaaagaaaaaagagaagaacaaaaataaaagaaactagaaacaagagggaaaaagggggaggggggacaacccccaccaccccatctaaattaatgccacaactgtctaatatcttttgctcctgccattccccaaagcttaacatcctcatgaatctcttgcaaaatgttgcggatactcggaggtaccccatcaaacacgcaagcattcctttgtttccacaaccgccaagacaccaagataagtagggaattaaacgaaaatgttgcgtcaaggagcactgtgttatagaatcaaaaccagatcacttcttggatgatttgcgacttcacaatccatggactgaactaaagcaatttgcaaaatcaattgatataaatgataaagatcctgttgtccacaaacatactccatacattgttgtccttgtgagacttgctgaaaaatgggcagatgcccatgatggtaacatgccttcaactaggcaagaaaagaaggaatttaagatgaagaaaattacaaagaagctgtggactcatcatataaagtctcagtcactccaggaatcagtaatgagatccatcagataattgatgatgactctgcggaagtcaattcatcatcagaagatttctggattttagtagctgctttaaaggagtttatttccaaggagggtaatggtgagctacctctggagggaacaatacctgatatgacttcccttactgagtattatgtaagcttacaaaagatttaccaagctaaggcagaatttgactgtcttgccctggagcatcatgtaaaggaaatcttgaaacagattggtagagatccggattctatttcaagagcatatatcaaaacattttgtaaaaattctaggaaactaaggatttgtagatatcgtagtttcaaggaggaatttagctccccgattgtctctgagattcagaggtatttcagcgatgaagactgcagttacgcaatgaacttctacattctactacgggctgtcgatcgattggctgccaattatagccgattacctggaatcttcgacaggctgaagacagttgcggcttcagtgctaagcgagatgggtttgaacggagcatccttatcccaagacctggtaaccgagatgtgccggttcgggggtgcggagattcatccagtggctgctttcatcggtggagtcgcttcacaagaagtgattaagctggtcaccaagcagtttgtgcctttggggggaacattcatttttaatggaatcgatctcaaatctcaagttttggtgctataacatggatgtggagcgttggatttgagctggtccagattttgtgccagggcaccgcgctgcccaacgagtacccaagtctcgcagaaaatatcaatacttgcttcgtatgattttttgccaaatgactagcaaattcctagctcacgcggctgttatgcgtaaaaccagaagagctgctgcttttagactacgcctgttatatattagtaggcgaagtaatatgtcagtggggctgatgtgataagatggatggtgttaaagactagcgtgtgcgcgatttgacgaagacgactacgagacgggatgagcaatgagcatgtcggccgagctatggacgcttccatcatatcatggaccgacatcaatgtgcatatgatctcaggtgtccatcgacagaccgaatcttccgtggccagtattccttcggcgacgcggttgccgttagacgaaggaaactgtcgtgtgacagcgaaatgtggttgctacatgctggtagcgcacatagcacactttgggcgtgtttggttcggcttttttctaaatagcttttctgaaaagctggctgtggagaaaagctggctgttgggaaaaactggtggttagaatttaggtgtttggttcgccagctgtgcaaaaaagttgttcgttagaatataggtgtttggatacacagattctcagactgcagattctgtttgaaaaaactatacacattaacaccgaaccaacaaaaggtcattacatataattagtagagttcattacaacataactaccgttacatttac

SEQ ID NO: 52180 - DNA, 1281 bp, Zea Mays
atttttgcctggataggtctttgcgtgtgttccatttggatgaccctgatactcttcctgaacctgcttccagagagttctttactgaagctagatgatatttgcaggaaagcagacatcgttttggttgctgcacgttcatatggtctaactggtttggtcagggttagcgtcaaggtacttttttctctcgaacacgcaggagaactgcgcgtcattatattaagaggaaaaaaggtcccaagtggaccaagaaaacaaagtgcccgagaaggcagcagacgagaagagggggacaaaaagaaaaaagagaagaacaaaaataaaagaaactagaaacaagagggaaaaagggggaggggggacaacccccaccaccccatctaaattaatgccacaactgtctaatatcttttgctcctgccattccccaaagcttaacatcctcatgaatctcttgcaaaatgttgcggatactcggaggtaccccatcaaacacgcaagcattcctttgtttccacaaccgccaagacaccaagataagtagggaattaaacgaaaatgttgcgtcaaggagcactgtgttatagaatcaaaaccagatcacttcttggatgatttgcgacttcacaatccatggactgaactaaagcaatttgcaaaatcaattgatataaatgataaagatcctgttgtccacaaacatactccatacattgttgtccttgtgagacttgctgaaaaatgggcagatgcccatgatggtaacatgccttcaactaggcaagaaaagaaggaatttaagatgaagaaaattacaaagaagctgtggactcatcatataaagtctcagtcactccaggaatcagtaatgagatccatcagataattgatgatgactctgcggaagtcaattcatcatcagaagatttctggattttagtagctgctttaaaggagtttatttccaaggagggtaatggtgagctacctctggagggaacaatacctgatatgacttcccttactgagtattatgtaagcttacaaaagatttaccaagctaaggcagaatttgactgtcttgccctggagcatcatgtaaaggaaatcttgaaacagattggtagagatccggattctatttcaagagcatatatcaaaacattttgtaaaaattctaggaaactaaggttatccatgccagaatgataataaattggataaaggcaatattattggcacgatgagattgatgattgccctctccgaagaatagaa

SEQ ID NO: 52181 - DNA, 985 bp, Zea Mays
aaaatgttgcggatactcggaggtaccccatcaaacacgcaagcattcctttgtttccacaaccgccaagacaccaagataagtagggaattaaacgaaaatgttgcgtcaaggagcactgtgttatagaatcaaaaccagatcacttcttggatgatttgcgacttcacaatccatggactgaactaaagcaatttgcaaaatcaattgatataaatgataaagatcctgttgtccacaaacatactccatacattgttgtccttgtgagacttgctgaaaaatgggcagatgcccatgatggtaacatgccttcaactaggcaagaaaagaaggaatttaagatgaagaaaattacaaagaagctgtggactcatcatataaagtctcagtcactccaggaatcagtaatgagatccatcagataattgatgatgactctgcggaagtcaattcatcatcagaagatttctggattttagtagctgctttaaagaccgggaagtttctttcttggtatcttaattgtatcttaccgctataattcatgccaaaatctcaggccataaaatgccgttaagctgtcaaaaaaatttgcaatgaaactgctttgacaatgagcatgcacaggttgcatttgtgctaaaatttcaggccgctaatacagtattggtgagagtaggattatacagtatgcagttggacttgattagcccagttctagaagtgctttggtctcaaactaaaactttgcgttagtcagattgaaatgtcaaattcatccttccagagctagaacacttataaacatgaatccagtatcaggcatcatctgattttgaaggcttctaagctgaacctattcgtttcatttgttgaagaagtccaacttagagaaaaaaacagaaacctggggatgtttatacatggaagctgcctgaatattgaacataagtcatacacagtccacatataagcatttttt

SEQ ID NO: 52182 - DNA, 2265 bp, Zea Mays
aaacttagagagtgaagactgaagactcccgcgctttacgggtttggacctcacctgtcaggctgtcacctcatacagtacgctcggctctaccgggcagatgcacccatctgtttcgcggagaagcccgtcctcgtcggagtgtagaggggcgaagcgatccgaactccgagaaccccagggccagggctcagtccacagcgagagcagagaacgcagcggcctgccggcctccgccccgcactcccgcagccatggccgccgccgccgccgtggttgccgagcccaagaccaagtacgatcgccagctcaggatatggggtgatcaaggccaaactgcactggagaaggccagcatatgcttgcttaactgtggtcctaccggaacagaagcattgaagaatctcgtgcttggaggaataggaagtgtgactgctgttgatggctccaaagttgaagcatctgatctggggaacaattttatgttggatgaaggatgtttggggcaaccaagagctaaatctatatgttcattcctacaagagcttaatgacgctgttaaagccaagtttgttgaggagtttccaacgcatttgatagacactaatccttcattcttttcccagtttactgttgtcattgctactcagatatatggtgttttgacagtaatatgacattggactaagccactgaatgcatacacaatagctaatgcatagctgccctcttggcattggtgatggcaaaaccttgcactaagggctcgttggatgagaccctggagtatttttgcctggataggtctttgcgtgtgttccatttggatgaccctgatactcttcctgaacctgcttccagagagttctttactgaagctagatgatatttgcaggaaagcagacatcgttttggttgctgcacgttcatatggtctaactggtttggtcagggttagcgtcaaggtacttttttctctcgaacacgcaggagaactgcgcgtcattatattaagaggaaaaaaggtcccaagtggaccaagaaaacaaagtgcccgagaaggcagcagacgagaagagggggacaaaaagaaaaaagagaagaacaaaaataaaagaaactagaaacaagagggaaaaagggggaggggggacaacccccaccaccccatctaaattaatgccacaactgtctaatatcttttgctcctgccattccccaaagcttaacatcctcatgaatctcttgcaaaatgttgcggatactcggaggtaccccatcaaacacgcaagcattcctttgtttccacaaccgccaagacaccaagataagtagggaattaaacgaaaatgttgcgtcaaggagcactgtgttatagaatcaaaaccagatcacttcttggatgatttgcgacttcacaatccatggactgaactaaagcaatttgcaaaatcaattgatataaatgataaagatcctgttgtccacaaacatactccatacattgttgtccttgtgagacttgctgaaaaatgggcagatgcccatgatggtaacatgccttcaactaggcaagaaaagaaggaatttaaggacctaattcgagcccacatgcttaatgtagatgaagaaaattacaaagaagctgtggactcatcatataaagtctcagtcactccaggaatcagtaatgagatccatcagataattgatgatgactctgcggaagtcaattcatcatcagaagatttctggattttagtagctgctttaaagaccgggaagtttctttcttggtatcttaattgtatcttaccgctataattcatgccaaaatctcaggccataaaatgccgttaagctgtcaaaaaaatttgcaatgaaactgctttgacaatgagcatgcacaggttgcatttgtgctaaaatttcaggccgctaatacagtattggtgagagtaggattatacagtatgcagttggacttgattagcccagttctagaagtgctttggtctcaaactaaaactttgcgttagtcagattgaaatgtcaaattcatccttccagagctagaacacttataaacatgaatccagtatcaggcatcatctgattttgaaggcttctaagctgaacctattcgtttcatttgttgaagaagtccaacttagagaaaaaaacagaaacctggggatgtttatacatggaagctgcctgaatattgaacataagtcatacacagtccacatataagcatttttt

SEQ ID NO: 52183 - DNA, 2061 bp, Zea Mays
aaacttagagagtgaagactgaagactcccgcgctttacgggtttggacctcacctgtcaggctgtcacctcatacagtacgctcggctctaccgggcagatgcacccatctgtttcgcggagaagcccgtcctcgtcggagtgtagaggggcgaagcgatccgaactccgagaaccccagggccagggctcagtccacagcgagagcagagaacgcagcggcctgccggcctccgccccgcactcccgcagccatggccgccgccgccgccgtggttgccgagcccaagaccaagtacgatcgccagctcaggatatggggtgatcaaggccaaactgcactggagaaggccagcatatgcttgcttaactgtggtcctaccggaacagaagcattgaagaatctcgtgcttggaggaataggaagtgtgactgctgttgatggctccaaagttgaagcatctgatctggggaacaattttatgttggatgaaggatgtttggggcaaccaagagctaaatctatatgttcattcctacaagagcttaatgacgctgttaaagccaagtttgttgaggagtttccaacgcatttgatagacactaatccttcattcttttcccagtttactgttgtcattgctactcagcttccagagagttctttactgaagctagatgatatttgcaggaaagcagacatcgttttggttgctgcacgttcatatggtctaactggtttggtcagggttagcgtcaaggtacttttttctctcgaacacgcaggagaactgcgcgtcattatattaagaggaaaaaaggtcccaagtggaccaagaaaacaaagtgcccgagaaggcagcagacgagaagagggggacaaaaagaaaaaagagaagaacaaaaataaaagaaactagaaacaagagggaaaaagggggaggggggacaacccccaccaccccatctaaattaatgccacaactgtctaatatcttttgctcctgccattccccaaagcttaacatcctcatgaatctcttgcaaaatgttgcggatactcggaggtaccccatcaaacacgcaagcattcctttgtttccacaaccgccaagacaccaagataagtagggaattaaacgaaaatgttgcgtcaaggagcactgtgttatagaatcaaaaccagatcacttcttggatgatttgcgacttcacaatccatggactgaactaaagcaatttgcaaaatcaattgatataaatgataaagatcctgttgtccacaaacatactccatacattgttgtccttgtgagacttgctgaaaaatgggcagatgcccatgatggtaacatgccttcaactaggcaagaaaagaaggaatttaaggacctaattcgagcccacatgcttaatgtagatgaagaaaattacaaagaagctgtggactcatcatataaagtctcagtcactccaggaatcagtaatgagatccatcagataattgatgatgactctgcggaagtcaattcatcatcagaagatttctggattttagtagctgctttaaagaccgggaagtttctttcttggtatcttaattgtatcttaccgctataattcatgccaaaatctcaggccataaaatgccgttaagctgtcaaaaaaatttgcaatgaaactgctttgacaatgagcatgcacaggttgcatttgtgctaaaatttcaggccgctaatacagtattggtgagagtaggattatacagtatgcagttggacttgattagcccagttctagaagtgctttggtctcaaactaaaactttgcgttagtcagattgaaatgtcaaattcatccttccagagctagaacacttataaacatgaatccagtatcaggcatcatctgattttgaaggcttctaagctgaacctattcgtttcatttgttgaagaagtccaacttagagaaaaaaacagaaacctggggatgtttatacatggaagctgcctgaatattgaacataagtcatacacagtccacatataagcatttttt

SEQ ID NO: 52184 - DNA, 830 bp, Zea Mays
ggctggttgggtcagtaggcgcatctctctatggtctggactgcatggctttgacagttcaggcgttggaaaaagttgcctcctgttacggttttcagatggatcattcaccactagcttcattaccactattggcattgacttcaagataagaactgttgagttggatggcaaaaggattaagttgcagatctgggatactgcaggccaagaacgtttccgcacaattaccactgcctactacaggggagcaatgggcatcttacttgtgtatgatgtcacagacgagtcatctttcaataacataagaaattggatcagaaacattgaacaacatgcttcggataatgtgaacaaaattctggtggggaataaagctgatatggatgaaagcaaacgggctgtgcccacttcaaagggacaagctctcgcagacgaatatgggataaagttctttgaaacgagcgcaaagacaaacctgaacgtcgagcaggttttcttttctatagcaagggatatcaaacagagactttcagagactgattccaagcctgaggatcgaactatcaagatcaaggctgaaggggaagctgatgcagcagaggcgcagaaatcagcttgctgcggctcttgaacggttgtggccgcaggatagtttcataatttttattctttgccagcaagtctctccttgtgcttgagctatcacaattgttgtggtttggacaagtgggtgttacgtcagaactaattacttgctatattgtggaaaccctgctcttgataacgacgatcgcatatgcaactgggtgggtgggtgggtggtttga

SEQ ID NO: 52185 - DNA, 792 bp, Zea Mays
cctctatctcctctctcgatctacgcgttggaaaaagttgcctcctgttacggttttcagatggatcattcaccactagcttcattaccactattggcattgacttcaagataagaactgttgagttggatggcaaaaggattaagttgcagatctgggatactgcaggccaagaacgtttccgcacaattaccactgcctactacaggggagcaatgggcatcttacttgtgtatgatgtcacagacgagtcatctttcaataacataagaaattggatcagaaacattgaacaacatgcttcggataatgtgaacaaaattctggtggggaataaagctgatatggatgaaagcaaacgggctgtgcccacttcaaagggacaagctctcgcagacgaatatgggataaagttctttgaaacgagcgcaaagacaaacctgaacgtcgagcaggttttcttttctatagcaagggatatcaaacagagactttcagagactgattccaagcctgaggatcgaactatcaagatcaaggctgaaggggaagctgatgcagcagaggcgcagaaatcagcttgctgcggctcttgaacggttgtggccgcaggatagtttcataatttttattctttgccagcaagtctctccttgtgcttgagctatcacaattgttgtggtttggacaagtgggtgttacgtcagaactaattacttgctatattgtggaaaccctgctcttgataacgacgatcgcatatgcaactgggtgggtgggtgggtggtttga

SEQ ID NO: 52186 - DNA, 887 bp, Zea Mays
ccgggatacggctcccttcattcaggcggcggctatcgccggtggcgccgcccagagctgggcgttcttcaccttggacacgctgctgagcacgcccagcggcgtcacgtcgccgaccaccgtcaccttcttcgccgcgaaatcgatgttgaacgacgtcacgcctgcgcaggagaagggttagaacagaaacagaaccaggaaaagggttaattagtcgtggtcctcttgtcgtttaagtttttaatgactctgaacagaagtttcagcagctgccagtgccagccaggggctcaccttccatcttggagaggtgcttcttcactttcccggcgcacgctttgcagtgcagggataccttgagcacaaccaccacctggtaaaagagatgccaatgcagacggcgctggagctcagctcaatggaaacacatgcgtttgcagtttgcactacagaatctttaaccaaacttttacaagaaacctatatatccgcatgtaatcatggtatttggatcaaaactaacttcagtacttcgcctgggagctcaagatatcagacgagaaaacattgtactgtatatataaaccctgggagccccctacacgaacactggtatgaatatgatggctgctactgatcacataatctcacttgtggttttctatcgttttttttttttggtctaatcaacaagagtagggccaagtgtttaaaaagaaggaagaagcgcacaagtaaagtagcgcatgctagattaattgctaggtaagtggaggactgttcgctctcacctgctcctgcgcctgcgcggtcttggcatcagcagcgtcactagcttcctcccgcttggcgatggcgtcgacggccggggcaggctccagcac

SEQ ID NO: 52187 - DNA, 1646 bp, Zea Mays
ccttgagaaaatggagtttctaaactagttcttatctttttttcccagttttatccttagagggcagatgctgctgcagctcaagatagccacacacacagacagtgacacacttaagagctcgagatctcactctcctcacctcagctctcagagaggaaggacactgcggccgggcgatggcgagcgtggagggcaagagggagacggtgctggtcaccggcgccagcggcttcatcggatcgaccctcgtcggcctcctcctcgaccgcggctacaacgtccacgccagcgtcctcaaccccgatgacaaggcggagacggagcacctggtcgccctgggcgccggcgccggcgagggccggctgcgagtcttcccgggcgacctcctcgacggcgccgcgctcatggccgccgcgcggggctgctcgggcgtgttccacctcgccaccccctgcaccgtctaccccgtgagcgacccgcaggggcagatggtggtgccggcggtggagggcacgctcaacgtcctgcgcgccgccaaggaggcccgcaccgtgcggcgggtggtggtcacctcgtccagctccgccatcatacccagccccgcgtggcccgccggcgagccccgcgacgagcggtgctgggccgacgtcgactactgcaagaagaacgaggtgagccgtcgtcggttttccggccggccgccggcgccggcatcttttttctgcacattttcgatgcctgggcggccctgggggccacaccacgctagctgttatcttttcctttgcataataattgcatggacataccgaccgacgtcgacatggatggcgactaggcttaggggtgcttggtttctagggactaatatttagtcccttcattttattttattttagtctataaattgccaaatataaaaactaaaatagagttttattttccatatttaacaattttggaactaaaatggaataaaatgtagggactaaaaattagtctctagaaaccaaacacccccttactcaggtgatggattgttaataattttaaaaaaaaactcgtggctcgcaagtcggttcagtctcgatcaggtttggtgaggttcgtgagcctaaacgaatccgagctgagtcaaacctaatttcgtggctcgctacacaaacgagccgagccgagtcagcccaaactactacttactagaggcccgagaagagcctagaagcaaaccctaggaaataccgtatctgagagactctgggaccaggagggagccgtccgtgactcaatggcagtatggcactgctgttctctgtggtgtggacgtgtggtgttttactcttttgaatgtagacaatcacacatttacattggctggtgggctggtggctccatgtatacatacattttgttatgcttattattttgttccctcttatcattttgttatgctgaagtgaagttattacttgtaactttttttatgtgcagctatcagttgtcactttgtcggtttgtttactagtgtccagtcatctagattcagtgaccaatatgctttttggtcacaactaacaaggaactaaagtacagggacataatttttattatatggaacatattgtgcttcaaatttgagctaa

SEQ ID NO: 52188 - DNA, 817 bp, Zea Mays
cggccggctcagctagtcagcatggcgggggagacggtgctggtcaccggcgccagcggcttcatcggctcgaccctcgtccgcctcctcctcggccgcggctacaacgtccacgccggcgtcctcaaccccgatgacggggcggagacggagcacctgctcgccatggccgctggcgctggcgctggcgagggccgcctccgcatcttccgtggcgacctccttgacgacgccgcgcggggctgctcgggcgtcttccacctcgcgtcgccctgcaccgtcgaccccgtcagcgacccccaggtttggtaccctgtttccaagacgctggcagagaaggcagcgtggaggtttgcagaggagaacgggctggacgtggttgtggttaatccaatgtctgtcctgggccagataatcccaccgaccatcaattctagcatgtccgtccttctacgcctccttcaaggctgcacagaggagtacaaggatatctggatgggggtagtccacgtggaagacgtcgccttggcccatctcctggtgttcgagaacccatcagcttccgggaggcacatctgcgccgagtccatcagtcacctgagtgacttcgcggccaaactcgccgagctctaccccaacaacaaagtgcccaagttccccaaggacacccagcctgggctggtaagagcggaggcgggagtggcgtcgaagaagctcgtcgagctagggctgcagttcagccctctggagaagatcatcagggatgccgtggagagcctcaagaccaaagggttcaaatttcgcaactggatagcgg

SEQ ID NO: 52189 - DNA, 2821 bp, Zea Mays
tagttttagtgcagtacagaaaaactatagtatttatgtaatagacatctgtaaaccatggtatttgtaaaccacggttttaaataactgaagtaccaaacagggcctctgtgttcaaaattacaggctcacatttattcacctatgggccaaacagggccgtcgtgatcctcgcgctgtcgctgctccgctcagcccagcccgtccaggcggcgctgtcgctgctccgctccctgtcatcgctcgggcagttcagcatcctcgccgacgcctgcaccgtgctggctgtggcctggccaccgtggtgaagcaggacctccaggctccagctcctggccacgcgcggcgagcagccgttcgggggccgggacgcggtcgcggggctctggggcgtcgcgtttgccgcccgcttcgtcgtcttaattctgcttcaagggcttctgcatgacgctggtgctcgaggcgtccatggccgaccggagcaggttccgccccgtgctcgtgcaggccatcgccggcgtcacagtcgtgtacatctgcttcggcgcctgtggttacctcgcctacggcgacgccaccaaggacatcatcacgctcaacctaccgagcacctggtccgccgccgccgtcaaggtcaagaaaactcgggccggccggccccatcggccgatgaaacgaaaccgatcgcgaattaaaaaaaaacggttactttttcgtgcaggtggtgctgtgcagcatcgcgccgtggaccgggcggccctgcacgcgagccgcgtggtggtgctggtggcgctgtccgctgtggcgtgcttcgtgccggcgttcgggtcgttcgcgtccttcgtcgggagcacggtgtgcgcgctgctctccttcgtgctgcccgcgtgttgtttcacctccgcgtcgtggactggggcatcctcctcttcggcctcgcgttcgccgcgcacggcctgtatgccgtcctgtcgcggcactgacgttcccatcccaacacacgagtttgagtttctcttcctcgcgcgcttgtgctgataagataaaaaaagatacagcagtttcgtacacaaaattggttgattgatacgtttggtttggactagaggatttgttcactccggcggtcctgcctgtttggaagcaagaaatgtgaaatattagctccaatttttttaaaaaaaaatacggaggtagtaatttattgtttctcgatgaatcagaaccgcactaattagatataaaatcagattttttttttacaattgtattttgatggatcataatcacattaactggatctggcgctgtacgtcgaggacgctgtccccggtttcgggagcacgaaacgataaatttgcatcgactcggattaaagtgatgtttggttcaatcaagtgaacgttaacgacaacgggatcgactgcctcccctatgtgttacagtgtactggtgcttaacaccctttgtttggttcggcaacgttctccatttccgtaacaacctgaacataacaagcaggctttcaacgactccaccaatactagttgggagtatagatgtccagcaaacccaaaacctgactcgaagcatgttttttagcctgatacgagctcagcccaccatcgtttaaaacggaagatctagtctagaccagcacgaataagcgggctagatccgaacaaagaatcatatatagctagacaggaacaaagaatcagacccgaataaaaaatggaaaataagatgggatagataaactttaagaaggaacatgcatgggaggtgtgttggagcagaaaaaacaaccgttgatcattggcaggtgaatatacgtgaattggttaggagatagatgcatcatgcatgatggacatgctcttgaattggttaggtcagcatttactgcacgcttgcaagttgggcgggggcgctgcggcgtgcgtgccccggcccataacttgtcaaagctcttgcaagttgcatgcatccagcaggatgagacacctggatcggccgcggacgcgcactggccggccggggacgatgatgtccttgaacttgaagcgaagctactagcgacgagacgacgacgacgacgacctcgatcaatctcaggctcgcctcctgcatctcaacaagaaagaatgaaggagtacgacgcacacagaaggcaattctagctgggagcgcgcgaggagctcgagatcggccggcggcggcggcggcgcgtacgtggtacgtaactggtaagaacaagccgtggagctcaggatagatagcgcttcggatcgattcatcatatatagacagaaccttgagatggatccaagagaaagtgagagagagagacagagcagcatagctgctctgtctctctctctctcattctcccttcctcttcgtggctccaatctatgtgtgatttcctaggcgctatccctcctgagcttcaaggactgttccatacccttccttccttctccgatcctcagatgcttgcatgatcaggttctcaccatcacatgtctaacactattcctatctatgagtatgaatatgtgtatgtatagtagctacgtcgttctttgcagctagcagcgcaagaccaagctctgtcgaagcaaccgcactagcccatatatatatggatcggagtgtgagctactgctggaagtgaatgaagatggaatggccccaagtgccttgccctatttatagttcaagaagaagatcacacaggacacacacactctctctctctctcactcactgtggagtactgagacaactgtcacgcttgttgaggcatggggaggag

SEQ ID NO: 52190 - DNA, 1202 bp, Zea Mays
gtgttattctaggaactacttgaaaacagatgttattttctaaacgtttttacaaacgctgttctgttgattcttctagagtataagtggagctgctctagggccagatccagcttctctgccgtcgcctctttctccgcctcgaaggatctagagccgcacgtgctcccaaccaagcgccgcccgcctcgtgccctcgtccttgcgcgcgggctgcagttgttcttcaagtgccgcctccgcttcggcgcggatcgcctcccgttatcccgttcatggccggccgcagcgataagaaaccggcgagttccgccccgccgcggaagggcggttaccctcacggatcggtctacggaagttcttcggaacctcgaaaacaggatgcctgtacattctctccttcggttagcagcaaagattcactgcataaggtggtcacgcttacaccagttcaaccacagaaacctgtagactccagaggcagtcactgtaatgcaggatctgattctggagaggccccatttgatatatgcatgagtggtaacaagtgcgctgtaaagttaaaaccatccatattcgagaccaacagagaaagaaagcagcgagacagagaatgttccaaggatgtacgtccattgcagttgagacctgggatggttctgttgaaaagattcataaagcctaatgatcaggacaaagatgaatcacagagcagccttgacaagggattgcctgtcgtttccttttcgataggcgagactgcagaattcatgtttggcgatgttagagacgaagagaagatttcaaaggttgatcttgaatccggcgacgtcctaatatttggtggcgagtcaaggcttatattccacggggttaacaacaccaaacctaaaacggcaccaaagtggcttacggacgagacaagtcttcgacctgggcgtctgaatctcacattcaggcagtactaggcaggtttcccccaccttgagcatttgcattggaacagcaaagaacttgctcatgatattctagtactagggtcagttgggttagttaccagtagagatcacctgtcatttcttatatatattccctcatgggctactcacaaggagatctatctagtcactgaaaaccaccacttaatccattgctactcgcttaaatgtttgtttccatgttcaactttttcattttgcctt

SEQ ID NO: 52191 - DNA, 1616 bp, Zea Mays
gtttttaagaatatattgggagctgttggaatcctaccatttttttagaaattaagagttttagaaagattccaatacccatatttttgggagatttatttttggtactcttggagatgctcttgcaataaaagattgcaaaatatagagtataagtggagctgctctagggccagatccagcttctctgccgtcgcctctttctccgcctcgaaggatctagagccgcacgtgctcccaaccaagcgccgcccgcctcgtgccctcgtccttgcgcgcgggctgcagttgttcttcaagtgccgcctccgcttcggcgcggatcgcctcccgttatcccgttcatggccggccgcagcgataagaaaccggcgagttccgccccgccgcggaagggcggttaccctcacggatcggtctacggaagttcttcggaacctcgaaaacaggatgcctgtacattctctccttcggttagcagcaaagattcactgcataaggtggtcacgcttacaccagttcaaccacagaaacctgtagactccagaggcagtcactgtaatgcaggatctgattctggagaggccccatttgatatatgcatgagtggtaacaagtgcgctgtaaagttaaaaccatccatattcgagaccaacagagaaagaaagcagcgagacagagaatgttccaaggatgtacgtccattgcagttgagacctgggatggttctgttgaaaagattcataaagcctaatgatcaggttaaaattgtcaaactttgttcgcaacttggtgttggtcctgggggattttatagacctggctaccgaaatggtgctttgctaaaactgtggatgatgtgcttagggaagaactgggatccagattcatcctcgtatggagatagacgtctgtttgatggtgctcaaccaccgaccataccagaagaatttcagaagttcgttcaagatggcatccaagcttcccatgaattcttgaaacaacaaaaaggagctaccaatgttgtgcaagaaatccctgcaatgtctccggatatctgcattgttaatttctacaatagtagtgggaggttgggtcttcatcaggacaaagatgaatcacagagcagccttgacaagggattgcctgtcgtttccttttcgataggcgagactgcagaattcatgtttggcgatgttagagacgaagagaagatttcaaaggttgatcttgaatccggcgacgtcctaatatttggtggcgagtcaaggcttatattccacggggttaacaacaccaaacctaaaacggcaccaaagtggcttacggacgagacaagtcttcgacctgggcgtctgaatctcacattcaggcagtactaggcaggtttcccccaccttgagcatttgcattggaacagcaaagaacttgctcatgatattctagtactagggtcagttgggttagttaccagtagagatcacctgtcatttcttatatatattccctcatgggctactcacaaggagatctatctagtcactgaaaaccaccacttaatccattgctactcgcttaaatgtttgtttccatgttcaactttttcattttgcctt

SEQ ID NO: 52192 - DNA, 662 bp, Zea Mays
ataaaaagctgttcttctcccctcatcgcatacggcataccacactagagccgccgccgccgccgtttcgcgcaccgtaccctagccctcgtcagcggcggcttcgagctcatccagccatgacgttcaagcggaggaatggcggacgcaacaagcacgggcgcggccacgtcaagtacatccgctgctccaactgcgccaagtgctgccccaaggataaggctatcaagcggttcttggtgaggaacattgttgagcaggctgccgtgagagatgtgcaggaggcctgtgtacatgatggttcatcactgtgtctcatgtgcaatccatgcgcacattgtccgggtccgctctcgtgagaacaggaggaaccgtgagcccccgcagcgcttcagacgccgggatgatggcccaaggcctggtcagggcccgccgcgcccaggcggtgcagctcctgcagctgcagctgctgctgctcctcgtacctaagttctggaattagtttcggggcttagttttgtgaaacattacctgttttgagaaaccattgttactgtatccccttgatgtcaaactttttagcacaatttgtggttctgaaaaggttggttgaatgttgcagctaatggttgaatgtactagagctaatggtgccgctaaaa

SEQ ID NO: 52193 - DNA, 1074 bp, Zea Mays
cgagcgagagagagagagaggagggtttccagagcggcagcggctgcggctgcctgccaacccctctacccccagctctgcaggctgcaccctaaagcagcgagcctttttaccactcttcctgctaccaccccacacggcgcacacaccaccatctctcgtcgcctcgcctccacttcctgggctacgtacccatctcaatcgcttcgactcctccgccgccgccgccatgtcggggctctacagccagggcttctcccctgcgcgaaacctctcccctcagattagaagcaacccggatgtcgatagccagtacttggcggagctgctcgctgaacaccagaagctggggccgttcatgcaggtgctgcccatatgcaacaagctgctgagccaagagattatgcgggtgtcaagcattgtccacaaccatggatttggcgatcatgacaggcatcggtttagaagtcctagtccgatgtcttctccgaaccctagagctaatctccctggcaatgggttcagtccttggagcggactacaagagagattaggttttcctcaacgaactagcatggactggcaaggagcaccaccaagtcctagcacccaagttgtgaagaagattcttcgtctggaggttccggttgattcttatccgaatttcaattttgtggggcgcattttaggacctagaggtaattctctaaagcgtgtagaagcatccactgggtgccgtgttttcattagaggaaatggttccatcaaagatccagggaaggaggacaaactacggggaaaaccaggctatgagcacctgagtgatcctctgcatatcttgatagaggccgagttccctgccagtatcatcgatgcaaggttgagacatgcgcaggagattatagaagaattgcttaaaccagtggacgagtcccatgatttctacaagaggcaacagctcagggagctggcgctgctgaactcaaccctgagagaggacagccctcaccctgggagcgtttctccattcagcaacggcgacacccatctgatcgaggttttccatgacggcgg

SEQ ID NO: 52194 - DNA, 1101 bp, Zea Mays
cacatccatcaaattaaagtcctgttgcttatataactctcaggcaaatatgttgttcgcgagcctttgaatctcaatccgtttttcttgaacttgcaatgctgtattgaaggttctctaaacagcatctttcctagaaatgttcatggtttctctgcaatataatcggttacttttacaatattttgcaatgtgcttctagcctgccttacctatcattcccttgccaccagcataaatctatttgatcctaacaagccgacgatgctttattgctctgtttctgcctatgtctttcctatttctgctcccttgtgacacgctttacctacaccgtttcatgatttttcaaggaggacaaactacggggaaaaccaggctatgagcacctgagtgatcctctgcatatcttgatagaggccgagttccctgccagtatcatcgatgcaaggttgagacatgcgcaggagattatagaagaattgcttaaaccagtggacgagtcccatgatttctacaagaggcaacagctcagggagctggcgctgctgaactcaaccctgagagaggacagccctcaccctgggagcgtttctccattcagcaacggcggtatgaaacgcgcgaaaacaggccagtagagaaacacccgtgctctcctacctggccctgtccaggtgtgttacgcggtcgtcgtcacgaaagacgccatgcctgccttggggagggcaatgttttgccatgggcatgcgtgaaggaagcaatgcgccttcactggcggagtccgtcgtccggtgccagctaggtttcacctccatacaggggaagctgctgctgggaaagatgagatagatagtcgcggtcgcggatcgttggttggttgttgtatggtgttagaacattccttctatttgttattgacggtttgaccctagtatgtggtggtacactgcgaagttgctaaactagaggcctaagctttatttaggtggttcattgaccttgtatcataaccttttgacattatcgagttgcaaaataaggaccatcagctttgtacattgttgtgatctgtgtgccataaaccgccactagaacatg

SEQ ID NO: 52195 - DNA, 2717 bp, Zea Mays
gagacacgggacccacccccggtctgcccgtggtatctctctcttgtccctgcctcccttcctccctccctccaacccagtgtgcgcacttcaccccccctctcggtctcaccctcctggcgacgactgggcggccgaacggccgtcgccgccgccccacgccaggtttcaaagtcttcgtcaggcccttctccggcgactcgagcaccacagggtgacaaggatagctttctcgggtcactgaaggaagacatcttctcgacgcggtagaccttctgacggttggctggttgtgctataagtgttcaaggggtggattaggaccgggaaactctgtactgaagggaaggtcaaaagtgtcaagagagcttgttccaagatggatgaaggtcagggagttaggtattggtgccacatgtgtcaggaggtgatagatcctatgcccgagatgaagtgcccaggctgcgagggcgggtttgtggaggagatggactccgaagacttcgagccagctgcgaacgcgagatcaagactcaggagggaggccatggttgaagctgatgccgaccaggatgacgaagaggatgattcagaccatgagcttgaactttccaggaggaggcggaggaggaggcgctcatcagcgcttttcagtgtgcttgaggctatgcgtgaccgtgatgaagtaaggggctcggatgacaccgacagtgatacagagagagacctggagagagggagaagggagaggatggagaggcagagggagaggttaaggcagatcgagagggtgagtgctcgtggcagagagaggacggaaagcttaatactgatcaactccaacaacgaggctattattctgcagggaacattcggatctgatgacaaccaggaggactcaagcaacacaagttctggtgtatcacttggggattactttcttggtcctgccttagacactctcttgcagcgtttggcggagagtgacctcagtcgttctggcacaccgcctgccaagaaggaagcagtcgccgcgctaccaaccgtgaacatcgaggaagcgttgggctgttcagtctgtcttgaggatttcgagatgggaggagaagcgaagcagatgccctgtcagcataagttccactcgcactgcatactcccgtggctggagctccacagctcttgcccaatctgccggtttcagttgcctactgaggagacgaagaacaacccatgcgaatcagccagcaccgcagggaccgtgaacggcggtggagacaacgctgctgcaagcggcagcgatacagaaagtactaaccacaatgaagatgaccattccgatagccctatcttctctgctctgagcacactcttctctgatccgttctcatccgacgatgatgaaagtgttccacactcttacgagaactgaagatagcgtcggacgcaggcttgcaatatggtgaagacgttctgcttctgaggctggcatctttatattgtagcttctgtacatatctctctgaacggtcgccccccataagacaaactattacctctccgttttactgaaaactatgtggcttgtaatctgctagtgcttgctatgttcacttgcctcgaataaatgttatcctttagcgtgcttattaccatctccggacggccctagacgtgcatgtggacgcagatttgattgacagtatggccaatgtaaggcatatatgtatgcagtggcgttgcgtcttactcctatattttaactgtcaatgagaaggtccttggaagatggctggatagttacttctgtgaaggcgaatatcgtccagtggtcctcacaacacgctccactgcattctgaggtggatggaacgttgcaggtgatgctgccccatatggtcctgaatgtcacgcccttgaggatctccgccagctccaagcgcattcgtgttggtattttgtcgtaaggaggtcgctgaaaggaaaaaaaaaaacatttgccatcgtagctggaccagtcgggcgacgggtgggataagcggagcaggttgctgccatgcgtatcaccacctccttggaactattgcctgagcaagaacaattctgcttgctgattattctgacggcgtggtcgtttggtaggttcgggttggtcgcccggttcttcactctgttggttcttctgcttgtacagttgtgctgcagcgtcccatttgggagggcatcaaacttggaatgtttttgatttgcaacgctttgcttagcaggcatggctggattcgaagacaaattcaagattgtttctgggaatttcaagctcctttttttttcttcctttctcgcgatttttggtgttggtttgccacgcttgttcggtgtagtgtaggcggtagcttgcgtgcagtgtggactgtggagtctcggctgctgcctgctggagtgctggtgttgccggtccttgttcttcggctctggtctcttgacttggaggcaagggggtgcgcgacgctcacggaatgtttgggacgtcttttcttctcggtgctgcggcgaccgaagacgcctgagtcaaccgggaccgtagctctccagtctccaccgtcatctatcatatctcatcatcttttattttaaactttactatacaagcggtaagcggtataatgtaaaaattctctattatacacgatctgttgtgaacaactttatttggatcaccg

SEQ ID NO: 52196 - DNA, 2193 bp, Zea Mays
gagacacgggacccacccccggtctgcccgtggtatctctctcttgtccctgcctcccttcctccctccctccaacccagtgtgcgcacttcaccccccctctcggtctcaccctcctggcgacgactgggcggccgaacggccgtcgccgccgccccacgccaggtttcaaagtcttcgtcaggcccttctccggcgactcgagcaccacagggtgacaaggatagctttctcgggtcactgaaggaagacatcttctcgacgcggtagaccttctgacggttggctggttgtgctataagtgttcaaggggtggattaggaccgggaaactctgtactgaagggaaggtcaaaagtgtcaagagagcttgttccaagatggatgaaggtcagggagttaggtattggtgccacatgtgtcaggaggtgatagatcctatgcccgagatgaagtgcccaggctgcgagggcgggtttgtggaggagatggactccgaagacttcgagccagctgcgaacgcgaggtctgatcgctccgtctctctcttggctccactgctgcttggtatgatggggggttcgtcgcgcagatcaagactcaggagggaggccatggttgaagctgatgccgaccaggatgacgaagaggatgattcagaccatgagcttgaactttccaggaggaggcggaggaggaggcgctcatcagcgcttttcagtgtgcttgaggctatgcgtgaccgtgatgaagtaaggggctcggatgacaccgacagtgatacagagagagacctggagagagggagaagggagaggatggagaggcagagggagaggttaaggcagatcgagagggtgagtgctcgtggcagagagaggacggaaagcttaatactgatcaactccaacaacgaggctattattctgcagggaacattcggatctgatgacaaccaggaggactcaagcaacacaagttctggtgtatcacttggggattactttcttggtcctgccttagacactctcttgcagcgtttggcggagagtgacctcagtcgttctggcacaccgcctgccaagaaggaagcagtcgccgcgctaccaaccgtgaacatcgaggaagcgttgggctgttcagtctgtcttgaggatttcgagatgggaggagaagcgaagcagatgccctgtcagcataagttccactcgcactgcatactcccgtggctggagctccacagctcttgcccaatctgccggtttcagttgcctactgaggagacgaagaacaacccatgcgaatcagccagcaccgcagggaccgtgaacggcggtggagacaacgctgctgcaagcggcagcgatacagaaagtactaaccacaatgaagatgaccattccgatagccctatcttctctgctctgagcacactcttctctgatccgttctcatccgacgatgatgaaagtgttccacactcttacgagaactgaagatagcgtcggacgcaggcttgcaatatggtgaagacgttctgcttctgaggctggcatctttatattgtagcttctgtacatatctctctgaacggtcgccccccataagacaaactattacctctccgttttactgaaaactatgtggcttgtaatctgctagtgcttgctatgttcacttgcctcgaataaatgttatcctttagcgtgcttattaccatctccggacggccctagacgtgcatgtggacgcagatttgattgacagtatggccaatgtaaggcatatatgtatgcagtggcgttgcgtcttactcctatattttaactgtcaatgagaaggtccttggaagatggctggatagttacttctgtgaaggcgaatatcgtccagtggtcctcacaacacgctccactgcattctgaggtggatggaacgttgcaggtgatgctgccccatatggtcctgaatgtcacgcccttgaggatctccgccagctccaagcgcattcgtgttggtattttgtcgtaaggaggtcgctgaaaggaaaaaaaaaaacatttgccatcgtagctggaccagtcgggcgacgggtgggataagcggagcaggttgctgccatgcgtatcaccacctccttggaactagggaaggtatcaggatcaacatcatgtgattcatattagaagtttgc

SEQ ID NO: 52197 - DNA, 1335 bp, Zea Mays
gagacacgggacccacccccggtctgcccgtggtatctctctcttgtccctgcctcccttcctccctccctccaacccagtgtgcgcacttcaccccccctctcggtctcaccctcctggcgacgactgggcggccgaacggccgtcgccgccgccccacgccaggtttcaaagtcttcgtcaggcccttctccggcgactcgagcaccacagggtgacaaggatagctttctcgggtcactgaaggaagacatcttctcgacgcggtagaccttctgacggttggctggttgtgctataagtgttcaaggggtggattaggaccgggaaactctgtactgaagggaaggtcaaaagtgtcaagagagcttgttccaagatggatgaaggtcagggagttaggtattggtgccacatgtgtcaggagggaggccatggttgaagctgatgccgaccaggatgacgaagaggatgattcagaccatgagcttgaactttccaggaggaggcggaggaggaggcgctcatcagcgcttttcagtgtgcttgaggctatgcgtgaccgtgatgaagtaaggggctcggatgacaccgacagtgatacagagagagacctggagagagggagaagggagaggatggagaggcagagggagaggttaaggcagatcgagagggtgagtgctcgtggcagagagaggacggaaagcttaatactgatcaactccaacaacgaggctattattctgcagggaacattcggatctgatgacaaccaggaggactcaagcaacacaagttctggtgtatcacttggggattactttcttggtcctgccttagacactctcttgcagcgtttggcggagagtgacctcagtcgttctggcacaccgcctgccaagaaggaagcagtcgccgcgctaccaaccgtgaacatcgaggaagcgttgggctgttcagtctgtcttgaggatttcgagatgggaggagaagcgaagcagatgccctgtcagcataagttccactcgcactgcatactcccgtggctggagctccacagctcttgcccaatctgccggtttcagttgcctactgaggagacgaagaacaacccatgcgaatcagccagcaccgcagggaccgtgaacggcggtggagacaacgctgctgcaagcggcagcgatacagaaagtactaaccacaatgaagatgaccattccgatagccctatcttctctgctctgagcacactcttctctgatccgttctcatccgacgatgatgaaagtgttccacactcttacgagaactgaagctacgcttgcattgcag

SEQ ID NO: 52198 - DNA, 393 bp, Zea Mays
atggcggcggcgggcctgaggaaggggaatgcgcgcctcccgccggaggtgaaccgggtgctctacgtgcggaacctgccgttcaacatctcgagcgaggagatgtacgacatcttcggcaagtacggcgcgatccggcagatccgtctgggcaacgccaaggacacgcgcgggaccgcttacgttgtctacgaggacatctacgacgccaagaacgccgtcgaccacctctccggcttcaacgtcgccaaccgctaccttatcgtgctctactaccagcccgccaagatgtccaagaagtcggatatcaagaagaaggaggacgagatcaccaggctccaggagaagtacggaatcgggtccaagacgcccggcccgggctccagcgactga

SEQ ID NO: 52199 - DNA, 2654 bp, Zea Mays
gcacgagagcggccaccaccatggcgacgcccaccgcgctctccacctcactcccctacctcccgccccgccgcgtcatctcattcccatccgccgccgccgtctccctccccgtcacctcccgccccgcccggctgcgggattcccgcctcgcggccgcggcaacctcggcctccgaggtcctcgagtccaccaacggcgccgtccccactgcggccaaggacggcgcgtggcgcgggtatgggagggagtacttccccctggctgccgtcgttgggcaggatgctatcaaaactgctctgctgcttggggcgattgatcgtgagatcggaggcattgccatctcagggaagcgtgggacggcaaagacagtgatggctcgtggtttgcatgctatgcttccacccattgaagtggtggttggttccattgcaaatgctgaccctaactcccctgacgaatgggaggatggtttagctgatcaaatacagtatgactctgatggtaatgtcaaatccgagattgtcaaaacaccttttgtgcagattccacttggtgtgacggaggataggctcattggatcagttgatgttgaagcatctgtgagatcagggactactgtatttcaacctggtcttcttgctgaagcacatagaggtgttctttatgttgatgaaataaatctattggatgatggcataagcaatctacttctgaatgtcttgacggagggagttaacattgtggaaagagagggcattagctttcgccatccctgcaaaccacttctaattgctacttacaatccagaggaagggtctgtacgtgaacacttgcttgatcgtattgcaattaatttaagtgctgatcttccaatgagttttgatgaccgcgttgaagcagtggatattgcaacacggtttcaggagtctagcaaagaagttttcaaaatggtggaagaaaaaactgaaactgcaaaaactcagataatttttgcaagagagtatctgaaggatgttactattagcacagagcagctcaaatatcttgtcatggaagctatacgaggtggctgtcaggggcatcgtgctgagttgtatgctgctcgagttgcaaaatgtctagctgctatggaaggacgtgaaaaagtatttgtggatgacctcaagaaagctgtagagctagtcattctacctcgctccatcctatctgataatccacaggatcagcagcaagagcaaccacccccacccccgccaccaccacctccagaaaatcaagattcttcagaagaccaagatgaggaagacgaagaccaagaggatgatgaagaagaaaatgaacaacaagaccaacagatacctgaggagttcatatttgatgctgaaggtggtttagtagatgacaaacttcttttctttgcccagcaagcacagagacgacgtggaaaagctgggcgagcaaagaatgtcatcttctcagaagataggggccgttacataaagcctatgcttcctaagggtccagtaaggaggttagctgttgatgccacgcttagagcagctgcaccataccaaaaactgcgcagagagaaagaacgtgacaaaacaagaaaggtttttgttgaaaagactgacatgagagccaaaagaatggctcgaaaagcaggtcatatttgttgtggacgctagtggtagcatggctctgaatcgtatgcagaatgctaaaggtgcggcgttgaagttgcttgcagaaagctacaccagcagagatcaggtttcaattattccttttcgtggagattatgctgaggttttgcttccaccatcaagatctatagcaatggcccggaaacgtcttgagaagctaccatgtggtggtggttctcctttagctcatggcctaagtacagctgtcagagtgggtctgaatgctgaaaagagtggcgatgttgggcgtatcatgattgttgcaatcaccgatggaagagctaatgtatcactgaagagatccactgacccagaagctgctgctgcttcagatgcaccaagaccttcttctcaagaactgaaggacgagatacttgaggtggctggcaaaatatacaaggcaggaatgtcccttcttgtcatcgacactgagaacaagtttgtatccacgggatttgccaaggaaattgcaagggttgcccaggggaaatattattacctccctaatgcttcggatgctgtaatttctgctgccaccaagaccgccctgacagacttgaagagctcatgattttgcagcagcggcacccgttttctgtaccttttgataggggtggtgaaccttcattcatgcagtagtttttgtgtaggcctctacaatgacagggggaaacaaacccgagcatggcatcgtgtaaagtgttaaggtccaatggcctcctgtccacgtttggcgatgtaaatcctccgtaacatagcttgaaccattgagtgtcacgtagtgccatggctagcagttaaaagtaccatgcgtcatgaatgacggggtggacagtggtggttaaaaatggcagacccatcgtgtggctcgaataaggaggtagtcgcggtacgtgctagaaactgaaaggaaaaagtatataaccctctagcctttaggttttg

SEQ ID NO: 52200 - DNA, 2687 bp, Zea Mays
gcacgagagcggccaccaccatggcgacgcccaccgcgctctccacctcactcccctacctcccgccccgccgcgtcatctcattcccatccgccgccgccgtctccctccccgtcacctcccgccccgcccggctgcgggattcccgcctcgcggccgcggcaacctcggcctccgaggtcctcgagtccaccaacggcgccgtccccactgcggccaaggacggcgcgtggcgcgggtatgggagggagtacttccccctggctgccgtcgttgggcaggatgctatcaaaactgctctgctgcttggggcgattgatcgtgagatcggaggcattgccatctcagggaagcgtgggacggcaaagacagtgatggctcgtggtttgcatgctatgcttccacccattgaagtggtggttggttccattgcaaatgctgaccctaactcccctgacgaatgggaggatggtttagctgatcaaatacagtatgactctgatggtaatgtcaaatccgagattgtcaaaacaccttttgtgcagattccacttggtgtgacggaggataggctcattggatcagttgatgttgaagcatctgtgagatcagggactactgtatttcaacctggtcttcttgctgaagcacatagaggtgttctttatgttgatgaaataaatctattggatgatggcataagcaatctacttctgaatgtcttgacggagggagttaacattgtggaaagagagggcattagctttcgccatccctgcaaaccacttctaattgctacttacaatccagaggaagggtctgtacgtgaacacttgcttgatcgtattgcaattaatttaagtgctgatcttccaatgagttttgatgaccgcgttgaagcagtggatattgcaacacggtttcaggagtctagcaaagaagttttcaaaatggtggaagaaaaaactgaaactgcaaaaactcagataatttttgcaagagagtatctgaaggatgttactattagcacagagcagctcaaatatcttgtcatggaagctatacgaggtggctgtcaggggcatcgtgctgagttgtatgctgctcgagttgcaaaatgtctagctgctatggaaggacgtgaaaaagtatttgtggatgacctcaagaaagctgtagagctagtcattctacctcgctccatcctatctgataatccacaggatcagcagcaagagcaaccacccccacccccgccaccaccacctccagaaaatcaagattcttcagaagaccaagatgaggaagacgaagaccaagaggatgatgaagaagaaaatgaacaacaagaccaacagatacctgaggagttcatatttgatgctgaaggtggtttagtagatgacaaacttcttttctttgcccagcaagcacagagacgacgtggaaaagctgggcgagcaaagaatgtcatcttctcagaagataggggccgttacataaagcctatgcttcctaagggtccagtaaggaggttagctgttgatgccacgcttagagcagctgcaccataccaaaaactgcgcagagagaaagaacgtgacaaaacaagaaaggtttttgttgaaaagactgacatgagagccaaaagaatggctcgaaaagcaggtgctctagtcatatttgttgtggacgctagtggtagcatggctctgaatcgtatgcagaatgctaaaggtgcggcgttgaagttgcttgcagaaagctacaccagcagagatcagctttgtgccttggcatctctctcaggtttcaattattccttttcgtggagattatgctgaggttttgcttccaccatcaagatctatagcaatggcccggaaacgtcttgagaagctaccatgtggtggtggttctcctttagctcatggcctaagtacagctgtcagagtgggtctgaatgctgaaaagagtggcgatgttgggcgtatcatgattgttgcaatcaccgatggaagagctaatgtatcactgaagagatccactgacccagaagctgctgctgcttcagatgcaccaagaccttcttctcaagaactgaaggacgagatacttgaggtggctggcaaaatatacaaggcaggaatgtcccttcttgtcatcgacactgagaacaagtttgtatccacgggatttgccaaggaaattgcaagggttgcccaggggaaatattattacctccctaatgcttcggatgctgtaatttctgctgccaccaagaccgccctgacagacttgaagagctcatgattttgcagcagcggcacccgttttctgtaccttttgataggggtggtgaaccttcattcatgcagtagtttttgtgtaggcctctacaatgacagggggaaacaaacccgagcatggcatcgtgtaaagtgttaaggtccaatggcctcctgtccacgtttggcgatgtaaatcctccgtaacatagcttgaaccattgagtgtcacgtagtgccatggctagcagttaaaagtaccatgcgtcatgaatgacggggtggacagtggtggttaaaaatggcagacccatcgtgtggctcgaataaggaggtagtcgcggtacgtgctagaaactgaaaggaaaaagtatataaccctctagcctttaggttttg

SEQ ID NO: 52201 - DNA, 2888 bp, Zea Mays
gcacgagagcggccaccaccatggcgacgcccaccgcgctctccacctcactcccctacctcccgccccgccgcgtcatctcattcccatccgccgccgccgtctccctccccgtcacctcccgccccgcccggctgcgggattcccgcctcgcggccgcggcaacctcggcctccgaggtcctcgagtccaccaacggcgccgtccccactgcggccaaggacggcgcgtggcgcgggtatgggagggagtacttccccctggctgccgtcgttgggcaggatgctatcaaaactgctctgctgcttggggcgattgatcgtgagatcggaggcattgccatctcagggaagcgtgggacggcaaagacagtgatggctcgtggtttgcatgctatgcttccacccattgaagtggtggttggttccattgcaaatgctgaccctaactcccctgacgaatgggaggatggtttagctgatcaaatacagtatgactctgatggtaatgtcaaatccgagattgtcaaaacaccttttgtgcagattccacttggtgtgacggaggataggctcattggatcagttgatgttgaagcatctgtgagatcagggactactgtatttcaacctggtcttcttgctgaagcacatagaggtgttctttatgttgatgaaataaatctattggatgatggcataagcaatctacttctgaatgtcttgacggagggagttaacattgtggaaagagagggcattagctttcgccatccctgcaaaccacttctaattgctacttacaatccagaggaagggtctgtacgtgaacacttgcttgatcgtattgcaattaatttaagtgctgatcttccaatgagttttgatgaccgcgttgaagcagtggatattgcaacacggtttcaggagtctagcaaagaagttttcaaaatggtggaagaaaaaactgaaactgcaaaaactcagataatttttgcaagagagtatctgaaggatgttactattagcacagagcagctcaaatatcttgtcatggaagctatacgaggtggctgtcaggggcatcgtgctgagttgtatgctgctcgagttgcaaaatgtctagctgctatggaaggacgtgaaaaagtatttgtggatgacctcaagaaagctgtagagctagtcattctacctcgctccatcctatctgataatccacaggatcagcagcaagagcaaccacccccacccccgccaccaccacctccagaaaatcaagattcttcagaagaccaagatgaggaagacgaagaccaagaggatgatgaagaagaaaatgaacaacaagaccaacagatacctgaggagttcatatttgatgctgaaggtggtttagtagatgacaaacttcttttctttgcccagcaagcacagagacgacgtggaaaagctgggcgagcaaagaatgtcatcttctcagaagataggggccgttacataaagcctatgcttcctaaggtaccctgttagtatgttttttcttcctcaaacgcacaagagaaccgcgtatcattatattaagaagaaaaagagtcaaagagactcgtacaagccctaaagagctgggttagtatgtttttgttatttagttctactgcattcttcccttgtattcctaactgaccttttgattggtgccctttcacaaaatgtcccccagtctaaacaattattcgtgttgtagggtccagtaaggaggttagctgttgatgccacgcttagagcagctgcaccataccaaaaactgcgcagagagaaagaacgtgacaaaacaagaaaggtttttgttgaaaagactgacatgagagccaaaagaatggctcgaaaagcaggtgctctagtcatatttgttgtggacgctagtggtagcatggctctgaatcgtatgcagaatgctaaaggtgcggcgttgaagttgcttgcagaaagctacaccagcagagatcaggtttcaattattccttttcgtggagattatgctgaggttttgcttccaccatcaagatctatagcaatggcccggaaacgtcttgagaagctaccatgtggtggtggttctcctttagctcatggcctaagtacagctgtcagagtgggtctgaatgctgaaaagagtggcgatgttgggcgtatcatgattgttgcaatcaccgatggaagagctaatgtatcactgaagagatccactgacccagaagctgctgctgcttcagatgcaccaagaccttcttctcaagaactgaaggacgagatacttgaggtggctggcaaaatatacaaggcaggaatgtcccttcttgtcatcgacactgagaacaagtttgtatccacgggatttgccaaggaaattgcaagggttgcccaggggaaatattattacctccctaatgcttcggatgctgtaatttctgctgccaccaagaccgccctgacagacttgaagagctcatgattttgcagcagcggcacccgttttctgtaccttttgataggggtggtgaaccttcattcatgcagtagtttttgtgtaggcctctacaatgacagggggaaacaaacccgagcatggcatcgtgtaaagtgttaaggtccaatggcctcctgtccacgtttggcgatgtaaatcctccgtaacatagcttgaaccattgagtgtcacgtagtgccatggctagcagttaaaagtaccatgcgtcatgaatgacggggtggacagtggtggttaaaaatggcagacccatcgtgtggctcgaataaggaggtagtcgcggtacgtgctagaaactgaaaggaaaaagtatataaccctctagcctttaggttttg

SEQ ID NO: 52202 - DNA, 946 bp, Zea Mays
ccaacccgcgcgccagcccaactgcccaacgaagctatcctcatgcaatgcatagagggctccatacctgtctcctcgagcacaaggtgaataatgccgggtttgttggccttgagtacatccaagatcgtatagatggcacttcaacgacgagcgaggagttttgtggcatggacatggacaagaggctggagctgctgctgaaatggtgcctccgggagacttgcgatgctgggaaggaatgcatgaggataaactaccacggcacgaagcaagtcacccgagcactcctgccactgctgctggcctccgacagcggaaggatcgtcaatgtctcctcggtgcttgggcagctcaggtttttcggcagcgaggcgctgaagcgggagctggacgacgtggcgagcctgaccgaggagaggctggacgaggtggcgggcgcgttcgtggcggacctggaggccggcgccgtggaggcgcgagggtggtggcccgccgggttctcgccggcttacatggtgtccaaggcggcgctgaacgcctactcgcgcgtcctggcgcggaggcaccccgcgctgcgcgtcaactgcgtgcacccgggcttcgtcaggaccgacatgaccgtcaacttcggcatgctcacgcccgaggaaggcggcagcagggtggtggccgtcgctctgctccccgacggcgggcccaccggcgcctacttccaggagcgccagcaggcgccgttcgtgtgacgcgctctgcctctgctctgcttccttcaccacccgatgcttgatagctatgtatctcttgaagttttcgcttgataatagttgatacacattcaatccccgcgcgtaatctctccgttgcaaaaataatggaatcctaagttttggacaagtaaaaatttctcaacttttgatcaacctatcgacgagatgaatcatgg

SEQ ID NO: 52203 - DNA, 1179 bp, Zea Mays
gtccctcccaacccgcgcgccagcccaactgcccaacgaagctatcctcatgcaatgcatagagggctccatacctgtctcctcgagcacaaggatcgccgtggtgaccggcgggaataaagggatcgggctggaggtctgccggcagctagccgccgcctccaccagcggcctcgccgtcgtcgtcgtcttgacggccagggacgaggcgaggggcgcagctgccgtcgggaagctcagaggcctggggctctccaacgtcttcttccaccagctggacatcacggacgccccgagcatcgctcggctggccgatttcttgaagtcccggtttgggaagctggatatcctggtgaataatgccgggtttgttggccttgagtacatccaagatcgtatagatggcacttcaacgacgagcgaggagttttgtggcatggacatggacaagaggctggagctgctgctgaaatggtgcctccgggagacttgcgatgctgggaaggaatgcatgaggataaactaccacggcacgaagcaagtcacccgagcactcctgccactgctgctggcctccgacagcggaaggatcgtcaatgtctcctcggtgcttgggcagctcaggtttttcggcagcgaggcgctgaagcgggagctggacgacgtggcgggcgcgttcgtggcggacctggaggccggcgccgtggaggcgcgagggtggtggcccgccgggttctcgccggcttacatggtgtccaaggcggcgctgaacgcctactcgcgcgtcctggcgcggaggcaccccgcgctgcgcgtcaactgcgtgcacccgggcttcgtcaggaccgacatgaccgtcaacttcggcatgctcacgcccgaggaaggcggcagcagggtggtggccgtcgctctgctccccgacggcgggcccaccggcgcctacttccaggagcgccagcaggcgccgttcgtgtgacgcgctctgcctctgctctgcttccttcaccacccgatgcttgatagctatgtatctcttgaagttttcgcttgataatagttgatacacattcaatccccgcgcgtaatctctccgttgcaaaaataatggaatcctaagttttggacaagtaaaaatttctcaacttttgatcaacctatcgacgagatgaatcatgg

SEQ ID NO: 52204 - DNA, 2543 bp, Zea Mays
gaatcttaacaagctggatgttaaaaacaagaatacaaatttgtattatatattctatattctatttattcataatcaaagaaaaaactgattaccgaataaataccgtttccgaccgttttcatccctatccaccgtccccagccgtgaagaaaaaaaaaagctccaacagcacaccctcacggcactaacagcacgaagatgaatggcaaccaggagccatcctcgcctctcctttttcacgagcctcgcctgaagcctttttctagacagctttcgtcgtgaacttccaggccagtggtcagaattcagaatctccaaccatacaggcaccatctgtgagactgtgatctgtcttgaacctcctgggagttgtcaatttttcgagctcaccctagaaaacctctttaataatttgaatgccgagaaccgatgcaccgctgactgtgctacagctttcctgattgctctgctctgatgtcctgcgcaggatgtcgaagagtgaaacgcctgaactgaacttggccttcgtgggttgggaggagttggcttggtcctgcaggatggaaataaaaaaatagccaagcacattctgggagacaagaaatgaatgccatgatagagcagattcaaactcatggataaagcagagtagagcttcaaaacaagcttaccgtatctgaattactctctgcagtagagttgcagctcctactgctgctgttgctgtcatcactaccaaatacgtaggatctatagacttatctgtgagaagatgccagtgaaccactggcagtttgtccaagaaacgatgactgcaaggaatacacatgatgccattgtggatagaaccatccaaaatctctccgtttcatctgtactctcagtagggcttgaagaaagggcagttgagtttgatctaccgaatagttatggttatcacttggctgggtgttgtcatgattctcttgcaaccgatcagaaatttcctcatctgaagctttggtgccgcaactatggagatccttcttgcaactcaaaccatcctgcaagccagaggactctagaaatatgtgatcactgtcttcaacagaggtatgtgatctgaaatccagagtacacaaaaagcaaatgtcgttggatcgaatcgtggaaacctcaacgaaacaactcagcacttacttcttcagaacctccatcttacaaaggcggatctacaattaacaaaaatgagaacaaagataaaaaatctcagcatctaaattctactcccatgtgcagttgacgtgtgtatatgtacacctcgcagcagcctctgtgactcagcatggatcgaatgaagctgcgccctcctctcctaacacacgaacccagactcccagagcaccagacatcatcaaaaaccggctagcaattcaactaaccaacggccagacccagaacgcaagagacagcggctggttaccttctcagagagcttcttctcccggaccaactccatgggcggcgcctcctcctccatcttcgtgttcctcctcttccccccttggcctgcgctcccgcccccgcccccgaagccacctccacgtcaacttcgtccagatcgagctgcttcctcaccgtccccttcggccggcgcgcctagcgggtcctgccccacagcgggtcgatcttgtcctccacgtcgctgccgtcgcccgtcgtcgggggtgtcgatcggcggcaacggtgacgacgcatctggtggcgtgatcgggcgcgtggaagggccgcggagatggaacggactcggcgctaggctttctcacccggcgtcgcctaatactagcggtggcggaggcaaggcggggagcaagagggcaagtggtagctgtgacttaggaagaggatctcctgaaaatggaagcgctgaatcacacaggaaggagataattggatttttgccactcacaatgttgtcttctttttataattaccactgtgtctatgaattgtgggtccagctgggtctatgaaatgtgggtctgatggcaattttacaaacatgtttcatgctgatagcaaatatcagaatctctcggaaggaagaggatctcctgaaaatggaagcgctgaatcacacagccgaaatgaatatcggtgtcaaaataaatattaatcactagtcaagattgttaagttattatgagtagatattctctattcaaactctttaaacagtacagtgaacaataatgcaagtcgcgaccaaactttcaactgacaaaggacctaatttaaatttaacagatttcaaactcttacagtacagtaaacaacaattcgagaaacaatcaacttttaactgacaaaggacctaaattaaatttatcagatttggcaggggccgcgcgaacgcgtaccccctctaccacaaattatgacgtccactctcctacttggggagatggtaagccagcgcacccgccatgtgcaatgcgggccactgacctaggccacagggcttcttgatccccagtcgaccccgtccaggtaagtatgga

SEQ ID NO: 52205 - DNA, 3502 bp, Zea Mays
tgaatttgaggtttaccttttatgaatcttaacaagctggatgttaaaaacaagaatacaaatttgtattatatattctatattctatttattcataatcaaagaaaaaactgattaccgaataaataccgtttccgaccgttttcatccctatccaccgtccccagccgtgaagaaaaaaaaaagctccaacagcacaccctcacggcactaacagcacgaagatgaatggcaaccaggagccatcctcgcctctcctttttcacgagcctcgcctgaagcctttttctagacagctttcgtcgtgaacttccaggccagtggtcagaattcagaatctccaaccatacaggcaccatctgtgagactgtgatctgtcttgaacctcctgggagttgtcaatttttcgagctcaccctagaaaacctctttaataatttgaatgccgagaaccgatgcaccgctgactgtgctacagctttcctgattgctctgctctgatgtcctgcgcaggatgtcgaagagtgaaacgcctgaactgaacttggccttcgtgggttgggaggagttggcttggtcctgcaggatggaaataaaaaaatagccaagcacattctgggagacaagaaatgaatgccatgatagagcagattcaaactcatggataaagcagagtagagcttcaaaacaagcttaccgtatctgaattactctctgcagtagagttgcagctcctactgctgctgttgctgtcatcactaccaaatacgtaggatctatagacttatctgtgagaagatgccagtgaaccactggcagtttgtccaagaaacgatgactgcaaggaatacacatgatgccattgtggatagaaccatccaaaatctctgatgacaatagatgcaatgaatgaaggtcataaaattatcaggagtgaatggaatggaagcattgtgggcagaagtacagtatatagtcaatagagaaccaaaagttgcagtcacaaagaaccaaaaggtgtgcttatcataaggtgttacagcagtctcatccgttctccagtttgtggttgtaagatttcaaagtcgctatacgaattagctccgattaactgtaaatgtttcaccatagtgatccaaacccaacaccagatggttggtaggtggttgtttataacccatacaacaatgcaaaagtgaacgcacaagtatgaatggtatggtacaacctggagaacatgagggcttgtattaattcatgcttctgtaggtttggtgtcctctgatcgttttaacggtgaacaatagatgcacgtcagtaatgaatgaaggtcagaaaaattcaactactaaacaattcgtactattaaagccgggagcaaatctgccctcccatacgtccatgtcagtaaaaaaatactccctctgttccacaatactgtttattttacttgtttatttttgtgtccatattcaaatggatgacaatgaatctagacacatatataaaacacatacatcaaatattgtatgaatccattaacaacctaaaacgaatactattttggtacggagggagtaatacataactatcctctggataagtgtgcaagtttgccaaaaaatcaaaacaaagtaagaagtcactgcatgttttatgtacagagctaacagggctctagaactggtttgtgtaggcaaagttgataatattaacataatgttttcatttagccactcaaattcaatgcccctaacagggataccgaccatgtttcagatcaatgaagggcagggcaggggacttttcatcctaaaaaggtcaaatgactaggggggaattatggtgctggaaccaaggcatataggcaacaactacaatggttgttgtggaaaattgagatgggtgatagaagagtatacacacctccgtttcatctgtactctcagtagggcttgaagaaagggcagttgagtttgatctaccgaatagttatggttatcacttggctgggtgttgtcatgattctcttgcaaccgatcagaaatttcctgatagaatcaaacaataaattgctatttgttaaacaagttgttgaatgtagataagtaacaagcttgaaattgtagttgaagatgttgtgtgtttaaaaattgttattctatttgataagacttctcagtcacataatttataacatctcaaatctctgcttagaaaatactagatagtggtttttggccatgcatgggatagcttggagtagtgaaatagtagaagactaatgctgtagataaatcatcctcctattatgctatgacaatttttttcctgcagatggcagcatattggacagggggacaatacctcatctgaagctttggtgccgcaactatggagatccttcttgcaactcaaaccatccttctcagagagcttcttctcccggaccaactccatgggcggcgcctcctcctccatcttcgtgttcctcctcttccccccttggcctgcgctcccgcccccgcccccgaagccacctccacgtcaacttcgtccagatcgagctgcttcctcaccgtccccttcggccggcgcgcctagcgggtcctgccccacagcgggtcgatcttgtcctccacgtcgctgccgtcgcccgtcgtcgggggtgtcgatcggcggcaacggtgacgacgcatctggtggcgtgatcgggcgcgtggaagggccgcggagatggaacggactcggcgctaggctttctcacccggcgtcgcctaatactagcggtggcggaggcaaggcggggagcaagagggcaagtggtagctgtgacttaggaagaggatctcctgaaaatggaagcgctgaatcacacaggaaggagataattggatttttgccactcacaatgttgtcttctttttataattaccactgtgtctatgaattgtgggtccagctgggtctatgaaatgtgggtctgatggcaattttacaaacatgtttcatgctgatagcaaatatcagaatctctcggaaggaagaggatctcctgaaaatggaagcgctgaatcacacagccgaaatgaatatcggtgtcaaaataaatattaatcactagtcaagattgttaagttattatgagtagatattctctattcaaactctttaaacagtacagtgaacaataatgcaagtcgcgaccaaactttcaactgacaaaggacctaatttaaatttaacagatttcaaactcttacagtacagtaaacaacaattcgagaaacaatcaacttttaactgacaaaggacctaaattaaatttatcagatttggcaggggccgcgcgaacgcgtaccccctctaccacaaattatgacgtccactctcctacttggggagatggtaagccagcgcacccgccatgtgcaatgcgggccactgacctaggccacagggcttcttgatccccagtcgaccccgtccaggtaagtatgga

SEQ ID NO: 52206 - DNA, 3199 bp, Zea Mays
aaaaaatgtaggatgaatttgaggtttaccttttatgaatcttaacaagctggatgttaaaaacaagaatacaaatttgtattatatattctatattctatttattcataatcaaagaaaaaactgattaccgaataaataccgtttccgaccgttttcatccctatccaccgtccccagccgtgaagaaaaaaaaaagctccaacagcacaccctcacggcactaacagcacgaagatgaatggcaaccaggagccatcctcgcctctcctttttcacgagcctcgcctgaagcctttttctagacagctttcgtcgtgaacttccaggccagtggtcagaattcagaatctccaaccatacaggcaccatctgtgagactgtgatctgtcttgaacctcctgggagttgtcaatttttcgagctcaccctagaaaacctctttaataatttgaatgccgagaaccgatgcaccgctgactgtgctacagctttcctgattgctctgctctgatgtcctgcgcaggatgtcgaagagtgaaacgcctgaactgaacttggccttcgtgggttgggaggagttggcttggtcctgcaggatggaaataaaaaaatagccaagcacattctgggagacaagaaatgaatgccatgatagagcagattcaaactcatggataaagcagagtagagcttcaaaacaagcttaccgtatctgaattactctctgcagtagagttgcagctcctactgctgctgttgctgtcatcactaccaaatacgtaggatctatagacttatctgtgagaagatgccagtgaaccactggcagtttgtccaagaaacgatgactgcaaggaatacacatgatgccattgtggatagaaccatccaaaatctctgatgacaatagatgcaatgaatgaaggtcataaaattatcaggagtgaatggaatggaagcattgtgggcagaagtacagtatatagtcaatagagaaccaaaagttgcagtcacaaagaaccaaaaggtgtgcttatcataaggtgttacagcagtctcatccgttctccagtttgtggttgtaagatttcaaagtcgctatacgaattagctccgattaactgtaaatgtttcaccatagtgatccaaacccaacaccagatggttggtaggtggttgtttataacccatacaacaatgcaaaagtgaacgcacaagtatgaatggtatggtacaacctggagaacatgagggcttgtattaattcatgcttctgtaggtttggtgtcctctgatcgttttaacggtgaacaatagatgcacgtcagtaatgaatgaaggtcagaaaaattcaactactaaacaattcgtactattaaagccgggagcaaatctgccctcccatacgtccatgtcagtaaaaaaatactccctctgttccacaatactgtttattttacttgtttatttttgtgtccatattcaaatggatgacaatgaatctagacacatatataaaacacatacatcaaatattgtatgaatccattaacaacctaaaacgaatactattttggtacggagggagtaatacataactatcctctggataagtgtgcaagtttgccaaaaaatcaaaacaaagtaagaagtcactgcatgttttatgtacagagctaacagggctctagaactggtttgtgtaggcaaagttgataatattaacataatgttttcatttagccactcaaattcaatgcccctaacagggataccgaccatgtttcagatcaatgaagggcagggcaggggacttttcatcctaaaaaggtcaaatgactaggggggaattatggtgctggaaccaaggcatataggcaacaactacaatggttgttgtggaaaattgagatgggtgatagaagagtatacacacctccgtttcatctgtactctcagtagggcttgaagaaagggcagttgagtttgatctaccgaatagttatggttatcacttggctgggtgttgtcatgattctcttgcaaccgatcagaaatttcctcatctgaagctttggtgccgcaactatggagatccttcttgcaactcaaaccatccttctcagagagcttcttctcccggaccaactccatgggcggcgcctcctcctccatcttcgtgttcctcctcttccccccttggcctgcgctcccgcccccgcccccgaagccacctccacgtcaacttcgtccagatcgagctgcttcctcaccgtccccttcggccggcgcgcctagcgggtcctgccccacagcgggtcgatcttgtcctccacgtcgctgccgtcgcccgtcgtcgggggtgtcgatcggcggcaacggtgacgacgcatctggtggcgtgatcgggcgcgtggaagggccgcggagatggaacggactcggcgctaggctttctcacccggcgtcgcctaatactagcggtggcggaggcaaggcggggagcaagagggcaagtggtagctgtgacttaggaagaggatctcctgaaaatggaagcgctgaatcacacaggaaggagataattggatttttgccactcacaatgttgtcttctttttataattaccactgtgtctatgaattgtgggtccagctgggtctatgaaatgtgggtctgatggcaattttacaaacatgtttcatgctgatagcaaatatcagaatctctcggaaggaagaggatctcctgaaaatggaagcgctgaatcacacagccgaaatgaatatcggtgtcaaaataaatattaatcactagtcaagattgttaagttattatgagtagatattctctattcaaactctttaaacagtacagtgaacaataatgcaagtcgcgaccaaactttcaactgacaaaggacctaatttaaatttaacagatttcaaactcttacagtacagtaaacaacaattcgagaaacaatcaacttttaactgacaaaggacctaaattaaatttatcagatttggcaggggccgcgcgaacgcgtaccccctctaccacaaattatgacgtccactctcctacttggggagatggtaagccagcgcacccgccatgtgcaatgcgggccactgacctaggccacagggcttcttgatccccagtcgaccccgtccaggtaagtatgga

SEQ ID NO: 52207 - DNA, 1323 bp, Zea Mays
caactgcaacacagaggcatctctctccgcctccacgccgccgcccccagaccctcctcgatccagcggtgattcgccgggctcccggcccggccatggatttgctggcgtccttggccgccgaggagcggtggctgttcccggcgttcctcgccatgtacgccgccatctactgcgccggccagctcgtcgtgttccggcggtgggcgccgcggcagaggctcgacggcgccagctgcctcatctcgctattccacggcacccccgccgcgctggccgccgcgggggccatcctcgcgcttcccgcggagtcccgctccttcgccgcgcccaacgcgcgcctccaggaccacgtcctcgactacagcgtcgcctacttcaccatggacctgctccactacctcgccttcctgccgggcgacgtcctcttcatcgcgcaccacctcgccacgctcttcgtcttcctgacctgccgctacctcgtccgccacggcgcctacgcgctcctcgtcctccttgtcctcgctgaggtcaccagcctgctgcagaacgtctggacgctcgccgggatctggcgggaccagtcccccgccgccgcccgcgtctacggcgccctctcgccgcccttctacgcgctctacacgctcgtcaggggcgtcgccggcccgctcttcctcctcaagatggccgccttctacctgtccggccaggccgtcgacgtcattccgtggtgggtgcggatctcctggatcctggttgtcggcaccgccattgcggtcagcaacctgtggatttggaacctctggaaggagctcgtcagggaatggaagcagcaggcccctcccaagtcaaagaaagacacataggccgccacctcactaccgtgtacgggtgtaggaaccatgtagcttcttaatctttccaaatacatctgagccaactgacacggatgatgcagactgatgatatgttaaaagccaaatttcggatggcattggtggagggtgcttatctgtaagctacaactattcattctttgattggaaaatcaggtccatgtgccacaaagtctacttttacctcaaaagagggctgttcagtgctttgccatgtgtgcaacaaagcagctacgcaagcacaatggtttgatgctgttcccattcatttgaaattgttacattgtggttcactttttgaacaagaaaacatttttcatcccaatgttttgcaacttggtcaaatgattggagcgtgttaccaagtttgaagttttgagcaactctatactgggccttgttttccatcatgtacttgatattctac

SEQ ID NO: 52208 - DNA, 1432 bp, Zea Mays
cgcaactgcaacacagaggcatctctctccgcctccacgccgccgcccccagaccctcctcgatccagcggtgattcgccgggctcccggcccggccatggatttgctggcgtccttggccgccgaggagcggtggctgttcccggcgttcctcgccatgtacgccgccatctactgcgccggccagctcgtcgtgttccggcggtgggcgccgcggcagaggctcgacggcgccagctgcctcatctcgctattccacggcacccccgccgcgctggccgccgcgggggccatcctcgcgcttcccgcggagtcccgctccttcgccgcgcccaacgcgcgcctccaggaccacgtcctcgactacagcgtcgcctacttcaccatggacctgctccactacctcgccttcctgccgggcgacgtcctcttcatcgcgcaccacctcgccacgctcttcgtcttcctgacctgccgctacctcgtccgccacggcgcctacgcgctcctcgtcctccttgtcctcgctgaggtcaccagcctgctgcagaacgtctggacgctcgccgggatctggcgggaccagtcccccgccgccgcccgcgtctacggcgccctctcgccgcccttctacgcgctctacacgctcgtcaggggcgtcgccggcccgctcttcctcctcaagatggccgccttctacctgtccggccaggccgtcgacgtcattccgtggtgggtgcggatctcctggatcctggttgtcggcaccgccattgcggtcagcaacctgtggatttggaacctctggaaggagctcgtcagggaatggaagcagcaggcccctcccaagtcaaagaaagacacataggccgccacctcactaccgtactgatgatatgttaaaagccaaatttcggatggcattggtggagggtgcttatctgtaagctacaactattcattctttgattggaaaatcaggtccatgtgccacaaagtctacttttacctcaaaaggtactccctccgttccaaataaaaagtggaatataatttggaacagaagagtactcccccctcatgggtgtttcttattgttgcacatcgattttgtggctcaaatgccccctttgaaacatataacgccaaaataatcttaattaattaattggtttttaacaggctactctgtttgcaacaatggggatatgtaaccttaaataccatgtctgtttatcacagtgcatcttagattgcatcatattgtaatagttttagttccttgacatcctgcctgtgtaaaaggaagtgcaaaaggaactgcttgatgtatttactgttgtgtatctgtgcctgccaacttgcctggagaaaagttgaccttccacatgctgtcatattgctaaaatgtaacttaagagctcttctatat

SEQ ID NO: 52209 - DNA, 2140 bp, Zea Mays
cgccctagctcacacgccaagccccagtacaaacaaagcctacggaatttcccccagctccaattcgcgctgttcgttccctttcagccagtcagtcgccgcctccgctgaactgcaagtccaaactagctagctcactgggcaccgatttcccctaaaattttcgctgcttccaggaggccgcggcgaccatgggcaactgctgcgccgcgccgtcgacggagggaagcggcaagacccgccccaagaagcagaaggagaacccctacaacgtcgcctacaaccgcggcgcggcggcgccgccgccgcccccggcgcgcccgggcctggtggtgctgcgggacccgacggggcgggacctcggcgcggagtacgagctgggcggcgagctggggcgcggcgagttcggcgtcacgtacctgtgcacggagcccgccacgggggcgcgctacgcgtgcaagtccatatccaagcgcaagctgcgcacgcccgtggacgtggaggacgtgcgccgggaggtggacatcatgcgccacatgccgccgcaccccaacatcgtcagcctccgcgccgcctacgaggaccgagacgccgtgcacctcgtcatggagctctgcgagggaggggagctcttcgacaggatcgtcgcccgcgggcactacaccgagcgcgccgccgccgccgtcatgcgaaccatcgttgaggtcgtccagaagtgccacaggcatggcgtcatgcaccgggatcttaaaccagagaactttttatatgcaagcaaggacagttcccctctaaaagcaattgattttggcctgtctgtgttcttcaggcctggcagtccatactacatggccccagaggttctgaagcgaaactatggccctgaagttgatgtctggagtgctggagtgatactttacatacttctttgtggtgtaccaccattttgggcagaaaccgaacagggagtagcgcaggcaatcatacgatctgtggtagatttcaaaagagaaccatggcccagagtatctgagcctgctaaagatcttgtcaggcgcatgcttgacccaaatccattgacacggtttactgcagcacaagtacttgttgaatgggcagagcatccatggctacatgactctaaaaacacgccagacgtttctcttggcgatactgtccgagcaagactgcagcaatttgctgcgatgaacaagttaaagaagaaagcactaagggtgattgctgagcatctgtctgcggaggaagtagctgacataaagcaaatgttcgataagatggacgtgaacaagaacggcaagctaacattcgaggaattcaaggccggcctccgtaagctgggaaaccaaatgcatgattcagaccttcagatactgatggatgctgccgacgtcgacagaaacgggaccttagattacgaggaattcgtcacggtgtctgtccacgtgaggaagataggcaacgacgaacacatccagaaggccttcgcatacttcgaccggaataagagtgggtacatagagatcgaggagcttagagaggcactggctgatgaactggatggcagtgatgaagacatcatcggtggcatcatccgggacgtggacacagataaggacgggaagataggctacgacgagttcgcggcgatgatgaaggccggcactgactggaggaaggcctcccggcagtactcgcggcagcggttcagcaacctgagcctgaagctccagaaggacgggtccctcggcgccgacacacggtaggccgccgagtgtagtggtggtgctggtgttcgtccgtctctttgcttgcttgcttgttttgctgtgcggggtttttgttggttggtcagacagtcagtcaggtcattagattccacctccacgttctgtttccattacacggtgaaccctcagctggagctgtgattcttgggcttgtgattgtagaagaaagatgcacgtacaacgtacgtattgtagatgggtgcagcagcgtgtgctgacaaagaatgctggagtagcacaagacacgagtagtcttgctttgcttgtaacttgtaagtagaatttgttttgtgtgcttgcaatgcatgacgatggtgattgccctgcaaaac

SEQ ID NO: 52210 - DNA, 2042 bp, Zea Mays
cgccctagctcacacgccaagccccagtacaaacaaagcctacggaatttcccccagctccaattcgcgctgttcgttccctttcagccagaggccgcggcgaccatgggcaactgctgcgccgcgccgtcgacggagggaagcggcaagacccgccccaagaagcagaaggagaacccctacaacgtcgcctacaaccgcggcgcggcggcgccgccgccgcccccggcgcgcccgggcctggtggtgctgcgggacccgacggggcgggacctcggcgcggagtacgagctgggcggcgagctggggcgcggcgagttcggcgtcacgtacctgtgcacggagcccgccacgggggcgcgctacgcgtgcaagtccatatccaagcgcaagctgcgcacgcccgtggacgtggaggacgtgcgccgggaggtggacatcatgcgccacatgccgccgcaccccaacatcgtcagcctccgcgccgcctacgaggaccgagacgccgtgcacctcgtcatggagctctgcgagggaggggagctcttcgacaggatcgtcgcccgcgggcactacaccgagcgcgccgccgccgccgtcatgcgaaccatcgttgaggtcgtccagaagtgccacaggcatggcgtcatgcaccgggatcttaaaccagagaactttttatatgcaagcaaggacagttcccctctaaaagcaattgattttggcctgtctgtgttcttcaggcctggcagtccatactacatggccccagaggttctgaagcgaaactatggccctgaagttgatgtctggagtgctggagtgatactttacatacttctttgtggtgtaccaccattttgggcagaaaccgaacagggagtagcgcaggcaatcatacgatctgtggtagatttcaaaagagaaccatggcccagagtatctgagcctgctaaagatcttgtcaggcgcatgcttgacccaaatccattgacacggtttactgcagcacaagtacttgagcatccatggctacatgactctaaaaacacgccagacgtttctcttggcgatactgtccgagcaagactgcagcaatttgctgcgatgaacaagttaaagaagaaagcactaagggtgattgctgagcatctgtctgcggaggaagtagctgacataaagcaaatgttcgataagatggacgtgaacaagaacggcaagctaacattcgaggaattcaaggccggcctccgtaagctgggaaaccaaatgcatgattcagaccttcagatactgatggatgctgccgacgtcgacagaaacgggaccttagattacgaggaattcgtcacggtgtctgtccacgtgaggaagataggcaacgacgaacacatccagaaggccttcgcatacttcgaccggaataagagtgggtacatagagatcgaggagcttagagaggcactggctgatgaactggatggcagtgatgaagacatcatcggtggcatcatccgggacgtggacacagataaggacgggaagataggctacgacgagttcgcggcgatgatgaaggccggcactgactggaggaaggcctcccggcagtactcgcggcagcggttcagcaacctgagcctgaagctccagaaggacgggtccctcggcgccgacacacggtaggccgccgagtgtagtggtggtgctggtgttcgtccgtctctttgcttgcttgcttgttttgctgtgcggggtttttgttggttggtcagacagtcagtcaggtcattagattccacctccacgttctgtttccattacacggtgaaccctcagctggagctgtgattcttgggcttgtgattgtagaagaaagatgcacgtacaacgtacgtattgtagatgggtgcagcagcgtgtgctgacaaagaatgctggagtagcacaagacacgagtagtcttgctttgcttgtaacttgtaagtagaatttgttttgtgtgcttgcaatgcatgacgatggtgattgccctgcaaaac

SEQ ID NO: 52211 - DNA, 2153 bp, Zea Mays
cgccctagctcacacgccaagccccagtacaaacaaagcctacggaatttcccccagctccaattcgcgctgttcgttccctttcagccagtcagtcgccgcctccgctgaactgcaagtccaaactagctagctcactgggcaccgatttcccctaaaattttcgctgcttccaggaggccgcggcgaccatgggcaactgctgcgccgcgccgtcgacggagggaagcggcaagacccgccccaagaagcagaaggagaacccctacaacgtcgcctacaaccgcggcgcggcggcgccgccgccgcccccggcgcgcccgggcctggtggtgctgcgggacccgacggggcgggacctcggcgcggagtacgagctgggcggcgagctggggcgcggcgagttcggcgtcacgtacctgtgcacggagcccgccacgggggcgcgctacgcgtgcaagtccatatccaagcgcaagctgcgcacgcccgtggacgtggaggacgtgcgccgggaggtggacatcatgcgccacatgccgccgcaccccaacatcgtcagcctccgcgccgcctacgaggaccgagacgccgtgcacctcgtcatggagctctgcgagggaggggagctcttcgacaggatcgtcgcccgcgggcactacaccgagcgcgccgccgccgccgtcatgcgaaccatcgttgaggtcgtccagaagtgccacaggcatggcgtcatgcaccgggatcttaaaccagagaactttttatatgcaagcaaggacagttcccctctaaaagcaattgattttggcctgtctgtgttcttcaggcctggtgagcgatttacggaaattgtaggcagtccatactacatggccccagaggttctgaagcgaaactatggccctgaagttgatgtctggagtgctggagtgatactttacatacttctttgtggtgtaccaccattttgggcagggagtagcgcaggcaatcatacgatctgtggtagatttcaaaagagaaccatggcccagagtatctgagcctgctaaagatcttgtcaggcgcatgcttgacccaaatccattgacacggtttactgcagcacaagtacttgttgaatgggcagagcatccatggctacatgactctaaaaacacgccagacgtttctcttggcgatactgtccgagcaagactgcagcaatttgctgcgatgaacaagttaaagaagaaagcactaagggtgattgctgagcatctgtctgcggaggaagtagctgacataaagcaaatgttcgataagatggacgtgaacaagaacggcaagctaacattcgaggaattcaaggccggcctccgtaagctgggaaaccaaatgcatgattcagaccttcagatactgatggatgctgccgacgtcgacagaaacgggaccttagattacgaggaattcgtcacggtgtctgtccacgtgaggaagataggcaacgacgaacacatccagaaggccttcgcatacttcgaccggaataagagtgggtacatagagatcgaggagcttagagaggcactggctgatgaactggatggcagtgatgaagacatcatcggtggcatcatccgggacgtggacacagataaggacgggaagataggctacgacgagttcgcggcgatgatgaaggccggcactgactggaggaaggcctcccggcagtactcgcggcagcggttcagcaacctgagcctgaagctccagaaggacgggtccctcggcgccgacacacggtaggccgccgagtgtagtggtggtgctggtgttcgtccgtctctttgcttgcttgcttgttttgctgtgcggggtttttgttggttggtcagacagtcagtcaggtcattagattccacctccacgttctgtttccattacacggtgaaccctcagctggagctgtgattcttgggcttgtgattgtagaagaaagatgcacgtacaacgtacgtattgtagatgggtgcagcagcgtgtgctgacaaagaatgctggagtagcacaagacacgagtagtcttgctttgcttgtaacttgtaagtagaatttgttttgtgtgcttgcaatgcatgacgatggtgattgccctgcaaaac

SEQ ID NO: 52212 - DNA, 2081 bp, Zea Mays
ggagtcacccgcccccgccctagctcacacgccaagccccagtacaaacaaagcctacggaatttcccccagctccaattcgcgctgttcgttccctttcagccagaggccgcggcgaccatgggcaactgctgcgccgcgccgtcgacggagggaagcggcaagacccgccccaagaagcagaaggagaacccctacaacgtcgcctacaaccgcggcgcggcggcgccgccgccgcccccggcgcgcccgggcctggtggtgctgcgggacccgacggggcgggacctcggcgcggagtacgagctgggcggcgagctggggcgcggcgagttcggcgtcacgtacctgtgcacggagcccgccacgggggcgcgctacgcgtgcaagtccatatccaagcgcaagctgcgcacgcccgtggacgtggaggacgtgcgccgggaggtggacatcatgcgccacatgccgccgcaccccaacatcgtcagcctccgcgccgcctacgaggaccgagacgccgtgcacctcgtcatggagctctgcgagggaggggagctcttcgacaggatcgtcgcccgcgggcactacaccgagcgcgccgccgccgccgtcatgcgaaccatcgttgaggtcgtccagaagtgccacaggcatggcgtcatgcaccgggatcttaaaccagagaactttttatatgcaagcaaggacagttcccctctaaaagcaattgattttggcctgtctgtgttcttcaggcctggtgagcgatttacggaaattgtaggcagtccatactacatggccccagaggttctgaagcgaaactatggccctgaagttgatgtctggagtgctggagtgatactttacatacttctttgtggtgtaccaccattttgggcagaaaccgaacagggagtagcgcaggcaatcatacgatctgtggtagatttcaaaagagaaccatggcccagagtatctgagcctgctaaagatcttgtcaggcgcatgcttgacccaaatccattgacacggtttactgcagcacaagtacttgagcatccatggctacatgactctaaaaacacgccagacgtttctcttggcgatactgtccgagcaagactgcagcaatttgctgcgatgaacaagttaaagaagaaagcactaagggtgattgctgagcatctgtctgcggaggaagtagctgacataaagcaaatgttcgataagatggacgtgaacaagaacggcaagctaacattcgaggaattcaaggccggcctccgtaagctgggaaaccaaatgcatgattcagaccttcagatactgatggatgctgccgacgtcgacagaaacgggaccttagattacgaggaattcgtcacggtgtctgtccacgtgaggaagataggcaacgacgaacacatccagaaggccttcgcatacttcgaccggaataagagtgggtacatagagatcgaggagcttagagaggcactggctgatgaactggatggcagtgatgaagacatcatcggtggcatcatccgggacgtggacacagataaggacgggaagataggctacgacgagttcgcggcgatgatgaaggccggcactgactggaggaaggcctcccggcagtactcgcggcagcggttcagcaacctgagcctgaagctccagaaggacgggtccctcggcgccgacacacggtaggccgccgagtgtagtggtggtgctggtgttcgtccgtctctttgcttgcttgcttgttttgctgtgcggggtttttgttggttggtcagacagtcagtcaggtcattagattccacctccacgttctgtttccattacacggtgaaccctcagctggagctgtgattcttgggcttgtgattgtagaagaaagatgcacgtacaacgtacgtattgtagatgggtgcagcagcgtgtgctgacaaagaatgctggagtagcacaagacacgagtagtcttgctttgcttgtaacttgtaagtagaatttgttttgtgtgcttgcaatgcatgacgatggtgattgccctgcaaaac

SEQ ID NO: 52213 - DNA, 1738 bp, Zea Mays
ggagtcacccgcccccgccctagctcacacgccaagccccagtacaaacaaagcctacggaatttcccccagctccaattcgcgctgttcgttccctttcagccagtcagtcgccgcctccgctgaactgcaagtccaaactagctagctcactgggcaccgatttcccctaaaattttcgctgcttccaggaggccgcggcgaccatgggcaactgctgcgccgcgccgtcgacggagggaagcggcaagacccgccccaagaagcagaaggagaacccctacaacgtcgcctacaaccgcggcgcggcggcgccgccgccgcccccggcgcgcccgggcctggtggtgctgcgggacccgacggggcgggacctcggcgcggagtacgagctgggcggcgagctggggcgcggcgagttcggcgtcacgtacctgtgcacggagcccgccacgggggcgcgctacgcgtgcaagtccatatccaagcgcaagctgcgcacgcccgtggacgtggaggacgtgcgccgggaggtggacatcatgcgccacatgccgccgcaccccaacatcgtcagcctccgcgccgcctacgaggaccgagacgccgtgcacctcgtcatggagctctgcgagggaggggagctcttcgacaggatcgtcgcccgcgggcactacaccgagcgcgccgccgccgccgtcatgcgaaccatcgttgagcatccatggctacatgactctaaaaacacgccagacgtttctcttggcgatactgtccgagcaagactgcagcaatttgctgcgatgaacaagttaaagaagaaagcactaagggtgattgctgagcatctgtctgcggaggaagtagctgacataaagcaaatgttcgataagatggacgtgaacaagaacggcaagctaacattcgaggaattcaaggccggcctccgtaagctgggaaaccaaatgcatgattcagaccttcagatactgatggatgctgccgacgtcgacagaaacgggaccttagattacgaggaattcgtcacggtgtctgtccacgtgaggaagataggcaacgacgaacacatccagaaggccttcgcatacttcgaccggaataagagtgggtacatagagatcgaggagcttagagaggcactggctgatgaactggatggcagtgatgaagacatcatcggtggcatcatccgggacgtggacacagataaggacgggaagataggctacgacgagttcgcggcgatgatgaaggccggcactgactggaggaaggcctcccggcagtactcgcggcagcggttcagcaacctgagcctgaagctccagaaggacgggtccctcggcgccgacacacggtaggccgccgagtgtagtggtggtgctggtgttcgtccgtctctttgcttgcttgcttgttttgctgtgcggggtttttgttggttggtcagacagtcagtcaggtcattagattccacctccacgttctgtttccattacacggtgaaccctcagctggagctgtgattcttgggcttgtgattgtagaagaaagatgcacgtacaacgtacgtattgtagatgggtgcagcagcgtgtgctgacaaagaatgctggagtagcacaagacacgagtagtcttgctttgcttgtaacttgtaagtagaatttgttttgtgtgcttgcaatgcatgacgatggtgattgccctgcaaaac

SEQ ID NO: 52214 - DNA, 551 bp, Zea Mays
cgcgattattgcatcttatccagacagccccgcactcctctcttcagtctctctccccttcgcggctcccaccgcgtgccgccgccctacaccaggtgccccccacgtctgcatcgggcccgtctccggcgacgaacgcccagcagggggaggaggatgggcgagttcgacgactactgggcgcgggcgtacaggggcgaccccgcggtcccgcactccgacccgcagcggctcatctccacctggaccggcgcctttgccctcggcgcggccgcctgcgtccaccaccacgcctccgcgcttgcatcccgcctcaagtccctaccggcgacttggcaagacatgacattggcccttgatcaaaagcgatggaagaaagcttttgagaaaaagcggcagcaaccttaagctcattgttctttccaacttcttgggccagttggatgagcactgtttctggtcatcaattgtggcgcatgaagcttcaaagttctctctatatacacatgatggtctgggttcgccaccggttgtaggcttgtagcacttgc

SEQ ID NO: 52215 - DNA, 563 bp, Zea Mays
cgcgattattgcatcttatccagacagccccgcactcctctcttcagtctctctccccttcgcggctcccaccgcgtgccgccgccctacaccaggtgccccccacgtctgcatcgggcccgtctccggcgacgaacgcccagcagggggaggaggatgggcgagttcgacgactactgggcgcgggcgtacaggggcgaccccgcggtcccgcactccgacccgcagcggctcatctccacctggaccggcgcctttgccctcggcgcggccgcctgcgtccaccaccacgcctccgcgcttgcatcccgcctcaagtccctaccggcgacttggcaagacatgacattggcccttgatcaaaagcgatggaagaaagcttttgagaaaaagcggcagcaaccttaagctcattgttctttccaacttcttgggccagttggatgagcactgtttctggtcatcaattgtggcgcatgaagcttcaaagttctctctatatacacatgatgtattgactgagggtctgggttcgccaccggttgtaggcttgtagcacttgc

SEQ ID NO: 52216 - DNA, 668 bp, Zea Mays
cgcgattattgcatcttatccagacagccccgcactcctctcttcagtctctctccccttcgcggctcccaccgcgtgccgccgccctacaccaggtgccccccacgtctgcatcgggcccgtctccggcgacgaacgcccagcaggatgggcgagttcgacgactactgggcgcgggcgtacaggggcgaccccgcggtcccgcactccgacccgcagcggctcatctccacctggaccggcgcctttgccctcggcgcggccgcctgcgtccaccaccacgcctccgcgcttgcatcccgcctcaagtccctaccggcgacttggcaagacatgacattggcccttgatcaaaagcgatggaagaaagcttttgagaaaaagcggcagcaaccttaagctcattgttctttccaacttcttgggccagttggatgagcactgtttctggtcatcaattgtggcgcatgaagcttcaaagttctctctatatacacatgatgtattgactgaggttctacttttggttttcttgtttagcgttacaactttctcagtttatgcatttggtccatctcagatcatcagatgacattcagaatgatttgtctattctcaaaatctctattatctttttaacatgctgctccctccgtggctccgttcca

SEQ ID NO: 52217 - DNA, 491 bp, Zea Mays
cgcgattattgcatcttatccagacagccccgcactcctctcttcagtctctctccccttcgcggctcccaccgcgtgccgccgccctacaccaggtgccccccacgtctgcatcgggcccgtctccggcgacgaacgcccagcagttggcaagacatgacattggcccttgatcaaaagcgatggaagaaagcttttgagaaaaagcggcagcaaccttaagctcattgttctttccaacttcttgggccagttggatgagcactgtttctggtcatcaattgtggcgcatgaagcttcaaagttctctctatatacacatgatgtattgactgaggttctacttttggttttcttgtttagcgttacaactttctcagtttatgcatttggtccatctcagatcatcagatgacattcagaatgatttgtctattctcaaaatctctattatctttttaacatgctgctccctccgtggctccgttcca

SEQ ID NO: 52218 - DNA, 1220 bp, Zea Mays
gcgagcaagcgaaacagcactatacaagtcgtcttcttctccgtcccttgggccacctggtgttcttctataccacgcgtccacgccactgctaagctgctccccgttcgccaggtcggcgaccaggcgaaacgtgctgctgcaagaagaagaataggtacacagacagcatgtccggagttcaggcgatgccggcggccgtgggcgtggcggggctgagagggtcagggttggttagcagcagcagtaccggcttgttcgccggcgactgcaagaggaaggctcgtcgcccggcgtgctcggcctgggccctcaggcagagccggatcggcagcaggagcaggagcaagaggggcctcggcatcgtctgcaacctcgcgggacagtacgaggattccttcgacgacgtccagcgggccgtgaggaccgtgctgacccagctctacgagctgaacccgccgagctaccgctgcttcgtcgctgtcaacaagcctaccgacggcaagcatttcctccgtgctctcggcaaggagaggcaggagctcgcagagcgagtgatggtcaccaggcttcacctgtacgggaaatggataaagaaatgcgaccatgccaagacgtacgagaagatctccgacgagaacctggcgctgatgcgggagcggctgatggagacggtcatctggccaaccgacgacagcagcacggagaagatcggctgatgcctgatgcctgcggaggcgccgagtcctttcgggttgctgatcaagcttagctccttctattagcatgtagagcagcactctgggtttctctatcagtcagtcagtcagccagccagtcagtgggttgtatataatcggagttgtagtagacagtatacatttctctgggcaggcaatcactgtttgaggtgttaacagtgccgttttgccctcccaattaagcctctacagtcggtctaagtgaagcaaaaatgcttaccttgtagtagctaaatttacatgtgcggggatatacgttgtaatagaatatttctgcgccccgtacgtggctgtttgatgaaagcattctgtacggtagtcaggaaccctcttctacctgaaccagtcgcgagcgttcgatcgggcaaactggccaggatgacgttgctctcagttcttgttgctagttctgcttcttgcgttgatatatagggtcctgccctgcgtcgtcttcgtctc

SEQ ID NO: 52219 - DNA, 1259 bp, Zea Mays
cgaaagccagccacggggacggagcggctagcgagcaagcgaaacagcactatacaagtcgtcttcttctccgtcccttgggccacctggtgttcttctataccacgcgtccacgccactgctaagctgctccccgttcgccaggtcggcgaccaggcgaaacgtgctgctgcaagaagaagaataggtacacagacagcatgtccggagttcaggcgatgccggcggccgtgggcgtggcggggctgagagggtcagggttggttagcagcagcagtaccggcttgttcgccggcgactgcaagaggaaggctcgtcgcccggcgtgctcggcctgggccctcaggcagagccggatcggcagcaggagcaggagcaagaggggcctcggcatcgtctgcaacctcgcgggacagtacgaggattccttcgacgacgtccagcgggccgtgaggaccgtgctgacccagctctacgagctgaacccgccgagctaccgctggttctacaacttcgtcgctgtcaacaagcctaccgacggcaagcatttcctccgtgctctcggcaaggagaggcaggagctcgcagagcgagtgatggtcaccaggcttcacctgtacgggaaatggataaagaaatgcgaccatgccaagacgtacgagaagatctccgacgagaacctggcgctgatgcgggagcggctgatggagacggtcatctggccaaccgacgacagcagcacggagaagatcggctgatgcctgatgcctgcggaggcgccgagtcctttcgggttgctgatcaagcttagctccttctattagcatgtagagcagcactctgggtttctctatcagtcagtcagtcagccagccagtcagtgggttgtatataatcggagttgtagtagacagtatacatttctctgggcaggcaatcactgtttgaggtgttaacagtgccgttttgccctcccaattaagcctctacagtcggtctaagtgaagcaaaaatgcttaccttgtagtagctaaatttacatgtgcggggatatacgttgtaatagaatatttctgcgccccgtacgtggctgtttgatgaaagcattctgtacggtagtcaggaaccctcttctacctgaaccagtcgcgagcgttcgatcgggcaaactggccaggatgacgttgctctcagttcttgttgctagttctgcttcttgcgttgatatatagggtcctgccctgcgtcgtcttcgtctc

SEQ ID NO: 52220 - DNA, 1318 bp, Zea Mays
caaaattcggttggtgagaggaagtgacaggcagggcagcgcgaaagccagccacggggacggagcggctagcgagcaagcgaaacagcactatacaagtcgtcttcttctccgtcccttgggccacctggtgttcttctataccacgcgtccacgccactgctaagctgctccccgttcgccaggtcggcgaccaggcgaaacgtgctgctgcaagaagaagaataggtacacagacagcatgtccggagttcaggcgatgccggcggccgtgggcgtggcggggctgagagggtcagggttggttagcagcagcagtaccggcttgttcgccggcgactgcaagaggaaggctcgtcgcccggcgtgctcggcctgggccctcaggcagagccggatcggcagcaggagcaggagcaagaggggcctcggcatcgtctgcaacctcgcgggacagtacgaggattccttcgacgacgtccagcggcaactgatgaactacttcacctacaaggccgtgaggaccgtgctgacccagctctacgagctgaacccgccgagctaccgctgcttcgtcgctgtcaacaagcctaccgacggcaagcatttcctccgtgctctcggcaaggagaggcaggagctcgcagagcgagtgatggtcaccaggcttcacctgtacgggaaatggataaagaaatgcgaccatgccaagacgtacgagaagatctccgacgagaacctggcgctgatgcgggagcggctgatggagacggtcatctggccaaccgacgacagcagcacggagaagatcggctgatgcctgatgcctgcggaggcgccgagtcctttcgggttgctgatcaagcttagctccttctattagcatgtagagcagcactctgggtttctctatcagtcagtcagtcagccagccagtcagtgggttgtatataatcggagttgtagtagacagtatacatttctctgggcaggcaatcactgtttgaggtgttaacagtgccgttttgccctcccaattaagcctctacagtcggtctaagtgaagcaaaaatgcttaccttgtagtagctaaatttacatgtgcggggatatacgttgtaatagaatatttctgcgccccgtacgtggctgtttgatgaaagcattctgtacggtagtcaggaaccctcttctacctgaaccagtcgcgagcgttcgatcgggcaaactggccaggatgacgttgctctcagttcttgttgctagttctgcttcttgcgttgatatatagggtcctgccctgcgtcgtcttcgtctc

SEQ ID NO: 52221 - DNA, 1240 bp, Zea Mays
caaaattcggttggtgagaggaagtgacaggcagggcagcgcgaaagccagccacggggacggagcggctagcgagcaagcgaaacagcactatacaagtcggcgaccaggcgaaacgtgctgctgcaagaagaagaataggtacacagacagcatgtccggagttcaggcgatgccggcggccgtgggcgtggcggggctgagagggtcagggttggttagcagcagcagtaccggcttgttcgccggcgactgcaagaggaaggctcgtcgcccggcgtgctcggcctgggccctcaggcagagccggatcggcagcaggagcaggagcaagaggggcctcggcatcgtctgcaacctcgcgggacagtacgaggattccttcgacgacgtccagcggcaactgatgaactacttcacctacaaggccgtgaggaccgtgctgacccagctctacgagctgaacccgccgagctaccgctggttctacaacttcgtcgctgtcaacaagcctaccgacggcaagcatttcctccgtgctctcggcaaggagaggcaggagctcgcagagcgagtgatggtcaccaggcttcacctgtacgggaaatggataaagaaatgcgaccatgccaagacgtacgagaagatctccgacgagaacctggcgctgatgcgggagcggctgatggagacggtcatctggccaaccgacgacagcagcacggagaagatcggctgatgcctgatgcctgcggaggcgccgagtcctttcgggttgctgatcaagcttagctccttctattagcatgtagagcagcactctgggtttctctatcagtcagtcagtcagccagccagtcagtgggttgtatataatcggagttgtagtagacagtatacatttctctgggcaggcaatcactgtttgaggtgttaacagtgccgttttgccctcccaattaagcctctacagtcggtctaagtgaagcaaaaatgcttaccttgtagtagctaaatttacatgtgcggggatatacgttgtaatagaatatttctgcgccccgtacgtggctgtttgatgaaagcattctgtacggtagtcaggaaccctcttctacctgaaccagtcgcgagcgttcgatcgggcaaactggccaggatgacgttgctctcagttcttgttgctagttctgcttcttgcgttgatatatagggtcctgccctgcgtcgtcttcgtctc

SEQ ID NO: 52222 - DNA, 1230 bp, Zea Mays
gcgccgccgcagccccaaaccctcatcccccatcaatctcaggggcgccccagccaccccacccttcactcacctaaccatggcggagcgcggcggcgagcgtggtggagagcgcggcgggttcggccgtggcttcggtcgcggcgggcgcggtgaccgtggtgggcgtcgcggcggccgccgtggcccgcgccaagaggaagagaagtgggttcccgtcaccaagctcggccgccttgtcaaggagaacaagatcaccaagatcgaggagatctacctgcactcgctccccgtcaaggagcaccagatcgtcgagaccctcgtcccggggctcaaggacgaggtcatgaagatcacgcccgtccagaagcagacccgtgccgggcagcgcacccgcttcaaggccttcgtcgttgtcggcgatggcgacggccacgtcggcctgggagtcaagtgcgccaaggaggtggccaccgccatccgcggcgccatcatcctagccaagctctccgtcgtccccgtcaggagggggtactgggggaacaagatcggacagccccacaccgtgccctgcaaggtcaccggcaagtgtggctccgtcactgtgcgcatggtgcccgcgcccaggggttctggcatcgtcgccgcgcgcgtgcccaagaaggtgctgcagttcgctggcattgaggatgtcttcacctcgtcccgtggctccactaagacccttggcaacttcgtcaaggcaaccttcgactgcctgatgaagacctacggcttcctcactcctgaattctggagccagaccaagttctccatggccccgttccagcagtacaccgacctgctggcaaagcccaccaagggccttgtgctcgaggccccaactgagacagtagaggcttaggatggtttgagtggagagctctactcgtcgggtgcttgtctaaatgcggtatctatattatagctaagaactgccggagtcgattttgggttcttagctaaatttacatgtgcggggatatacgttgtaatagaatatttctgcgccccgtacgtggctgtttgatgaaagcattctgtacggtagtcaggaaccctcttctacctgaaccagtcgcgagcgttcgatcgggcaaactggccaggatgacgttgctctcagttcttgttgctagttctgcttcttgcgttgatatatagggtcctgccctgcgtcgtcttcgtctc

SEQ ID NO: 52223 - DNA, 675 bp, Zea Mays
cgcgccctgggccgcacaaaattcggttggtgagaggaagtgacaggcagggcagcgcgaaagccagccacggggacggagcggctagcgagcaagcgaaacagcactatacaagtcgtcttcttctccgtcccttgggccacctggtgttcttctataccacgcgtccacgccactgctaagctgctccccgttcgccaggtcggcgaccaggcgaaacgtgctgctgcaagaagaagaataggtacacagacagcatgtccggagttcaggcgatgccggcggccgtgggcgtggcggggctgagagggtcagggttggttagcagcagcagtaccggcttgttcgccggcgactgcaagaggaaggctcgtcgcccggcgtgctcggcctgggccctcaggcagagccggatcggcagcaggagcaggagcaagaggggcctcggcatcgtctgcaacctcgcgggacagtacgaggattccttcgacgacgtccagcggcaactgatgaactacttcacctacaaggccgtgaggaccgtgctgacccagctctacgagctgaacccgccgagctaccgctggttctacaacttcgtcgctgtcaacaagcctaccgacggcaagcatttcctccgtgctctcggcaagttggctctgctgctcatcacct

SEQ ID NO: 52224 - DNA, 837 bp, Zea Mays
tccatccctccgtataaataactgttctcctccagaactaccactctttgcgccgccgcagccccaaaccctcatcccccatcaatctcaggggcgccccagccaccccacccttcactcacctaaccatggcggagcgcggcggcgagcgtggtggagagcgcggcgggttcggccgtggcttcggtcgcggcgggcgcggtgaccgtggtgggcgtcgcggcggccgccgtggcccgcgccaagaggaagagaagtgggttcccgtcaccaagctcggccgccttgtcaaggagaacaagatcaccaagatcgaggagatctacctgcactcgctccccgtcaaggagcaccagatcgtcgagaccctcgtcccggggctcaaggacgaggtcatgaagatcacgcccgtccagaagcagacccgtgccgggcagcgcacccgcttcaaggccttcgtcgttgtcggcgatggcgacggccacgtcggcctgggagtcaagtgcgccaaggaggtggccaccgccatccgcggcgccatcatcctagccaagctctccgtcgtccccgtcaggagggggtactgggggaacaagatcggacagccccacaccgtgccctgcaaggtcaccggcaagtgtggctccgtcactgtgcgcatggtgcccgcgcccaggggttctggcatcgtcgccgcgcgcgtgcccaagaaggtgctgcagttcgctggcattgaggatgtcttcacctcgtcccgtggctccactaagacccttggcaacttcgtcaagatgtctattcagagccatgtccaagtcatttggtttggtttggttt

SEQ ID NO: 52225 - DNA, 849 bp, Zea Mays
ttcttgcttcctatattcacaaggtaggtcgtcgatcagagggggtgtgtgtggcagcttaattattggacgacgacaggagagatcgatcgagcatttgcaattaatggcggccatgggcatgaagaagggtgtgctgatgctggctctcgggctcgcgatggccgttacctcgtcggccgtcgtctacaaggtcggcgacgcctctgggtggacgatcctcggcaacgtcaactacaccgactggacttccaagcagaacttccgtgtcggagacaccatagagttcacgtaccccccgggcatccacaacgtgctggaggtgaacaaggccgactaccacagctgcaccaactccacgccgatcgccacgcacacctccggcgacgacaagatcgtcatcaagagccccggccaccgcttcttcatctgcggcgtgcccggccactgcgccgcgggacagaagctcagcatccgcgtcctcaagacgcgctcctctgacgccccttcccctgcgcccgccgcgcgctcagcctcggcggcgtcgcccagccccagcggcagcaccagcaccgatccgagcggcgccggcgcctcggcgtcgccgcctgcgtcgtccacggacagcacgcccgacgcgacgaccaccaccgcgcccgcgcccgacgccaatggcgcgggggtcagtgcaggccaccgggccgtcgtcgctgccatggcactggcggcggccgcctccatggcgatgctgtactagatcaccaagcactcctcaccccaagtggcctggatgcatgaaggacaacactgcgaatatctgccaacattgactatagtctactacttcga

SEQ ID NO: 52226 - DNA, 1168 bp, Zea Mays
atatcctctcatccacttggccacccgcgcgccgtctccactctccaccaccacaccacccgctcctcttagctagctgcatgctcgcgccgccctcttccattccattccattccattccagtactcgctcatcttgctccgccttctgcttctgcgcatcctccaaggatcgtgatggccatggccacgcaagcctccgcggccacgcgccacctggtggccgccgccgcttccgcctgggcgccgtcggcgaagccgcggcagctaagctcacagctcgcgctgccgccgtcgtcctcccgcgcgccggccccgctccgcgcgaccgccggggaggcggtgaccgaggaggcgcccaaggggttcgtggccccgcagctggaccccagcacgccgtccccgatcttcggcggcagcacgggcgggctgctccgcaaggcgcaggtgttcgagatgcccaccggcggcgccgccatcatgcgggaggggcccaacctcctgaagctggcgcgcaaggagcagtgcctcgcgctcggcaccaggctgcgctccaagtacaagatcacctaccagttctaccgcgtcttccccaacggcgaggtgcagtacctccaccccaaggacggcgtctacccggagaaggtcaaccccggcagggagggcgtcggccagaacttccgcagcatcggcaagaacgtcaaccccatcgacgtcaagttcaccggcaagagcaccttcgactaatcacacatcacgccgcccgcccgcccggccggtgatccaaatcaaaggacttcttcttcttcttatattaataattaagctagctgctggtggtgcgccatatacatgcatggtttgatctaaatatatgtggacatggatgtgtaatttgttttagtaatttcttggtgaccgtggaggcgcagcgtgggactctatgtacatgtgcatctgctcctcatgtctatgcatatgacaacgttgccataacacctgaatctttcaatagtgcatttatgagtttttggtgtttggatgacaacacaattaaaggtctaataaaagtgttaagtgttggacgagaacttagtgaaactgtgaaagacatacaaagttcaacacatgaggtcaatgtgatattccatatagaagctgagtcagaa

SEQ ID NO: 52227 - DNA, 1163 bp, Zea Mays
cacgcacccacgcacacgcacgccccccagagcgagaaccgagaaggacaatcgcgtcccaccgccgctgcacaagacgaggaagaggttcccggtcccggcgccgccactatgtcgtcgatgatgaacgcgctgtcaaactggctggtgaacccgcgccgcaacccgctcgcgcgcctccacatgcacaccgtctcctcgcgcctcaggaaatacgggctgaggtacgatgacctgtacgacccctacttcgacctggacatcaaggaggcgctcgggaggctgcctagggaggtggtcgacgcccgcatccagcgcctcaagcgcgccatggacctctccatgaagcatcagtacctccccgaggacctccaggcacagcaggtcccattcagaggatatttgagtgacatgttggctctggaactccttagctcaagctgctgattagcactagagatggcaatagagatggcaacggataaataccttatgggtattgtcatcccatactggtatccaagaataaaacttgtgcttgcagttgggtacaaaatcatgttcgtattcgtgtccatgatgcagataacaggtgaaaaaggaaaacgctgagcgtgaagcactgggagcccttccactctaccagagaacgcttccctaaatcgctggctaaacatggttgcaagtcttctctttacggcaaatcagaatgcatgcaataaaatgcagtgggtgttttttttggttccaaccaaagttacattttacttgtccacgcagtggtgcattgaccatgcgctctacctgtttttttttcttccgattaatgggagcaaattattgtaacactataattaacttgtgaatcttcagctgcgggtggctgacgtagtgttctttgatcgtgattttttgtatccattgagctttttttcgaggttgacactggctctacggccttgtattaagaactagctcagttgaatgacgagatgctgcagctagtgcaacattttttttaaagtttgagaacgtatccgcccaggcatgcgagtcctggatcctaactcctagcgggctgagatagcactagcacatgcgcagccgaattacaagagcgtggaacatgcacgaaactttaaataggaaaaaaaagaaagaaa

SEQ ID NO: 52228 - DNA, 1091 bp, Zea Mays
tgccaaatccagcctccgcacgcggagaaaattccgaagcggaagaagttgaaccgacaggtgagagagaaagagataggagagacgaggccacgactccacgggggaggcagggagagaaggtgagaggagaggctgtggatactgagttgaaccttcgaaggaggggtgcttcatactccattctcttctatgctgcatggtgtcctttttcgagcaaatttcgaccgatatttgaaactgtcagcactatgtaccctcaggtacatcactttgctgttgaagaatcttctgcgacaccaagatatggagttcgtggtttcccagccattcttcttgtaaatgagactacaatggttcgatatcggggttcaaaagatcttaactctctcgtcgatttctataaagaaactacaggtctggatccagttgcatacattgatgttgttgtccagcaagagagcacagcaagcttgagctcagttgcaccatgggatcgttctccgcttgagatggccaaagacgagccgccgtatctgttggtcgcagttctcttcatcatcctgaaggccgcagcgcgcttggtacctgctgccatgtctcatctgagggccttcttggccgtccgtgtccagaacctgaacctagggatccgcaggggatcaagccaggtcttggaacgagccttgaacgcccttgacgtgaggaggctgtgcagcaagctggggctgagcaacagggcaacagatctgaggaagggtgcaagcaatgctcgagcctgggcttcctcgtttgcttccgtctcactgggtgaaccttcatcttcgagacaagcttagccatttttttttgttttttttttggagatgtcgcttgttagggtagctagctgctcacatgatgcaaagaccatataaggtttgcttcccatcctgtttgtttctgtgcagtcaggaggagaggggaaatcttacatgcctgtaaattttgacgacatcatgtgctgttgtatattaggaatacctttgcatttcctgtttcggttttagaagtgcggtctcaaatgagctgaagcagaacgaagagtgttt

SEQ ID NO: 52229 - DNA, 1312 bp, Zea Mays
tgccaaatccagcctccgcacgcggagaaaattccgaagcggaagaagttgaaccgacaggtgagagagaaagagataggagagacgaggccacgactccacgggggaggcagggagagaaggtgagagaagatgcgttgcgccgccgccgcgcttgcggtcgccctcatcgctgtcgttgccggcgcaaccgcgccggggtcgccggccgcgggcacgtgcgcgcggaggggtgcgctaccgttcctcgacgccgtcggatcccgctgccccttcgtccggatcgagccgtccccgcctctcgaggtgagaggagaggctgtggatactgagttgaaccttcgaaggaggggtgcttcatactccattctcttctatgctgcatggtgtcctttttcgagcaaatttcgaccgatatttgaaactgtcagcactatgtaccctcaggtacatcactttgctgttgaagaatcttctgcgacaccaagatcattatattgcatcttattgtagtttgttttcaagatatggagttcgtggtttcccagccattcttcttgtaaatgagactacaatggttcgatatcggggttcaaaagatcttaactctctcgtcgatttctataaagaaactacaggtctggatccagttgcatacattgatgttgttgtccagcaagagagcacagcaagcttgagctcagttgcaccatgggatcgttctccgcttgagatggccaaagacgagccgccgtatctgttggtcgcagttctcttcatcatcctgaaggccgcagcgcgcttggtacctgctgccatgtctcatctgagggccttcttggccgtccgtgtccagaacctgaacctagggatccgcaggggatcaagccaggtcttggaacgagccttgaacgcccttgacgtgaggaggctgtgcagcaagctggggctgagcaacagggcaacagatctgaggaagggtgcaagcaatgctcgagcctgggcttcctcgtttgcttccgtctcactgggtgaaccttcatcttcgagacaagcttagccatttttttttgttttttttttggagatgtcgcttgttagggtagctagctgctcacatgatgcaaagaccatataaggtttgcttcccatcctgtttgtttctgtgcagtcaggaggagaggggaaatcttacatgcctgtaaattttgacgacatcatgtgctgttgtatattaggaatacctttgcatttcctgtttcggttttagaagtgcggtctcaaatgagctgaagcagaacgaagagtgttt

SEQ ID NO: 52230 - DNA, 1275 bp, Zea Mays
tgccaaatccagcctccgcacgcggagaaaattccgaagcggaagaagttgaaccgacaggtgagagagaaagagataggagagacgaggccacgactccacgggggaggcagggagagaaggtgagagaagatgcgttgcgccgccgccgcgcttgcggtcgccctcatcgctgtcgttgccggcgcaaccgcgccggggtcgccggccgcgggcacgtgcgcgcggaggggtgcgctaccgttcctcgacgccgtcggatcccgctgccccttcgtccggatcgagccgtccccgcctctcgaggtgagaggagaggctgtggatactgagttgaaccttcgaaggaggggtgcttcatactccattctcttctatgctgcatggtgtcctttttcgagcaaatttcgaccgatatttgaaactgtcagcactatgtaccctcaggtacatcactttgctgttgaagaatcttctgcgacaccaagatatggagttcgtggtttcccagccattcttcttgtaaatgagactacaatggttcgatatcggggttcaaaagatcttaactctctcgtcgatttctataaagaaactacaggtctggatccagttgcatacattgatgttgttgtccagcaagagagcacagcaagcttgagctcagttgcaccatgggatcgttctccgcttgagatggccaaagacgagccgccgtatctgttggtcgcagttctcttcatcatcctgaaggccgcagcgcgcttggtacctgctgccatgtctcatctgagggccttcttggccgtccgtgtccagaacctgaacctagggatccgcaggggatcaagccaggtcttggaacgagccttgaacgcccttgacgtgaggaggctgtgcagcaagctggggctgagcaacagggcaacagatctgaggaagggtgcaagcaatgctcgagcctgggcttcctcgtttgcttccgtctcactgggtgaaccttcatcttcgagacaagcttagccatttttttttgttttttttttggagatgtcgcttgttagggtagctagctgctcacatgatgcaaagaccatataaggtttgcttcccatcctgtttgtttctgtgcagtcaggaggagaggggaaatcttacatgcctgtaaattttgacgacatcatgtgctgttgtatattaggaatacctttgcatttcctgtttcggttttagaagtgcggtctcaaatgagctgaagcagaacgaagagtgttt

SEQ ID NO: 52231 - DNA, 1212 bp, Zea Mays
cttccgactacgaccagtccggcagcagcggcagcagcacacggcgagcattccgtccgcccgtccgtccgcttgccccctcctcagagctagcctccaagctcgcaattatataagcatcgtcccttgcaactttccagaacttttgtccccctccctcctccacacctctcgttctctccccctccgcctgctccctctcaggagcgcgcgcgcgcgcgcccagatctagggtttcgtccgcggcaagatgagcagcccgcatggcggtctcgacgaccagatcgagcggctcatgcagtgcaagccgctcgctgagcctgaggttagagctctttgtgagaaggcaaaggagattctgatggaggaaagcaatgttcagcctgtaaagagtcctgttactatatgcggtgatattcatggacaatttcatgatcttgctgaactcttccgaatcggtggaaagtgtccagatacgaactacttgtttatgggagattatgttgaccgtggttactactctgtcgaaactgtcacacttttggtggctttaaaagttcgatatcctcagaggatcaccattctcagaggaaaccatgaaagccggcagattactcaagtgtatgggttctatgacgaatgcttaaggaagtatggaaatgcaaatgtctggaaaacctttacagatctatttgattacttccccttgactgcattggtcgagtcagaaatattttgcttgcatggtggattatcgccatccattgagaccctcgacaacatccgcaactttgaccgcgtccaagaagttcctcacgaaggtccaatgtgtgatcttctgtggtctgatccagatgatcggtgtggctggggtatttctcctcgtggtgctggttataccttcggacaggatatatcagagcagttcaaccataccaatagtctaaggctaattgctagagctcaccagttggttatggagggattcaattgggctcatgagcaaaaagtcgtgactatatttagtgcacctaattattgctaccgctgtgggaacatggcatcaatcttagaagtggatgattgcagagagcatactttcatccagtttgagccagccccaagaaggggagagccagatgtaactcgtaggacacctgactatttcctgtgacgcaaaagtgatgtggatcatgcagagcgaagctttgt

SEQ ID NO: 52232 - DNA, 1299 bp, Zea Mays
cgtccgcttgccccctcctcagagctagcctccaagctcgcaattatataagcatcgtcccttgcaactttccagaacttttgtccccctccctcctccacacctctcgttctctccccctccgcctgctccctctcaggagcgcgcgcgcgcgcgcccagatctagggtttcgtccgcggcaagatgagcagcccgcatggcggtctcgacgaccagatcgagcggctcatgcagtgcaagccgctcgctgagcctgaggttagagctctttgtgagaaggcaaaggagattctgatggaggaaagcaatgttcagcctgtaaagagtcctgttactatatgcggtgatattcatggacaatttcatgatcttgctgaactcttccgaatcggtggaaagtgtccagatacgaactacttgtttatgggagattatgttgaccgtggttactactctgtcgaaactgtcacacttttggtggctttaaaagttcgatatcctcagaggatcaccattctcagaggaaaccatgaaagccggcagattactcaagtgtatgggttctatgacgaatgcttaaggaagtatggaaatgcaaatgtctggaaaacctttacagatctatttgattacttccccttgactgcattggtcgagtcagaaatattttgcttgcatggtggattatcgccatccattgagaccctcgacaacatccgcaactttgaccgcgtccaagaagttcctcacgaaggtccaatgtgtgatcttctgtggtctgatccagatgatcggtgtggctggggtatttctcctcgtggtgctggttataccttcggacaggatatatcagagcagttcaaccataccaatagtctaaggctaattgctagagctcaccagttggttatggagggattcaattgggctcatgagcaaaaagtcgtgactatatttagtgcacctaattattgctaccgctgtgggaacatggcatcaatcttagaagtggatgattgcagagagcatactttcatccagtttgagccagccccaagaaggggagagccagatgtaactcgtaggacacctgactatttcctgtgacgcaaaagtgatgtggatcatgcagagcgaaggtatgtagaattatgtaccataatgctgatttatgcgtgagcaagactctctacttgcagctttcttctattaaagatgacaaccattttgtttgttcgtcgaagtttccatatcaaatagtctgttgttgtgttcagggatggtttctttgattaac

SEQ ID NO: 52233 - DNA, 1604 bp, Zea Mays
agtgaaattatttgcagattactcaagtgtatgggttctatgacgaatgcttaaggaagtatggaaatgcaaatgtctggaaaacctttacagatctatttgattacttccccttgactgcattggtcgagtcagaaatattttgcttgcatggtggattatcgccatccattgagaccctcgacaacatccgcaactttgaccgcgtccaagaagttcctcacgaaggtccaatgtgtgatcttctgtggtctgatccagatgatcggtgtggctggggtatttctcctcgtggtgctggttataccttcggacaggatatatcagagcagttcaaccataccaatagtctaaggctaattgctagagctcaccagttggttatggagggattcaattgggctcatgagcaaaaagtcgtgactatatttagtgcacctaattattgctaccgctgtgggaacatggcatcaatcttagaagtggatgattgcagagagcatactttcatccagtttgagccagccccaagaaggggagagccagatgtaactcgtaggacacctgactatttcctgtgacgcaaaagtgatgtggatcatgcagagcgaaggtttgatagatagctggaaggactggactgtgttctcaccttttctcaaactggttggtgcttttggctcggtgtggggccgcagtggtgtggggggttgaagcatcaagcagcgatttgtgttatgggaggaaactgttcccgctgtattgttcattttattccccttctctttctcaccgcctgattttcttcccctttgttccctccttgctgtgattcttgtagagttctgcacttgtatggttctatgttgttgggccattagttttttttccctttctgtttttgactacctcgatttgccatatagatttttttaccatttaagcgcagctagtcaacctgtagcattgtttgcaatcggcatctgagttgagcactggttttctttttccacatctcattctgttctgaacacagtgcatagtacggtggtgcaaatgttctatacgtatgcgatctgtaccacaccgcagtttttgttcaaattgccctgtatttgagctctttgctgtcgcgctcgctcgctcattatctgatgttgcctgcgattccttttgatgttgtccatgtgacctggaagttgtgctggaatgttttgacttggacggcatggaattcatggttgcttctctggtgttcatcccgcccgtcgtgatcggttgaccgcccgagcaggatccggcctctccaaggccgtggcttcctggctggtgccgcctcgcccacagatcgtgcagtgccatgccatgtggtctgggggcaggtctgggattcgttgggcgctcgctattccctcgtttcgctgtcgcaaccagctaatgctgtgggttgaagctgagatttcagtggtctagggccaacataaacaattgggcctcctttatacatataatatttttagtatacatttatataatgttataatatattgataaaaaatagtgtgatatcaaaatattatatcaaataaattttacaatacctt

SEQ ID NO: 52234 - DNA, 1728 bp, Zea Mays
ctcctcagagctagcctccaagctcgcaattatataagcatcgtcccttgcaactttccagaacttttgtccccctccctcctccacacctctcgttctctccccctccgcctgctccctctcaggagcgcgcgcgcgcgcgcccagatctagggtttcgtccgcggcaagatgagcagcccgcatggcggtctcgacgaccagatcgagcggctcatgcagtgcaagccgctcgctgagcctgaggttagagctctttgtgagaaggcaaaggagattctgatggaggaaagcaatgttcagcctgtaaagagtcctgttactatatgcggtgatattcatggacaatttcatgatcttgctgaactcttccgaatcggtggaaagtgtccagatacgaactacttgtttatgggagattatgttgaccgtggttactactctgtcgaaactgtcacacttttggtggctttaaaagttcgatatcctcagaggatcaccattctcagaggaaaccatgaaagccggcagattactcaagtgtatgggttctatgacgaatgcttaaggaagtatggaaatgcaaatgtctggaaaacctttacagatctatttgattacttccccttgactgcattggtcgagtcagaaatattttgcttgcatggtggattatcgccatccattgagaccctcgacaacatccgcaactttgaccgcgtccaagaagttcctcacgaaggtccaatgtgtgatcttctgtggtctgatccagatgatcggtgtggctggggtatttctcctcgtggtgctggttataccttcggacaggatatatcagagcagttcaaccataccaatagtctaaggctaattgctagagctcaccagttggttatggagggattcaattgggctcatgagcaaaaagtcgtgactatatttagtgcacctaattattgctaccgctgtgggaacatggcatcaatcttagaagtggatgattgcagagagcatactttcatccagtttgagccagccccaagaaggggagagccagatgtaactcgtaggacacctgactatttcctgtgacgcaaaagtgatgtggatcatgcagagcgaaggtttgatagataggcgcagtttcctggttgcagatatatatatttatatatgtttttgctgggacccctccgtgtgctattcttattatttttgccctggctcgccggccgctctgccgcgtcgtgattcaagtgtatacctacagcctgctacagctggaaggactggactgtgttctcaccttttctcaaactgttgtgctggaatgttttgacttggacggcatggaattcatggttgcttctctggtgttcatcccgcccgtcgtgatcggttgaccgcccgagcaggatccggcctctccaaggccgtggcttcctggctggtgccgcctcgcccacagatcgtgcagtgccatgccatgtggtctgggggcaggtctgggattcgttgggcgctcgctattccctcgtttcgctgtcgcaaccagctaatgctgtgggttgaagctgagatttcagtggtctagggccaacataaacaattgggcctcctttatacatataatatttttagtatacatttatataatgttataatatattgataaaaaatagtgtgatatcaaaatattatatcaaataaattttacaatacctt

SEQ ID NO: 52235 - DNA, 1614 bp, Zea Mays
cttcttccgactacgaccagtccggcagcagcggcagcagcacacggcgagcattccgtccgcccgtccgtccgcttgccccctcctcagagctagcctccaagctcgcaattatataagcatcgtcccttgcaactttccagaacttttgtccccctccctcctccacacctctcgttctctccccctccgcctgctccctctcaggagcgcgcgcgcgcgcgcccagatctagggtttcgtccgcggcaagatgagcagcccgcatggcggtctcgacgaccagatcgagcggctcatgcagtgcaagccgctcgctgagcctgaggttagagctctttgtgagaaggcaaaggagattctgatggaggaaagcaatgttcagcctgtaaagagtcctgttactatatgcggtgatattcatggacaatttcatgatcttgctgaactcttccgaatcggtggaaagtgtccagatacgaactacttgtttatgggagattatgttgaccgtggttactactctgtcgaaactgtcacacttttggtggctttaaaagttcgatatcctcagaggatcaccattctcagaggaaaccatgaaagccggcagattactcaagtgtatgggttctatgacgaatgcttaaggaagtatggaaatgcaaatgtctggaaaacctttacagatctatttgattacttccccttgactgcattggtcgagtcagaaatattttgcttgcatggtggattatcgccatccattgagaccctcgacaacatccgcaactttgaccgcgtccaagaagttcctcacgaaggtccaatgtgtgatcttctgtggtctgatccagatgatcggtgtggctggggtatttctcctcgtggtgctggttataccttcggacaggatatatcagagcagttcaaccataccaatagtctaaggctaattgctagagctcaccagttggttatggagggattcaattgggctcatgagcaaaaagtcgtgactatatttagtgcacctaattattgctaccgctgtgggaacatggcatcaatcttagaagtggatgattgcagagagcatactttcatccagtttgagccagccccaagaaggggagagccagatgtaactcgtaggacacctgactatttcctgtgacgcaaaagtgatgtggatcatgcagagcgaagttgtgctggaatgttttgacttggacggcatggaattcatggttgcttctctggtgttcatcccgcccgtcgtgatcggttgaccgcccgagcaggatccggcctctccaaggccgtggcttcctggctggtgccgcctcgcccacagatcgtgcagtgccatgccatgtggtctgggggcaggtctgggattcgttgggcgctcgctattccctcgtttcgctgtcgcaaccagctaatgctgtgggttgaagctgagatttcagtggtctagggccaacataaacaattgggcctcctttatacatataatatttttagtatacatttatataatgttataatatattgataaaaaatagtgtgatatcaaaatattatatcaaataaattttacaatacctt

SEQ ID NO: 52236 - DNA, 1967 bp, Zea Mays
gtgtcccgcctctcgcggtcccgccccgttttctccaaggcagccgctagaaataccaccacgcggacgcgttcgcacgagccgcatcgcatccatactccactgcatctgccatcttggggaactctttggcctctggaaccggcctgcccagccgctcgatcgacgttcggcgaggaggctgatccggtctgttggatcggaggcgcggcgatgggggcgctgtcgcggccggaggaggtgctggcgctggtaaagctgcgggtggcggcggggcagatcaagcgccagatcccgcccgaggagcactgggccttcgcctactccatgctccagaaggtgtcccgtagcttcgctctcgtcatccagcagctcggacccgaactccgcaatgccgtgtgcatcttctacctcgtgctccgtgccctcgacaccgttgaggacgacactagcatcccgaccgaggtgaaggtgcccatcctccaggaattctaccggcacatctacaaccgcgactggcattattcgtgtggaacaaatcactacaaaatgctaatggataagtttcgccacgtatccactgccttcctggagcttggtgaaggttaccaaaaggcaatagaagaagtcactaggcgaatgggtgcaggaatggcaaaatttatatgcaaagaggttgaaactgttgatgactatgacgagtattgtcactatgtagctgggctagttggttatggactttccaggctcttctatgctgctgggacggaagatctggctctagattcactgtcaaattcaatgggcctatttttacagaaaactaacataattagggactatttggaggacataaatgagataccaaagtcccgcatgttctggcctcgagagatatggagtaaatatgcagataaacttgaggacttcaaatatgaggagaactccaaaaaagcagtacaatgcttgaacaatatggtgactgatgcactgattcatgctgaagagtgccttcagtacatgtcagccttgaaggatcctgccattttccgtttttgtgcaataccccagataatggcaattggaacatgtgctctttgctacaataacgtgcatgtcttcagaggagttgtgaagatgagacgtggtctcacggcacgaataattgacgagacaaactcaatgacagatgtctatactgctttctatgagttttcttcattgatagagtcaaagattgatgacagtgatccaaatgctgctctaacacagagacgtgtggattcaataaagcaaacttgcaagtcatctggtttggtaaagcaaagggggtaccatttggagaagtcaccttacaggcctatgctgatcatgattgtcctcctgctggtagctattcttttcggggtaatgttctagctggccctttcttttccgcgatggagacttgagagaaactatgccaatcagatcctttttgtactgtgtattctccaaaggctgcagcaaattcggaagtactgactgtagatcgatacggctgcatgctactgtttccatgactccgttgatgctctcaattcgtttgttcattttattttctcgcgctttgtattgtttgaagctgttttaaggcagaaaatactatcgtgacatgtatgatgtatcctacgaacatgtgtctcagtttagttagcaatggctgcactgtagttattctatgtgttgtcttgttttcatatctgatatgtttgtgtttatcataactgtgtactctcccatggcgctaattatattcaatattatatgtatgtttagctaaattttaaaacatctaatgataatagttatgtactaagtgcttgtttggtttctttagtacagagactaaagtttacttcctacttcctatcctgtttggttgcagtgattaaaaatatttagaatgcattaagggcctatttggt

SEQ ID NO: 52237 - DNA, 1942 bp, Zea Mays
gtgtcccgcctctcgcggtcccgccccgttttctccaaggcagccgctagaaataccaccacgcggacgcgttcgcacgagccgcatcgcatccatactccactgcatctgccatcttggggaactctttggcctctggaaccggcctgcccagccgctcgatcgacgttcggcgaggaggctgatccggtctgttggatcggaggcgcggcgatgggggcgctgtcgcggccggaggaggtgctggcgctggtaaagctgcgggtggcggcggggcagatcaagcgccagatcccgcccgaggagcactgggccttcgcctactccatgctccagaaggtgtcccgtagcttcgctctcgtcatccagcagctcggacccgaactccgcaatgccgtgtgcatcttctacctcgtgctccgtgccctcgacaccgttgaggacgacactagcatcccgaccgaggtgaaggtgcccatcctccaggaattctaccggcacatctacaaccgcgactggcattattcgtgtggaacaaatcactacaaaatgctaatggataagtttcgccacgtatccactgccttcctggagcttggtgaaggttaccaaaaggcaatagaagaagtcactaggcgaatgggtgcaggaatggcaaaatttatatgcaaagaggttgaaactgttgatgactatgacgagtattgtcactatgtagctgggctagttggttatggactttccaggctcttctatgctgctgggacggaagatctggctctagattcactgtcaaattcaatgggcctatttttacagaaaactaacataattagggactatttggaggacataaatgagataccaaagtcccgcatgttctggcctcgagagatatggagtaaatatgcagataaacttgaggacttcaaatatgaggagaactccaaaaaagcagtacaatgcttgaacaatatggtgactgatgcactgattcatgctgaagagtgccttcagtacatgtcagccttgaaggatcctgccattttccgtttttgtgcaataccccagataatggcaattggaacatgtgctctttgctacaataacgtgcatgtcttcagaggagttgtgaagatgagacgtggtctcacggcacgaataattgacgagacaaactcaatgacagatgtctatactgctttctatgagttttcttcattgatagagtcaaagattgatgacagtgatccaaatgctgctctaacacagagacgtgtggattcaataaagcaaacttgcaagtcatctggtttggtaaagcaaaggctgcagcaaattcggaagtactgactgtagatcgatacggctgcatgctactgtttccatgactccgttgatgctctcaattcgtttgttcattttattttctcgcgctttgtattgtttgaagctgttttaaggcagaaaatactatcgtgacatgtatgatgtatcctacgaacatgtgtctcagtttagttagcaatggctgcacctctgttcttaaggcgtcgcctaggcgtccgggcgatgggcgatggtctaacgcctaagcgctttgcccgcctacctcacctaggcgttcagaaggtgctccaacgtcttggaccgccttaccgctttaaaaactatgggctgcactgtagttattctatgtgttgtcttgttttcatatctgatatgtttgtgtttatcataactgtgtactctcccatggcgctaattatattcaatattatatgtatgtttagctaaattttaaaacatctaatgataatagttatgtactaagtgcttgtttggtttctttagtacagagactaaagtttacttcctacttcctatcctgtttggttgcagtgattaaaaatatttagaatgcattaagggcctatttggt

SEQ ID NO: 52238 - DNA, 2565 bp, Zea Mays
gtgaggaatccgtccgccccgggatttcgcctccagtggtagcgggagtgccgcgtcgtctttcgctcccaagtgcgacgggaaataaggcacctgtgttcctacttgcaagatctaaagaaggcttctgctgaagagatgcgcagaagtgtttatgcaaattatgctgcattcatcaaaacatcaaaggagatatcagaccttgaaggggagctactatcagttagaaatttgctaagtacacagtcagctttaattcatggtctgtctgaaggggttcagatagattcgttggccacagggcctgaaggttctgctgaacaagacatatccagtgttgaagatcaggagccatcagaaatatggaaatggtccacagatttccctgacatgcttgatgttctgctagccgaaagaagagtggatgaagcactggatgccttggatgaggcagaacggatcgctgctgatgccaaacaaaagggaactctatccacgactgacattctggctttaaagagggttatatctgaaaaccgtcagaagttggctgatcagctagctgaagctgcttgccagtcttctatttgtggtgttgagcttcgagctgcagcttctgctctcaagagacttggtgatggacctcgtgctcatagtttgttgctcagtgcacacaatcagagacttcagttaaacattcaaacaatacaaccatctagcacatcatatggcggggaatacactgcttctcttgcgcaacaattttttcctgttatagctcaggctctcagtgactcagttgaggtcttcagtgaaaaatcagcttacacatctgaactagttacttgggctactaagcaggcaatgtcattttcgcttcttgtaaagaggcatactttagcctcttgtgctgctggtggggggttaagaactgctgcagaatgtgttaagatagcgattggttattcagacttgctggaagctcgtggtctatcactttcgtcagttctgatgaagcaactcagaccctctgttgagcaagcattagattccaatttgaggagaattgaagagagtactgctgctttagctgcagctgatgactggatactcacctatcctccaactggtatacgtccactggctagatcatctggtaatctggcactccagccgaagctctcaagcagtgctcaccgtttcaattcaatggttcaggatttctttgaggatgttggaccactggttagcttacagctaggtggttccgcgatggatgggcttctgaaaatattcaactcgtatgtaaacttgctgataagtgctctaccagggtcagtggatgatgaagttaacttggaaggtttggggaataagattgttagaatggcagagacagaggaccagcagttagctttgttagctaatgcatctttactagctgaagagttgctaccgagagcagcgatgaagctgtactctatgaacccggtcagcaaagatagcttgcgtagaagaggtcctgaaaaccaaaatcgtgcggcagagcagcgggcatggaaaaggaagctgaaccgcatggtagagaaacttagagatagtttctgcagacagcatgctctagatcttatattcacagaagaaggtgacacccgtctgagcgcagagatgtacatcgatatggataatactgttgaagatcccgaatgggttccatctgcgattttccaggaattgtatgcgaaattgaataagatggcaagcgttgcggcagacatgtttgttggtagggaaaggtttgccacgctgcttatgatgagacttacggaggcagtcatgctttggctctcagacgaccagagcttttgggaagaggttgaagaaggaccaagggctctgggtccggttggacttcagcagttctacctcgatatgcaatttgtgatccttttcgggcaaggtcgtttcttatctcggcatgtgcatcaagtcatattggacatcattgatagagcgatgagagcgttttctgccacggggatggaccctgataggatccttccaagcgacgactggttcatcgacgttgcccaggagagtattagtaggatcggcggcgggagggcacgagtcgccaatggggacagggaggtgaacagccccacagcctccgtgtcagcgcagtccgtgtcgtcagttagatctctcggcagctcctagcgtgcacagtttctgtatcaatattactgtagggatttgtttggatgtgtttgtgctggtacatatgtgtgagtaattaattgtatgcctaggccaagaaaatccttgaagctggtcttgttcacctgttctgagactttgggccggtccacgcatcggcattccctacggtagtggtaggtattgatggaccaaatgtaccggctggtacagccacgggcacaacacgaatcggctatgctattgctagctacgacacggttatagttccgtgacaggtattgtctgctcttataaagctctagtttttttttttgtttgcacgtgatctcttttggaagaaaa

SEQ ID NO: 52239 - DNA, 1622 bp, Zea Mays
atcctccattttgaaaagctgcagagcaagaaatgaaatttagactcttgtcagcaccatcatgtcccatcttacaaacccatgtaccagcgtccagctatctagtggcagagtagtcaatggtggttgtttatgaacttctggagggaaatataatcaggtaggttgccagttattgcaaattgtttaaataagttaccatatgtgtcatgaaatgcaaatcaaaagcagtcaactgagcttacccttaatttatgctttaaaaattccgatagaatggaacctgcaatatcagaggatataacatatccaggaccatttgcatagatgggataatcctcttctggccattcctgtaaagcgcggaatataagcatagatgcaaaaacgcatgcgttaaaaaaaggggcacttggtaagataatgaagtagaaaaggataaataaaaggcatctctcatagactagcaaagtgaagtaaggtagagccatagaggtagatgataactctctgctaagtgctgcattgcaggcacaagtatggtacaaaagtgacttattacgaggccaaaagttgcagtcatatttgagggtaagatatctttgtacatactgattcaacaacaacaaaagccaacagtagtagtgtaatgcctacatcaataaccaatctgttatgtcaaatttgctggtgaaaatattgattgtacagactaagtttctttttcgttacattgaattgaatgcagacacggtcaagttatgaaaacattacatcattcaagtagaatatagtgggtatattaacaatggagtgagtatgagcagaagctacatacagtaacaaaatcaacctttcagtaattattgatgaacatgcatatagcaagccaatttcagcaatagtcttatgtgtttgcaacacaaaataaactcataattttaacaatggaaaaaggtattgattaaagataaaaaactataaactgagagaagtttagaagattcaaggctacagcagcttccataatgcatatgaaacataagccaacatacatggttgttcaagccaaaagtacagacaaattagaagccaaatagcacaaagacatttacaggaaacagcttgacagaaccgcttttgttccatgggaaccatagttagttagacaattcaacttatggagctaaattcattgttatccatgtagcgttgacgcattgactcattcagttatgtcatctgtgatatatttccagaaatgaaccttattatattcctttgaaaaggagaaagattcagtaaatttgacaccaaggtaccatgattaattttaacctgatttcaaggtttcatgaacaatttagacactactaggggtacaagtttgattgctattgctggtgttatttaatactcagacagatcaaataccctgtatctaacagttcactaaggctgtatctagcatctatcctatctcattccctagttcaaactttactttgcaaacaatgtaatatatagtacaaatctcctattttacacgatctgctgcaaaaagcctaagcaacatagtgtgcacgacatgttcattttcaatcaatgaaaggaaaaagggc

SEQ ID NO: 52240 - DNA, 506 bp, Zea Mays
aaaaaacataaagccgaagtcgcgagatagtgatacatccaccaactgatcaaatcataaattatgaccatgttaagagaagttacacagcaaaattcttgtccaccaagatcgctcatgtgtaccagctgggttgtctgacagcaaccacagccaatggtgccaaaaagtaacagttatttaactaagctttctaaccgttccatttacaaatcaagtccccaagcaggtctcatactgctcaaagaactcggtctatacgttgagaaaagaagagggaaaggcgttacaggctgctgtctgttccccttgtttccatttccagctcaaacaccacctggtcagctataccaaaagaattccgttaaatgtccatttgttagtcatctcaagggcttaatttatttccagccaatattcttgaagttaatcttggggctattaggttctcaactccttcgtgaattaggatgggcactaccaccacagaaaagcttaccagtacc

SEQ ID NO: 52241 - DNA, 282 bp, Zea Mays
ccaaaaagaagaagaagaagaaaagctaaagttttcatcatgattaaaactgtcttaaatagcagtgcttagaagaagataggccacctccccctagttacacccaacatcccagtctctgttcctcttcgtccatgcaacgcatcttctgtttgcttgcggccgctcccaacatgtcgccggcctcttcggaatcggacgcttccatgcacgcctccgcatgcgcgctgccgacgtcacgctcggcccggcgaccgtcctgatttgccggttcccctgttg

SEQ ID NO: 52242 - DNA, 1279 bp, Zea Mays
ttaaggaccttcatgcaaaaccccaaccatttccccttctgcactccacggagcagtgaaaccgacctttctcccctcccccgcgttccacttcgcggagatctagcccttgggtttcgccagcggcgaggcctaagtcatcggcggcgagccaaactccacgagcggaggaagaggaggggaagctgagacgaggaggcagctatggggcagcagtcgctgatctatgcgttcgtggcccgtggcacggtcgtactggccgagtacacggagttcaccggcaacttcacaaccatcgcctcccagtgcctcatgaagctccccgcaagcaacaacaagttcacctacaactgcgacggccacaccttcaactacctcgtggaagacggattcacatactgtgttgttgctgttgaatcagtggggcaacaaattcccattgctttcatggatagggttaaggaggatttcacaaaaaggtatggtggcgggaaagctgctaccgctgcggctaacagcctcaaccgagagttcagattaaaacttaaagagcacatgcagtattgtgtggatcaccctgaagaggttagcaagctggccaaagtgaaggcacaggtttctgaagtcaagggtgttatgatggaaaacattgaaaaggtccttgatcgtggagagaagatcgagctgcttgttgacaagactgagaatctgcgctcacagacagcaaggaacaaatgtgaggagaaagatgtggttgcagaacatgaaaatcaagctcatcgtcctgggaataatcatcgcacttattctgatcattatcctctctgtctgccatggtttcaaatgccattaagcacagccagaacactgggtcttgctatttggctttaaaaaaaaatcggtgcaccgccgcggcagcagtcaggtacgagaatgcgccagaagtggtaaatggtctctcgtcaggtgccgggcatcgaagaatcacgtagagggtgtttggttttactgaactcgtatcaaatatttggatatcaattacgcctattatatatatgtttaattagatttaataaactcgaatcgtcttttagtgtttgtaattagttttataattaaactacttaatgttcataattactatttaaacatttgatgtaaattgaacttagttgtgtggaaccaaacacactctaaagttagctcctctggaccgtcaaatgccctatacattattgtgtgctgtaaaagtcatggaaccagagcaattagaaccgag

SEQ ID NO: 52243 - DNA, 1445 bp, Zea Mays
cttggattaagacaagtgaggttagatatttttttagaggttttaagagagagataaacaaccatgaagcctgatcaagactgtagtgatggagtccattagtccaacaaccaaggccatgctatattgatcttgctgttaatggaattgttttaaggaccttcatgcaaaaccccaaccatttccccttctgcactccacggagcagtgaaaccgacctttctcccctcccccgcgttccacttcgcggagatctagcccttgggtttcgccagcggcgaggcctaagtcatcggcggcgagccaaactccacgagcggaggaagaggaggggaagctgagacgaggaggcagctatggggcagcagtcgctgatctatgcgttcgtggcccgtggcacggtcgtactggccgagtacacggagttcaccggcaacttcacaaccatcgcctcccagtgcctcatgaagctccccgcaagcaacaacaagttcacctacaactgcgacggccacaccttcaactacctcgtggaagacggattcacatactgtgttgttgctgttgaatcagtggggcaacaaattcccattgctttcatggatagggttaaggaggatttcacaaaaaggtatggtggcgggaaagctgctaccgctgcggctaacagcctcaaccgagagttcagattaaaacttaaagagcacatgcagtattgtgtggatcaccctgaagaggttagcaagctggccaaagtgaaggcacaggtttctgaagtcaagggtgttatgatggaaaacattgaaaaggtccttgatcgtggagagaagatcgagctgcttgttgacaagactgagaatctgcgctcacaggcacaagatttcagacagcaaggaacaaatgtgaggagaaagatgtggttgcagaacatgaaaatcaagctcatcgtcctgggaataatcatcgcacttattctgatcattatcctctctgtctgccatggtttcaaatgccattaagcacagccagaacactgggtcttgctatttggctttaaaaaaaaatcggtgcaccgccgcggcagcagtcaggtacgagaatgcgccagaagtggtaaatggtctctcgtcaggtgccgggcatcgaagaatcacgtagagggtgtttggttttactgaactcgtatcaaatatttggatatcaattacgcctattatatatatgtttaattagatttaataaactcgaatcgtcttttagtgtttgtaattagttttataattaaactacttaatgttcataattactatttaaacatttgatgtaaattgaacttagttgtgtggaaccaaacacactctaaagttagctcctctggaccgtcaaatgccctatacattattgtgtgctgtaaaagtcatggaaccagagcaattagaaccgag

SEQ ID NO: 52244 - DNA, 1230 bp, Zea Mays
cccaaccctggccaagaactcgcagccctgcctccatcccgtggtgggcgcggatggcggcggtgagcgccggcgcaagggcggcctcggcggcggcgaagaaggtcggcgcggcggaggcgtcgtccgggaggagggagaagtcctcgtacccgccggggcagcggagcggcgccgcgtggactggcacggacgccggtgcgagggccgcgaagtgtgccgtggtgacgatggcggccgtggtggtggcggcgacctcgtgctctgtaccggcggctgcggaggaggccgctttggccgcgagcggggcgaagtggctgcgctcgaggaatggcacgaagacgaggtggagaggcgagcggggcgaggtggctgcgctttgtggtttctgtagttctatatgcattaggtggcactagggtccagattcagaatatgagtactgacaagaagtcttgataaaggagatggacccaaaaaaatttcctggtttagattcattggtgtcctagactcgaggttcgcaacccagagagcagagcaatggactgaagcaaccaattgccaaattctttgaacaagatgcactagcacattagactgcaaggacgaaaaatgctacctgtcccactgtgctatctttaagcactaagaggttgaagtctatgcattattgcccctttctggattctgatgatgtttaagataagtgtcagcttctgatcacttgactactttattggtactcatacctgttaaaaagcttactgcaaaatgttgtcgtgatctttgtgcctactttgcatatcacataaattagcggataagtcacataggattacaaacatagctctttatatagtgatgaatttctgaggagactaagtggtcctaaacctaagtactcctcagaaaaggagtactcgtggcatgcctgttactccttgcccgcattatgtgaatgctagcatgtgataaaaatacaagtcatgtaaagttcaagagctgatcacatttaatactcgtgggcatgcctgttactccgaagctttaacatactcagcgatccttctcaattttcctcaaatttgaggattagcctctaccttcccgtccctcaaagcacaaagccatgtagaatcgagaggaatctcggagatcaggagaagaaaaatagggacagtggaagaatacatatctcaactccagtccttgcaatatgattttacc

SEQ ID NO: 52245 - DNA, 848 bp, Zea Mays
ttttttgccagtcactaactgcttggaatcttcaggaatcaaattacatagcctgcagcttctatccgaacaacaggtatgctctaccaattcttcttcatgttcttcaacaaattatacaattactgttttttcctttcaaatatgatcttcaatgaaaaaagtacaaatcatcactcacaccatgtatatgtccacttatgctaatacgtaaacaattccatgtgcacttcgtacacatatatgtacatagacacacacacaccgtgtttagtatcaaaaaaattcttcacctaaatttacatatgttcctccatcatgaatatttaggtacacataccatttatttttcagttaatcacaacctcctcaacctatacaacacaaccctgaattcttccttaatggtttgccagtcacttcgggagtcaaattatataggctgcaccttctatccgaaaacagctatatttgtaccaattcttcttcctattctccgacaaattatacaatttctattttcccccttttccaacatgatcatgaatcacactgttttccctcatatctatggtagtcaaataaacatgtcttctgcctgaaacacagaagcacctgatagctgcctacaattccttggacctggagcttgtctggagaacgcatgcaggtagtttgccagaaatacacaagcacctgctagctacctcaaaccggagcctcgccgccgcactcccgttcgtcctcgccgccgtggccgtggaaggtggggcgtggccgtggagccggtgagtgggaaggggaacaggggcagtgcgttataggtgtatattgggtacgtgacgtcc

SEQ ID NO: 52246 - DNA, 2088 bp, Zea Mays
gagccagtaagccacacacagacagtcagacacaggcacacagcgagggagtcctctcctcccccagaaaaggaaaagacgcattccgcacacgcgcggctgggtgtcgaggccgggagacgcggtgaagctagctgctagcgtagccgcgcgcggcgggcgggctcgagctgcgctgtcgctccatgtcggccaccgccgagagcggtggggatctgtcggcggcgcgccgccggtgggatctcaccaacaagggggccgagagcaccccaattttgaaagatgctgtggaaatatctacagatgaagaatcagatggtgttgttacatgccatccgaatggtaacactgatggatgcgaagaaactattagtggcagtcacgatgatgatagcccagaaggccaggaaactagttccattaaggaacctgatgtagaaggtgacacacaggaagacaaacgtgtaaatcaagattcactcaagttgattgatgaagagtctgctcctcccaagtccccagcaaaatccgcgactgcaagttctagatcggagaggcctaaacgtgttgttccccgaccattttctctttctaatcaaagaagtttgtttggagtaaatggtggtgtggccaatccattggccaataaggataaatctggtgataaaagtagcatctctccagcaagcatgacaaagaagagtacgcagatggcacttaggaagactttgcagcctgagaaggtatttcatcctctggaagaggactcttgttctgtgacatcctcatatcctttttctgtgtgctattgttgagcatctcgtcatcctcttttttatgctgtttcataggctcatagctatgcacctaatattgtaactttggtatataaccttctgatgtttcacacctacttacataagaacagaatgatagatttgaatattcatgtttcttagatgaccttaaaatcacatactggttttacttaattaagaaccaaattttttgttatttcacagtaaataatgatgaacactcctactcatacacttattttctgtgaacatgaaagcattgtctaaacagtccttttctgtatccactgaacttacaatattttgttatgctcaatattttttcaagatgatgccctttttcatagttatgtttaaattcagaaacacatgaattttacaagcattctgagttgcatgtggcccttttcctgagctatgtaaagaactacaacatcaacaagagctggcagaactaagatgactgttcccgtcgctccttcatttgtgtgtgctaaccgtgctgacaagaggaaggagttctacacaaaattagaggagaaacataaagctttggaagcagagaaggacgaggctgaggccaggaaaaaggatgagcaagacgttgctttaaaacaactaaggaagtcattggtgattagagcgaaacccatgccaagcttctatcaagaagggcccccaccaaaggctgaactgaagaaggtgcctcctacccgtgccaaatcgccaaagtttacaagttcaaggagaaggagctgcagtgatacaccattgacacctggcggggaaaataccaacgcaacatctacccggccacatcgtcacagcatcgggagtcctagagacgctaacagagtacaacaatgctcgccaaagagcggtgtggcaaccaaaacaagatctgtcaaggctgagctgaaggccctctgaagagcatggagcagccgagtgatgtgtttctctgtacaaaccgaattgtctaaccgtttccatttccatgcatttttgcttctattttatacccaacatctccagcaaaagaaggctgtagggccaatgacgttgttcagcgccgctggaccttatccattttcttacattcgccttgtactcgtaagaactcttggtggcaccatgtgacattccatgtaaattacttgaggatccttgtagggagttcgtccggtgttttgctcctgttaagcccttggccttaactaatctgtgagctgaaaagactatcggaatggcactgttccgtttgatgcat

SEQ ID NO: 52247 - DNA, 1494 bp, Zea Mays
gagccagtaagccacacacagacagtcagacacaggcacacagcgagggagtcctctcctcccccagaaaaggaaaagacgcattccgcacacgcgcggctgggtgtcgaggccgggagacgcggtgaagctagctgctagcgtagccgcgcgcggcgggcgggctcgagctgcgctgtcgctccatgtcggccaccgccgagagcggtggggatctgtcggcggcgcgccgccggtgggatctcaccaacaagggggccgagagcaccccaattttgaaagatgctgtggaaatatctacagatgaagaatcagatggtgttgttacatgccatccgaatggtaacactgatggatgcgaagaaactattagtggcagtcacgatgatgatagcccagaaggccaggaaactagttccattaaggaacctgatgtagaaggtgacacacaggaagacaaacgtgtaaatcaagattcactcaagttgattgatgaagagtctgctcctcccaagtccccagcaaaatccgcgactgcaagttctagatcggagaggcctaaacgtgttgttccccgaccattttctctttctaatcaaagaagtttgtttggagtaaatggtggtgtggccaatccattggccaataaggataaatctggtgataaaagtagcatctctccagcaagcatgacaaagaagagtacgcagatggcacttaggaagactttgcagcctgagaagttctacacaaaattagaggagaaacataaagctttggaagcagagaaggacgaggctgaggccaggaaaaaggatgagcaagacgttgctttaaaacaactaaggaagtcattggtgattagagcgaaacccatgccaagcttctatcaagaagggcccccaccaaaggctgaactgaagaaggtgcctcctacccgtgccaaatcgccaaagtttacaagttcaaggagaaggagctgcagtgatacaccattgacacctggcggggaaaataccaacgcaacatctacccggccacatcgtcacagcatcgggagtcctagagacgctaacagagtacaacaatgctcgccaaagagcggtgtggcaaccaaaacaagatctgtcaaggctgagctgaaggccctctgaagagcatggagcagccgagtgatgtgtttctctgtacaaaccgaattgtctaaccgtttccatttccatgcatttttgcttctattttatacccaacatctccagcaaaagaaggctgtagggccaatgacgttgttcagcgccgctggaccttatccattttcttacattcgccttgtactcgtaagaactcttggtggcaccatgtgacattccatgtaaattacttgaggatccttgtagggagttcgtccggtgttttgctcctgttaagcccttggccttaactaatctgtgagctgaaaagactatcggaatggcactgttccgtttgatgcat

SEQ ID NO: 52248 - DNA, 2145 bp, Zea Mays
gagccagtaagccacacacagacagtcagacacaggcacacagcgagggagtcctctcctcccccagaaaaggaaaagacgcattccgcacacgcgcggctgggtgtcgaggccgggagacgcggtgaagctagctgctagcgtagccgcgcgcggcgggcgggctcgagctgcgctgtcgctccatgtcggccaccgccgagagcggtggggatctgtcggcggcgcgccgccggtgggatctcaccaacaagggggccgagagcaccccaattttgaaagatgctgtggaaatatctacagatgaagaatcagatggtgttgttacatgccatccgaatggtaacactgatggatgcgaagaaactattagtggcagtcacgatgatgatagcccagaaggccaggaaactagttccattaaggaacctgatgtagaaggtgacacacaggaagacaaacgtgtaaatcaagattcactcaagttgattgatgaagagtctgctcctcccaagtccccagcaaaatccgcgactgcaagttctagatcggagaggcctaaacgtgttgttccccgaccattttctctttctaatcaaagaagtttgtttggagtaaatggtggtgtggccaatccattggccaataaggataaatctggtgataaaagtagcatctctccagcaagcatgacaaagaagagtacgcagatggcacttaggaagactttgcagcctgagaaggtatttcatcctctggaagaggactcttgttctgtgacatcctcatatcctttttctgtgtgctattgttgagcatctcgtcatcctcttttttatgctgtttcataggctcatagctatgcacctaatattgtaactttggtatataaccttctgatgtttcacacctacttacataagaacagaatgatagatttgaatattcatgtttcttagatgaccttaaaatcacatactggttttacttaattaagaaccaaattttttgttatttcacagtaaataatgatgaacactcctactcatacacttattttctgtgaacatgaaagcattgtctaaacagtccttttctgtatccactgaacttacaatattttgttatgctcaatattttttcaagatgatgccctttttcatagttatgtttaaattcagaaacacatgaattttacaagcattctgagttgcatgtggcccttttcctgagctatgtaaagaactacaacatcaacaagagctggcagaactaagatgactgttcccgtcgctccttcatttgtgtgtgctaaccgtgctgacaagaggaaggagttctacacaaaattagaggagaaacataaagctttggaagcagagaaggacgaggctgaggccaggaaaaaggtaggaagaacttacttctgaattctgatatctctcttggaaagcaacccactgtaggatgagcaagacgttgctttaaaacaactaaggaagtcattggtgattagagcgaaacccatgccaagcttctatcaagaagggcccccaccaaaggctgaactgaagaaggtgcctcctacccgtgccaaatcgccaaagtttacaagttcaaggagaaggagctgcagtgatacaccattgacacctggcggggaaaataccaacgcaacatctacccggccacatcgtcacagcatcgggagtcctagagacgctaacagagtacaacaatgctcgccaaagagcggtgtggcaaccaaaacaagatctgtcaaggctgagctgaaggccctctgaagagcatggagcagccgagtgatgtgtttctctgtacaaaccgaattgtctaaccgtttccatttccatgcatttttgcttctattttatacccaacatctccagcaaaagaaggctgtagggccaatgacgttgttcagcgccgctggaccttatccattttcttacattcgccttgtactcgtaagaactcttggtggcaccatgtgacattccatgtaaattacttgaggatccttgtagggagttcgtccggtgttttgctcctgttaagcccttggccttaactaatctgtgagctgaaaagactatcggaatggcactgttccgtttgatgcat

SEQ ID NO: 52249 - DNA, 2079 bp, Zea Mays
gagccagtaagccacacacagacagtcagacacaggcacacagcgagggagtcctctcctcccccagaaaaggaaaagacgcattccgcacacgcgcggctgggtgtcgaggccgggagacgcggtgaagctagctgctagcgtagccgcgcgcggcgggcgggctcgagctgcgctgtcgctccatgtcggccaccgccgagagcggtggggatctgtcggcggcgcgccgccggtgggatctcaccaacaagggggccgagagcaccccaattttgaaagatgctgtggaaatatctacagatgaagaatcagatggtgttgttacatgccatccgaatggtaacactgatggatgcgaagaaactattagtggcagtcacgatgatgatagcccagaaggccaggaaactagttccattaaggaacctgatgtagaaggtgacacacaggaagacaaacgtgtaaatcaagattcactcaagttgattgatgaagagtctgctcctcccaagtccccagcaaaatccgcgactgcaagttctagatcggagaggcctaaacgtgttgttccccgaccattttctctttctaatcaaagaagtttgtttggagtaaatggtggtgtggccaatccattggccaataaggataaatctggtgataaaagtagcatctctccagcaagcatgacaaagaagatggcacttaggaagactttgcagcctgagaaggtatttcatcctctggaagaggactcttgttctgtgacatcctcatatcctttttctgtgtgctattgttgagcatctcgtcatcctcttttttatgctgtttcataggctcatagctatgcacctaatattgtaactttggtatataaccttctgatgtttcacacctacttacataagaacagaatgatagatttgaatattcatgtttcttagatgaccttaaaatcacatactggttttacttaattaagaaccaaattttttgttatttcacagtaaataatgatgaacactcctactcatacacttattttctgtgaacatgaaagcattgtctaaacagtccttttctgtatccactgaacttacaatattttgttatgctcaatattttttcaagatgatgccctttttcatagttatgtttaaattcagaaacacatgaattttacaagcattctgagttgcatgtggcccttttcctgagctatgtaaagaactacaacatcaacaagagctggcagaactaagatgactgttcccgtcgctccttcatttgtgtgtgctaaccgtgctgacaagaggaaggagttctacacaaaattagaggagaaacataaagctttggaagcagagaaggacgaggctgaggccaggaaaaaggatgagcaagacgttgctttaaaacaactaaggaagtcattggtgattagagcgaaacccatgccaagcttctatcaagaagggcccccaccaaaggctgaactgaagaaggtgcctcctacccgtgccaaatcgccaaagtttacaagttcaaggagaaggagctgcagtgatacaccattgacacctggcggggaaaataccaacgcaacatctacccggccacatcgtcacagcatcgggagtcctagagacgctaacagagtacaacaatgctcgccaaagagcggtgtggcaaccaaaacaagatctgtcaaggctgagctgaaggccctctgaagagcatggagcagccgagtgatgtgtttctctgtacaaaccgaattgtctaaccgtttccatttccatgcatttttgcttctattttatacccaacatctccagcaaaagaaggctgtagggccaatgacgttgttcagcgccgctggaccttatccattttcttacattcgccttgtactcgtaagaactcttggtggcaccatgtgacattccatgtaaattacttgaggatccttgtagggagttcgtccggtgttttgctcctgttaagcccttggccttaactaatctgtgagctgaaaagactatcggaatggcactgttccgtttgatgcat

SEQ ID NO: 52250 - DNA, 1588 bp, Zea Mays
gagccagtaagccacacacagacagtcagacacaggcacacagcgagggagtcctctcctcccccagaaaaggaaaagacgcattccgcacacgcgcggctgggtgtcgaggccgggagacgcggtgaagctagctgctagcgtagccgcgcgcggcgggcgggctcgagctgcgctgtcgctccatgtcggccaccgccgagagcggtggggatctgtcggcggcgcgccgccggtgggatctcaccaacaagggggccgagagcaccccaattttgaaagatgctgtggaaatatctacagatgaagaatcagatggtgttgttacatgccatccgaatggtaacactgatggatgcgaagaaactattagtggcagtcacgatgatgatagcccagaaggccaggaaactagttccattaaggaacctgatgtagaaggtgacacacaggaagacaaacgtgtaaatcaagattcactcaagttgattgatgaagagtctgctcctcccaagtccccagcaaaatccgcgactgcaagttctagatcggagaggcctaaacgtgttgttccccgaccattttctctttctaatcaaagaagtttgtttggagtaaatggtggtgtggccaatccattggccaataaggataaatctggtgataaaagtagcatctctccagcaagcatgacaaagaagagtacgcagatggcacttaggaagactttgcagcctgagaagaactacaacatcaacaagagctggcagaactaagatgactgttcccgtcgctccttcatttgtgtgtgctaaccgtgctgacaagaggaaggagttctacacaaaattagaggagaaacataaagctttggaagcagagaaggacgaggctgaggccaggaaaaaggatgagcaagacgttgctttaaaacaactaaggaagtcattggtgattagagcgaaacccatgccaagcttctatcaagaagggcccccaccaaaggctgaactgaagaaggtgcctcctacccgtgccaaatcgccaaagtttacaagttcaaggagaaggagctgcagtgatacaccattgacacctggcggggaaaataccaacgcaacatctacccggccacatcgtcacagcatcgggagtcctagagacgctaacagagtacaacaatgctcgccaaagagcggtgtggcaaccaaaacaagatctgtcaaggctgagctgaaggccctctgaagagcatggagcagccgagtgatgtgtttctctgtacaaaccgaattgtctaaccgtttccatttccatgcatttttgcttctattttatacccaacatctccagcaaaagaaggctgtagggccaatgacgttgttcagcgccgctggaccttatccattttcttacattcgccttgtactcgtaagaactcttggtggcaccatgtgacattccatgtaaattacttgaggatccttgtagggagttcgtccggtgttttgctcctgttaagcccttggccttaactaatctgtgagctgaaaagactatcggaatggcactgttccgtttgatgcat

SEQ ID NO: 52251 - DNA, 1287 bp, Zea Mays
gtggaaatatgtatacgcgaccagaggttgcatagggtatttttaacttcaatgatatgtagtatattacaatggccaaaagcaccccttggcaggtgctcaaattgggcaagcttttagaaagcctttctattcgaataatcatcatcaataagataatattttcttgagtagttcaaaataaagaaaattgctaaatacataggaaactctcaacagtacatgcacgaaatttgtacataaatcaagctgagaacaaatgaaatatacttcatgttcaggagtagtggaaactatttatttcaatgcccgagcaaagcatcattcaataatcaatatacatgggcatgtgttgaacctggccatctagcaacaaaaaatgaccctcttctcaacactattgaaggcactgatcatacaattatacttatgcttgtgagaacgatgattatggtgtcttggatgaatcattgtgttctggatttttttggttttgtattttgttactaactgcttcagctgcctcctgcgattctcaatttgcataactaattgaggagcattaggtctttaaaagaatgtaagacaagaattgaaaggcctatttttggtgttgatttcaaaccaatccattattttttaccatagtaccataattgcttttagataaagttgactcttctctcgcttattgtttgcttactcgagtgtgtattgcttgaaataacttgggttcgaaatactttctggagggattctgagcctggagattttagaagctgagctgaaaaccatccttcgacagcttaccaccaggaaaaggacaggtcagagcgcatgtctagcgaagatggcgtttagtcagaaaagagaaaacttggcgctttagtgaacatcgaaaatgtcacttgtgatactaatatcattgcccgacaaacagattatgcgcttttgtttgcaagcagtacttgcttacgtgtttcttagattcgtaatgaactatgtgtgtatgctacttttggatccgttcaaattataaatgaattatgtttgtatgctgcttttgcatatgttgtctcaaaaaatggcagcagtggtgttctatcagccatgaacaccaagcgcttagtgtagcttagacataagtcttgatggttggattatgatccgcctaccatttatgtaacctaattgtatacaatggtttactgtatgtctcattatattctatatactattcaatatgtcttatgtgtgtgtgactattgtcgtataattaggtgttac

SEQ ID NO: 52252 - DNA, 2365 bp, Zea Mays
tattacttctagttaaaagacgcgagtgattcgtaccctccccgcgctccacggagtctccacaaacgcgcacgcgacgcgtggcccacgtctcggacccgaaatcacaattcagcgaaccaggaccgtgcgtgagctcacgtccgtgccttcctctctacctctctgacccaccaccaaccactcacagagatctcgggaggagaggacacggagcccttcgacgaggcggagctcctggcgctcccaccgtccctcgcgagcctcaccgcctcacttcaagaaatcctactcccaaccaccgctagtacctccagctctcatgtcggctccccacctccgcctacaccgccgctggcgtaggcgacatcgagcgacgaaaccttaacgtccagcccgttctttccccatgacccctccccacacccaccgacgctgccagaagtggatgcgcccgtgtcgccaccgctgcagccgagcgacaccctcgacgacgacaaggacgacgagttcgacccactgttctcggagaccaccggcggcgcgaggtcttcggctggcggctcgcgtggcgcgtgcaggggctcggcgcgaggcggctcggcttcctgctcgggcgtcgagcgcgcgcgggcggggcctggcgcgtagggcgcctggagcgtcgggtcgtcgggcggtcggcgtcgagcgcgcacggcagggcgggtcggggcttcactcgggcgcggtcctagcgcggcttgggcgagcggctcgacgggcaggggcgcagtccttggcggcttcgcgcggtgaagagagcagagagaggaaggtgggggagagggaggagcagaggagagagggaaaagagggagcaggcggcggctgggaggatggcaggggcggcggccacagggaaaatggcggctagggttaggatgttgggcctaatgggccttaggttagttagttttttttatttattttttttcttttcaaatttcgaaatacatattaaataaccctaaaattcttaatgtttaaaccaaaactatttataaaatatttatttttgggactaataattatatttataatttactaggatttccatttaacaagaaatgctgttcagtgaccaaaatcaatcatgcgcattccaaaaatgattccaaatgaaataaataacaaacacttaaaagaaaattaattaccataaatatcattaataactaaatgtattatttttgtttgatgactttcatagtgtcacaattccatagcgccttggtttagcaaacatgtgtgcaagatagggaccacaggtttgataaaatagctttggtttgttaaacaactgttgtttctcctccactgcatttcatacgcattggttgatagattagttatgataatcacccagtcaacaaaaagcttaacaatgtagcatcggtcaacactgtcacttcaagtccagctcaatcggtcaacacttatacgcgtgactctatagttataaactcatgcctattaagcattgagcaatttacctatacttgtttcctattctttggtcgtgataatgtttgcaaccatgaatagtacagattgcttttccaggtgtgtggagagacatgtgtattcctcctatgacgaataattcaggctccatgaagatgagttccaggcatcaagaggtcaagattccaggaggcctaaaataggtgtgtggacagacatgtgtattcctcctatgacgaataattcaggctccatgaagatgagttccaggcatcaagaggtcaagattcctggaggcctaaaatagaaacagtcaatggggtgaccatgagactctacaggctgctgctgacaagctgaaaaccatccttcgacagcttaccaccaggaaaaggacaggtcagagcgcatgtctagcgaagatggcgtttagtcagaaaagagaaaacttggcgctttagtgaacatcgaaaatgtcacttgtgatactaatatcattgcccgacaaacagattatgcgcttttgtttgcaagcagtacttgcttacgtgtttcttagattcgtaatgaactatgtgtgtatgctacttttggatccgttcaaattataaatgaattatgtttgtatgctgcttttgcatatgttgtctcaaaaaatggcagcagtggtgttctatcagccatgaacaccaagcgcttagtgtagcttagacataagtcttgatggttggattatgatccgcctaccatttatgtaacctaattgtatacaatggtttactgtatgtctcattatattctatatactattcaatatgtcttatgtgtgtgtgactattgtcgtataattaggtgttac

SEQ ID NO: 52253 - DNA, 2493 bp, Zea Mays
gtattacttctagttaaaagacgcgagtgattcgtaccctccccgcgctccacggagtctccacaaacgcgcacgcgacgcgtggcccacgtctcggacccgaaatcacaattcagcgaaccaggaccgtgcgtgagctcacgtccgtgccttcctctctacctctctgacccaccaccaaccactcacagagatctcgggaggagaggacacggagcccttcgacgaggcggagctcctggcgctcccaccgtccctcgcgagcctcaccgcctcacttcaagaaatcctactcccaaccaccgctagtacctccagctctcatgtcggctccccacctccgcctacaccgccgctggcgtaggcgacatcgagcgacgaaaccttaacgtccagcccgttctttccccatgacccctccccacacccaccgacgctgccagaagtggatgcgcccgtgtcgccaccgctgcagccgagcgacaccctcgacgacgacaaggacgacgagttcgacccactgttctcggagaccaccggcggcgcgaggtcttcggctggcggctcgcgtggcgcgtgcaggggctcggcgcgaggcggctcggcttcctgctcgggcgtcgagcgcgcgcgggcggggcctggcgcgtagggcgcctggagcgtcgggtcgtcgggcggtcggcgtcgagcgcgcacggcagggcgggtcggggcttcactcgggcgcggtcctagcgcggcttgggcgagcggctcgacgggcaggggcgcagtccttggcggcttcgcgcggtgaagagagcagagagaggaaggtgggggagagggaggagcagaggagagagggaaaagagggagcaggcggcggctgggaggatggcaggggcggcggccacagggaaaatggcggctagggttaggatgttgggcctaatgggccttaggttagttagttttttttatttattttttttcttttcaaatttcgaaatacatattaaataaccctaaaattcttaatgtttaaaccaaaactatttataaaatatttatttttgggactaataattatatttataatttactaggatttccatttaacaagaaatgctgttcagtgaccaaaatcaatcatgcgcattccaaaaatgattccaaatgaaataaataacaaacacttaaaagaaaattaattaccataaatatcattaataactaaatgtattatttttgtttgatgactttcatagtgtcacaattccatagcgccttggtttagcaaacatgtgtgcaagatagggaccacaggtttgataaaatagctttggtttgttaaacaactgttgtttctcctccactgcatttcatacgcattggttgatagattagttatgataatcacccagtcaacaaaaagcttaacaatgtagcatcggtcaacactgtcacttcaagtccagctcaatcggtcaacacttatacgcgtgactctatagttataaactcatgcctattaagcattgagcaatttacctatacttgtttcctattctttggtcgtgataatgtttgcaaccatgaatagtacagattgcttttccaggtgtgtggagagacatgtgtattcctcctatgacgaataattcaggctccatgaagatgagttccaggcatcaagaggtcaagattcctggaggcctaaaatagcaaaattacaggtacttctattttgtttcttcaacggtagtgctttgtatctatgtatgtgcaatgtgtggattgtgcatcaggcttctcatgaatatggctcattattcagtggggaaagccattaaagaatctccatcttcattggcagtcatgacatattgtttcatttgcttttggtttatcagtggtctcactgggttccactcttaacttattgtgacaaacaagaaacagtcaatggggtgaccatgagactctacaggctgctgctgacaagctgaaaaccatccttcgacagcttaccaccaggaaaaggacaggtcagagcgcatgtctagcgaagatggcgtttagtcagaaaagagaaaacttggcgctttagtgaacatcgaaaatgtcacttgtgatactaatatcattgcccgacaaacagattatgcgcttttgtttgcaagcagtacttgcttacgtgtttcttagattcgtaatgaactatgtgtgtatgctacttttggatccgttcaaattataaatgaattatgtttgtatgctgcttttgcatatgttgtctcaaaaaatggcagcagtggtgttctatcagccatgaacaccaagcgcttagtgtagcttagacataagtcttgatggttggattatgatccgcctaccatttatgtaacctaattgtatacaatggtttactgtatgtctcattatattctatatactattcaatatgtcttatgtgtgtgtgactattgtcgtataattaggtgttac

SEQ ID NO: 52254 - DNA, 1547 bp, Zea Mays
acagagatctcgggaggagaggacacggagcccttcgacgaggcggagctcctggcgctcccaccgtccctcgcgagcctcaccgcctcacttcaagaaatcctactcccaaccaccgctagtacctccagctctcatgtcggctccccacctccgcctacaccgccgctggcgtaggcgacatcgagcgacgaaaccttaacgtccagcccgttctttccccatgacccctccccacacccaccgacgctgccagaagtggatgcgcccgtgtcgccaccgctgcagccgagcgacaccctcgacgacgacaaggacgacgagttcgacccactgttctcggagaccaccggcggcgcgaggtcttcggctggcggctcgcgtggcgcgtgcaggggctcggcgcgaggcggctcggcttcctgctcgggcgtcgagcgcgcgcgggcggggcctggcgcgtagggcgcctggagcgtcgggtcgtcgggcggtcggcgtcgagcgcgcacggcagggcgggtcggggcttcactcgggcgcggtcctagcgcggcttgggcgagcggctcgacgggcaggggcgcagtccttggcggcttcgcgcggtgaagagagcagagagaggaaggtgggggagagggaggagcagaggagagagggaaaagagggagcaggcggcggctgggaggatggcaggggcggcggccacagggaaaatggcggctagggttaggatgttgggcctaatgggccttaggttagttagttttttttatttattttttttcttttcaaatttcgaaatacatattaaataaccctaaaattcttaatgtttaaaccaaaactatttataaaatatttatttttgggactaataattatatttataatttactaggatttccatttaacaagaaatgctgttcagtgaccaaaatcaatcatgcgcattccaaaaatgattccaaatgaaataaataacaaacacttaaaagaaaattaattaccataaatatcattaataactaaatgtattatttttgtttgatgactttcatagtgtcacaattccatagcgccttggtttagcaaacatgtgtgcaagatagggaccacaggtttgataaaatagctttggtttgttaaacaactgttgtttctcctccactgcatttcatacgcattggttgatagattagttatgataatcacccagtcaacaaaaagcttaacaatgtagcatcggtcaacactgtcacttcaagtccagctcaatcggtcaacacttatacgcgtgactctatagttataaactcatgcctattaagcattgagcaatttacctatacttgtttcctattctttggtcgtgataatgtttgcaaccatgaatagtacagattgcttttccaggtgtgtggagagacatgtgtattcctcctatgacgaataattcaggctccatgaagatgagttccaggcatcaagaggtcaagattcctggaggcctaaaatagttccctcgagtaaaagaggttatg

SEQ ID NO: 52255 - DNA, 995 bp, Zea Mays
tacctctctgacccaccaccaaccactcacagagatctcgggaggagaggacacggagcccttcgacgaggcggagctcctggcgctcccaccgtccctcgcgagcctcaccgcctcacttcaagaaatcctactcccaaccaccgctagtacctccagctctcatgtcggctccccacctccgcctacaccgccgctggcgtaggcgacatcgagcgacgaaaccttaacgtccagcccgttctttccccatgacccctccccacacccaccgacgctgccagaagtggatgcgcccgtgtcgccaccgctgcagccgagcgacaccctcgacgacgacaaggacgacgagttcgacccactgttctcggagaccaccggcggcgcgaggtcttcggctggcggctcgcgtggcgcgtgcaggggctcggcgcgaggcggctcggcttcctgctcgggcgtcgagcgcgcgcgggcggggcctggcgcgtagggcgcctggagcgtcgggtcgtcgggcggtcggcgtcgagcgcgcacggcagggcgggtcggggcttcactcgggcgcggtcctagcgcggcttgggcgagcggctcgacgggcaggggcgcagtccttggcggcttcgcgcggtgaagagagcagagagaggaaggtgggggagagggaggagcagaggagagagggaaaagagggagcaggcggcggctgggaggatggcaggggcggcggccacagggaaaatggcggctagggttaggatgttgggcctaatgggccttaggtgtgtggagagacatgtgtattcctcctatgacgaataattcaggctccatgaagatgagttccaggcatcaagaggtcaagattccaggaggcctaaaataggtgtgtggacagacatgtgtattcctcctatgacgaataattcaggctccatgaagatgagttccaggcatcaagaggtcaagattcctggaggcctaaaata

SEQ ID NO: 52256 - DNA, 1298 bp, Zea Mays
aagaaaaataaatatgtagttgctacagggagattcttttggtcgattcatctgaagtgtcattaggaaatccccaaagctcgctcgactgctctgatccggcgcgccatccgccaatcgaagcccgtcagccacctcctcgtcctcctatggcatcagagagacaagaacattgaatcaatcgacgggcatgaaccatgtgaggaactaaaaagcatgggaacatgatgagagagacgaatgcatgcacccatgggtgcgaaagcaccgggaagaggacgacgaggagagcacgagggcaggaggggtcgtcgtggcatcggtgtcggtgtagtccgagagagcgaccgatggcgtgggcaggtgcgaagcatggtcgaagaggaggttgtttcagtcgctggttgcagctgaggcaactatgtagaagcaccgtgaggtccgcgccggagatggagagcttggccaccgacgacgtggtggcgctgtcgccgagggccatcagatttgaggagatggtggactcatctgctgccggagatgtaggcgaagagctatggttcgatgaagagggcgatgcggcgttgagggcgacgacagatgagtgcgaggcccaccacgactgtgacccccgatgatgacagcggtgttccaacggcgtgggggacgacgaagaggctcgcggccacgcgctcgacgcaaccacacgcccacatcgggcgtagatctggaatcttgggcggggtacggggctcgaggggagggggctcgacggcgatctcgtcttggagaggacggctgcaaacggtctcgtcagggggttctcggcggcgatctcggtcgtgggccaggatcgagaatcatgtggggggagcgggggcacgacgggggcgagcggtttaggcgtggacccatcttctagggcgacactgaccttagcgatgaaggaggcacaaatggcggcgtggggaggaggttggaagatgggcgacggagatggcgttcgtctcgattgtgtgagagggagggcacgggaccgggcggtggtggcaggcgggggcacgagggagtgcagatctccgggcttggaccacgctggtgacgttgctgggatggagcgggcgtggctcgcccgcgagattggcggggtggtggagggcggagccgcgtcagggcggacgccctccttacggtcttaaggaatagtaaagattggtgcctacaggttttatcgttttcattttatggaccaaccaacccaaggaatgtccacattttatgtatgtttacttactaag

SEQ ID NO: 52257 - DNA, 1664 bp, Zea Mays
ggtggtgcttacggtgtcgcacagttcaggaaaagagcattcatctgggctgctgcaccaggagagacccttcctctggactctggagttggcctgaaccagtgcatgtctccgcaagccctcagctgaaaataaacctccttgagaccctgacggcaaaccactacgcagctgttaagagcactggcgcagggggcacctttgcggtcaataagagtgaggatctcccaccagtggaaaaatggcgccagcaagccaacaatacagtccttcctatggtgcatgccaccgtgtcatggttccagaagatcagaggcgtcaccgtgttcttgagtgagcacatatccatggagatgaacgacctggctgaatatcatcagggtgcaagcacattccaaaacgactggcaaaagccactggaggagacggtaaccacagcctgttcctttgtccaccggtcgagtggtggacctgctgcccaacaccgccaaaaggaacaatcaatggaaggggctccatgggaggctggactgggagggcagcttcccccacgtccgtgtccgatccccagcctgtgggcaagctcggcatgtgcttccaccctgagcagattctgtacctctaacggcaacggcaagctttaaacaggtaacgccaacagattctgggatggtgcatacaatacaagcttagaaacataatcaattcatatttcttcaaacagattcaaatcgtaccagtcacatatgttttactctaaaaactacactcaataccagaaccaaactaaaatctcccctaaaaaccgagcacgaaaatcactataggtacaatgcggtctagaagagagggtgcagtaagaacatcacagcaccaacgatgatgaacgccttgcaaaatccgataatggatcagagccaccaagaatcccctgcctcaagaagagagcagaacacgatcaacaaccccatggccgcccaccgtttaccatcagctagggagcgcgtagccgtatgcggtgtccgtgaacgaggcgccggcgacatcgaacgcgtcgctctcgtcgaggtacaggttgaccctgaaggcggcgtgcgcgccgatgacggccgagccaggcgacgaagagcgccaggaacgcgagcatggacgcggggcggtagacgaggccgaggaagacgagcgcgagcgcggccagcgcgtagttggcgcggaagtaggcgaggttgcggcgcgcccgcgcgcgggcctccccgcagctgtccgggcacgagaacgccgtcgggtccagcacctcacgccacgcgcgcggccggcccgccgcggccccggcgaacgctcgcgcgcgggagaagaaggcgaccccggcctccgccgccgttgccgccgccgaggaggaggagggcgccgcatcgccgcccgcggccgcgacgtcctccggcttgagctgcggcgcagggggggaggtggggagggcgccgtagcgcgaccacgacgcggtggaggaggacatggcgggccgctggcgaaccccagccgccgggcgctggatcgggcctcgggctgtgggattggtgcggtggcttgcgcagctgtgccgggttggccgcttgttggcctggcctggcctcttcgatcgcggggatctgaacggaggaggagag

SEQ ID NO: 52258 - DNA, 1398 bp, Zea Mays
cgatccccctacttcactcgccgacgagcaaacggcctccgttccgagccgtcggcggcagctggagagcgaggccgagcgaccagttacagttgccggcgggcaaagtgggccacttggtgccaggacatggccgggcaaccgccaccgcagggccccgaagacgatttcttcgaccagttcttctccatgacggccggcggctcctaccccggcgcaaccgcgggcggcggccgcgcaccgggtgaccagccgttttcccttgcgctcagcctcgacgccgcggccgctgaggcttccggaagcgggaagcacgccgacggtggcaaggcggaccgggaggctatacagctccctgggctcttcccgccggcgttcggcggcggtgtgcagccaccccacctccgcgccaccccgcctacacaggtgttccacgcgcagcagccgaagcaaggcggtgcggcagtcgggccacaaccgccggcaccgaggccaaaggtgcgggcgcggcgtgggcaggcgaccgacccccacagcatcgcggagaggctaagaagagagagaatagcagaaaggatgagggccctacaggaattggtgcccaatacaaacaagacagatagagcagctatgctagatgagatcctagattatgtgaagtttctgaggcttcaagtcaaggttctaagcatgagcaggctgggtggtgctggtgctgtggcacagctggttgctgatatcccactttcagttaagggggaagcaagtgatagtgggagcaaacagcagatttgggagaagtggtcaacggacggcacagaaagacaggtcgcaaagctgatggaagaagacattggggcagcgatgcaattcctccagtccaaagcactctgcatgatgcccatctcgctcgccatggcaatctatgacacgcaacattcgcaggacggacaaccagtaaaaccagaacccaacactccttcctagtatagtggcagcaagcgtaacttgcatcctttcggggctgttagcaggcgttaacctaccaatcaaagcgtaagatagaaatgccggcttcgattcactaacaaggaggaggcagggaaaaaagacctaaaagatcctctccacttgaagttgtaccaaatggtatatgatatcgcctttccctttccgatcttttgttcaaaggtgctttaattgcaaggatatggctacggctatcagcagagtaatttcaaaatcaaatcaaaaggcaaagcagttgttccaatttctgatgatgacagtgattttccaacttcactagaggagaagaagggaaaaataacctgtttgcaccactcgcgccaaaagtatacttgcatatcaagggaacgacgaggttgggaagcaaag

SEQ ID NO: 52259 - DNA, 1334 bp, Zea Mays
cgatccccctacttcactcgccgacgagcaaacggcctccgttccgagccgtcggcggcagctggagagcgaggccgagcgaccagttacagttgccggcgggcaaagtgggccacttggtgccaggacatggccgggcaaccgccaccgcagggccccgaagacgatttcttcgaccagttcttctccatgacggccggcggctcctaccccggcgcaaccgcgggcggcggccgcgcaccgggtgaccagccgttttcccttgcgctcagcctcgacgccgcggccgctgaggcttccggaagcgggaagcacgccgacggtggcaaggcggaccgggaggctatacagctccctgggctcttcccgccggcgttcggcggcggtgtgcagccaccccacctccgcgccaccccgcctacacaggtgttccacgcgcagcagccgaagcaaggcggtgcggcagtcgggccacaaccgccggcaccgaggccaaaggtgcgggcgcggcgtgggcaggcgaccgacccccacagcatcgcggagaggctaagaagagagagaatagcagaaaggatgagggccctacaggaattggtgcccaatacaaacaagacagatagagcagctatgctagatgagatcctagattatgtgaagtttctgaggcttcaagtcaaggttctaagcatgagcaggctgggtggtgctggtgctgtggcacagctggttgctgatatcccactttcagttaagggggaagcaagtgatagtgggagcaaacagcagatttgggagaagtggtcaacggacggcacagaaagacaggtcgcaaagctgatggaagaagacattggggcagcgatgcaattcctccagtccaaagcactctgcatgatgcccatctcgctcgccatggcaatctatgacacgcaacattcgcaggacggacaaccagtaaaaccagaacccaacactccttcctagtatagtggcagcaagcgtaacttgcatcctttcggggctgttagcaggcgttaacctaccaatcaaagcgtaagatagaaatgccggcttcgattcactaacaaggaggaggcagggaaaaaagacctaaaagatcctctccacttgaagttgtaccaaatggctacggctatcagcagagtaatttcaaaatcaaatcaaaaggcaaagcagttgttccaatttctgatgatgacagtgattttccaacttcactagaggagaagaagggaaaaataacctgtttgcaccactcgcgccaaaagtatacttgcatatcaagggaacgacgaggttgggaagcaaag

SEQ ID NO: 52260 - DNA, 1285 bp, Zea Mays
gtgatttgtgactactaactattgccctctggtaacttcacttttactgccacgagattatcagcataatttgcttgtgctccacaactgtgataaacctggggaagcaagtgatagtgggagcaaacagcagatttgggagaagtggtcaacggacggcacagaaagacaggtcgcaaagctgatggaagaagacattggggcagcgatgcaattcctccagtccaaagcactctgcatgatgcccatctcgctcgccatggcaatctatgacacgcaacattcgcaggacggacaaccagtaaaaccagaacccaacactccttcctagtatagtggcagcaagcgtaacttgcatcctttcggggctgttagcaggcgttaacctaccaatcaaagcgtaagatagaaatgccggcttcgattcactaacaaggaggaggcagggaaaaaagacctaaaagatcctctccacttgaagttgtaccaaatggtatatgatatcgcctttccctttccgatcttttgttcaaaggtgctttaattgcaaggatatggtaagcaataacctgctcatgctcctccatctttcaatgccccctatgagtgtgagtgatggagagagggagctgctaaaagagtctggcatgctctcataatgtttctttccgggtctgtagtgcactagctagccatacactttgtggtgggggggctgctgcttttctggtagtgggtgtatatggactaatcaaaagggactgatgtatgagtgtgtctgcggcctgcgcaaatggttgacaaagtttagatacaggatgaaatggaagatgatgttgatagcgatgttcttccttctccatttttccaaagtggaggtccgaggcaggctttggtcaatggaggctgagcatgcgtttcagcgttggtggatctgctatctgcgttgaatactttatttatactaggtggatgcccgtgcgttgcaacggaaacatatcgtcagtataggaaacacaactcctaccaatctggtatcaaaggtctcgatgatcataagctctgccgctgcctccaggcagcagccgccgccagcatcaatgtgctctgctctgtgttgtgtgctatctctctgtcttaattgtttttatacttgatgctctgctctgtgttgtgtgctatctctctgtcttaattgtttttatacttgtacttcaatacttatctgtggtataagctatctttgaagtgcatggtataagaaaaactacaaaatagatacaaa

SEQ ID NO: 52261 - DNA, 1864 bp, Zea Mays
cgatccccctacttcactcgccgacgagcaaacggcctccgttccgagccgtcggcggcagctggagagcgaggccgagcgaccagttacagttgccggcgggcaaagtgggccacttggtgccaggacatggccgggcaaccgccaccgcagggccccgaagacgatttcttcgaccagttcttctccatgacggccggcggctcctaccccggcgcaaccgcgggcggcggccgcgcaccgggtgaccagccgttttcccttgcgctcagcctcgacgccgcggccgctgaggcttccggaagcgggaagcacgccgacggtggcaaggcggaccgggaggctatacagctccctgggctcttcccgccggcgttcggcggcggtgtgcagccaccccacctccgcgccaccccgcctacacaggtgttccacgcgcagcagccgaagcaaggcggtgcggcagtcgggccacaaccgccggcaccgaggccaaaggtgcgggcgcggcgtgggcaggcgaccgacccccacagcatcgcggagaggctaagaagagagagaatagcagaaaggatgagggccctacaggaattggtgcccaatacaaacaagacagatagagcagctatgctagatgagatcctagattatgtgaagtttctgaggcttcaagtcaaggttctaagcatgagcaggctgggtggtgctggtgctgtggcacagctggttgctgatatcccactttcagttaagggggaagcaagtgatagtgggagcaaacagcagatttgggagaagtggtcaacggacggcacagaaagacaggtcgcaaagctgatggaagaagacattggggcagcgatgcaattcctccagtccaaagcactctgcatgatgcccatctcgctcgccatggcaatctatgacacgcaacattcgcaggacggacaaccagcgttaacctaccaatcaaagcgtaagatagaaatgccggcttcgattcactaacaaggaggaggcagggaaaaaagacctaaaagatcctctccacttgaagttgtaccaaatggtatatgatatcgcctttccctttccgatcttttgttcaaaggtgctttaattgcaaggatatggtaagcaataacctgctcatgctcctccatctttcaatgccccctatgagtgtgagtgatggagagagggagctgctaaaagagtctggcatgctctcataatgtttctttccgggtctgtagtgcactagctagccatacactttgtggtgggggggctgctgcttttctggtagtgggtgtatatggactaatcaaaagggactgatgtatgagtgtgtctgcggcctgcgcaaatggttgacaaagtttagatacaggatgaaatggaagatgatgttgatagcgatgttcttccttctccatttttccaaagtggaggtccgaggcaggctttggtcaatggaggctgagcatgcgtttcagcgttggtggatctgctatctgcgttgaatactttatttatactaggtggatgcccgtgcgttgcaacggaaacatatcgtcagtataggaaacacaactcctaccaatctggtatcaaaggtctcgatgatcataagctctgccgctgcctccaggcagcagccgccgccagcatcaatgtgctctgctctgtgttgtgtgctatctctctgtcttaattgtttttatacttgatgctctgctctgtgttgtgtgctatctctctgtcttaattgtttttatacttgtacttcaatacttatctgtggtataagctatctttgaagtgcatggtataagaaaaactacaaaatagatacaaa

SEQ ID NO: 52262 - DNA, 572 bp, Zea Mays
gatccccctacttcactcgccgacgagcaaacggcctccgttccgagccgtcggcggcagctggagagcgaggccgagcgaccagttacagttgccggcgggcaaagtgggccacttggtgccaggacatggccgggcaaccgccaccgcagggccccgaagacgatttcttcgaccagttcttctccatgacggccggcggctcctaccccggcgcaaccgcgggcggcggccgcgcaccgggtgaccagccgttttcccttgcgctcagcctcgacgccgcggccgctgaggcttccggaagcgggaagcacgccgacggtggcaaggcggaccgggaggctatacagctccctgggctcttcccgccggcgttcggcggcggtgtgcagccaccccacctccgcgccaccccgcctacacaggtgttccacgcgcagcagccgaagcaaggcggtgcggcagtcgggccacaaccgccggcaccgaggccaaaggtgcgggcgcggcgtgggcaggcgaccgacccccacagcatcgcggagaggcagttttttgaaccatgtttgatc

SEQ ID NO: 52263 - DNA, 2403 bp, Zea Mays
tatatcaggcctcattgcacactgatgtatatggtatttagtcattgaatgcgacttcttgtttttgccctctcatgaaatctggtttccagaaaaaaaaaacagtaatctgttactatattttttgaattttgattggaaatatctaatatccatgtccgttattcatgttttttatgcttccgaaagaagcatttaatgggacatatcatggaagatcattgtgttagcctaccatctacaggtttccaatagtggagccagaccacagacacactaaacttcgtctctcagagcaaggtctagaagcaattcgaaggatcgaaactcctattgctgttgttggtgtcattggtccctatcgatctggaaaatcatttctcctcaaccagcttctctccttatcttgtgataaaggttttggagttggtcatatgcgagatactaaaactaaaggtatttggatttggggtactcctgttgagatggatgttgatggttccaaagtttctgtcctttatctagacactgaagggtttgaaagtgttgggaaatcaaatgtgtatgatgataggatatttgctttggcgactgtcttaagctcggtccttatctacaaccttcctgagacggtacgtgaagctgatatatctaggctttcatttgccgttgaaattgctgaagagttctatggaagtcttcaggggcaagatgttgcttttgagccagcaaagcttctctggcttatccagagggatttcctccaaggaaaatctgttcaacaaatggtcaatgaagccctccaacgggtgcctaatgataatggtgacagatatattaatgaggtcaatcaaatacgagattctttggcagttatgggcaaccacagcactgcttttagcttgccccagccacatcttcaaagaacaaaattatgtgatatggaggacaaagagcttgaacccttatatgtaaaacggcgggagcaactaaagcagcttgtttcgtccattgtaaaaccaaaaatcgtgcagggtagaactctaaatgggaaggactttgtgtctttcttgcagcaggtgtacagggagaaaatggatagcttaaacctaccagtgccggtagacgaactgcagaaacttcatgagatgacaaatggtgaagctagaattctctttgataagcagcactttggcaaacatcatgctgctcagtcggccctcaagcttgaagatgagattaaagaggatgtactttgtaggtgtacagaaacttccttctagctaatgaatatcaatcgtcaaagctatgtgaagctcgcttttctgagtgtgaagataagatggatcaccttcaagtcttgaaacttccttcaatggcaaaattcaatgcaggctttactcactgcaaccaaagtttcgtaaaggactgcgtgggacctgcaaaagaaagctacgaacgtagaatgtcaaagatgcttgccaagtctcgtgctcttttcatcaaggagtacaataacaagcttttcaattggttggcgacattctctttggtcatggtggtgatcgggcgctttgtcatcaagttcttcctacttgaaattgttgcttgggtgatgtttatcttcctagagacgtacacgagaatgttctggtcagcggaatcactgtattataatccagcttggcacatcattgtttcttcctgggagatgatcgtgtacagccctattcttgatctggacagatgggccatcccaattgtcataatgctatcattgggggttctttactggaggtgcttcggccgcagaaggaagcgggtaaagggttccctcctcccattgtacaagaattcttacaagaactcgagtcgcccgagatcagattagttatacgcaatgtttaagtttttcttttaaaggatggtacaaaacatctgcttatagaagaggctacactgcccgtgcttttggatgggcatgttttgatgctgccttgcctatggatctccaattgttttttggtggacgaagagagacagtgaagctgctagcgatggccgatggggcacctgcacaagcctccgttgtaattgtaattctacttctctgccttctgtagctaggctatccttacatgtcacggtctcaattctttgcttattgtttacatccactgcaatttttgcaaggattttgtttttatcgggtcatatacaatgtagttgttatttagagcgtgcaccgtgacattcatatgctcgaagtctggcggtggaatttggaaacgtgccttttttatactgctattatacagttaatgtactcatgctatccttttggccaggagctgtgtttttgtttttgcattaaacgagtttggcgagcaatctaacgtagac

SEQ ID NO: 52264 - DNA, 2472 bp, Zea Mays
tatatcaggcctcattgcacactgatgtatatggtatttagtcattgaatgcgacttcttgtttttgccctctcatgaaatctggtttccagaaaaaaaaaacagtaatctgttactatattttttgaattttgattggaaatatctaatatccatgtccgttattcatgttttttatgcttccgaaagaagcatttaatgggacatatcatggaagatcattgtgttagcctaccatctacaggtttccaatagtggagccagaccacagacacactaaacttcgtctctcagagcaaggtctagaagcaattcgaaggatcgaaactcctattgctgttgttggtgtcattggtccctatcgatctggaaaatcatttctcctcaaccagcttctctccttatcttgtgataaaggttttggagttggtcatatgcgagatactaaaactaaaggtatttggatttggggtactcctgttgagatggatgttgatggttccaaagtttctgtcctttatctagacactgaagggtttgaaagtgttgggaaatcaaatgtgtatgatgataggatatttgctttggcgactgtcttaagctcggtccttatctacaaccttcctgagacggtacgtgaagctgatatatctaggctttcatttgccgttgaaattgctgaagagttctatggaagatcttcaggggcaagatgttgcttttgagccagcaaagcttctctggcttatccagagggatttcctccaaggaaaatctgttcaacaaatggtcaatgaagccctccaacgggtgcctaatgataatggtgacagatatattaatgaggtcaatcaaatacgagattctttggcagttatgggcaaccacagcactgcttttagcttgccccagccacatcttcaaagaacaaaattatgtgatatggaggacaaagagcttgaacccttatatgtaaaacggcgggagcaactaaagcagcttgtttcgtccattgtaaaaccaaaaatcgtgcagggtagaactctaaatgggaaggactttgtgtctttcttgcagcagattcttgaggctttgaataaaggcgaaattccatcaactggatctctggttgaaatttttaacaaagccattcttgatcgctgtctgaaggtgtacagggagaaaatggatagcttaaacctaccagtgccggtagacgaactgcagaaacttcatgagatgacaaatggtgaagctagaattctctttgataagcagcactttggcaaacatcatgctgctcagtcggccctcaagcttgaagatgagattaaagagaaacttccttctagctaatgaatatcaatcgtcaaagctatgtgaagctcgcttttctgagtgtgaagataagatggatcaccttcaagtcttgaaacttccttcaatggcaaaattcaatgcaggctttactcactgcaaccaaagtttcgtaaaggactgcgtgggacctgcaaaagaaagctacgaacgtagaatgtcaaagatgcttgccaagtctcgtgctcttttcatcaaggagtacaataacaagcttttcaattggttggcgacattctctttggtcatggtggtgatcgggcgctttgtcatcaagttcttcctacttgaaattgttgcttgggtgatgtttatcttcctagagacgtacacgagaatgttctggtcagcggaatcactgtattataatccagcttggcacatcattgtttcttcctgggagatgatcgtgtacagccctattcttgatctggacagatgggccatcccaattgtcataatgctatcattgggggttctttactggaggtgcttcggccgcagaaggaagcgggtaaagggttccctcctcccattgtacaagaattcttacaagaactcgagtcgcccgagatcagattagttatacgcaatgtttaagtttttcttttaaaggatggtacaaaacatctgcttatagaagaggctacactgcccgtgcttttggatgggcatgttttgatgctgccttgcctatggatctccaattgttttttggtggacgaagagagacagtgaagctgctagcgatggccgatggggcacctgcacaagcctccgttgtaattgtaattctacttctctgccttctgtagctaggctatccttacatgtcacggtctcaattctttgcttattgtttacatccactgcaatttttgcaaggattttgtttttatcgggtcatatacaatgtagttgttatttagagcgtgcaccgtgacattcatatgctcgaagtctggcggtggaatttggaaacgtgccttttttatactgctattatacagttaatgtactcatgctatccttttggccaggagctgtgtttttgtttttgcattaaacgagtttggcgagcaatctaacgtagac

SEQ ID NO: 52265 - DNA, 2493 bp, Zea Mays
tatatcaggcctcattgcacactgatgtatatggtatttagtcattgaatgcgacttcttgtttttgccctctcatgaaatctggtttccagaaaaaaaaaacagtaatctgttactatattttttgaattttgattggaaatatctaatatccatgtccgttattcatgttttttatgcttccgaaagaagcatttaatgggacatatcatggaagatcattgtgttagcctaccatctacaggtttccaatagtggagccagaccacagacacactaaacttcgtctctcagagcaaggtctagaagcaattcgaaggatcgaaactcctattgctgttgttggtgtcattggtccctatcgatctggaaaatcatttctcctcaaccagcttctctccttatcttgtgataaaggttttggagttggtcatatgcgagatactaaaactaaaggtatttggatttggggtactcctgttgagatggatgttgatggttccaaagtttctgtcctttatctagacactgaagggtttgaaagtgttgggaaatcaaatgtgtatgatgataggatatttgctttggcgactgtcttaagctcggtccttatctacaaccttcctgagacggtacgtgaagctgatatatctaggctttcatttgccgttgaaattgctgaagagttctatggaaggcttcaggggcaagatgttgcttttgagccagcaaagcttctctggcttatccagagggatttcctccaaggaaaatctgttcaacaaatggtcaatgaagccctccaacgggtgcctaatgataatggtgacagatatattaatgaggtcaatcaaatacgagattctttggcagttatgggcaaccacagcactgcttttagcttgccccagccacatcttcaaagaacaaaattatgtgatatggaggacaaagagcttgaacccttatatgtaaaacggcgggagcaactaaagcagcttgtttcgtccattgtaaaaccaaaaatcgtgcagggtagaactctaaatgggaaggactttgtgtctttcttgcagcagattcttgaggctttgaataaaggcgaaattccatcaactggatctctggttgaaatttttaacaaagccattcttgatcgctgtctgaaggtgtacagggagaaaatggatagcttaaacctaccagtgccggtagacgaactgcagaaacttcatgagatgacaaatggtgaagctagaattctctttgataagcagcactttggcaaacatcatgctgctcagtcggccctcaagcttgaagatgagattaaagaggatgtactttgtaggtgtacagaaacttccttctagctaatgaatatcaatcgtcaaagctatgtgaagctcgcttttctgagtgtgaagataagatggatcaccttcaagtcttgaaacttccttcaatggcaaaattcaatgcaggctttactcactgcaaccaaagtttcgtaaaggactgcgtgggacctgcaaaagaaagctacgaacgtagaatgtcaaagatgcttgccaagtctcgtgctcttttcatcaaggagtacaataacaagcttttcaattggttggcgacattctctttggtcatggtggtgatcgggcgctttgtcatcaagttcttcctacttgaaattgttgcttgggtgatgtttatcttcctagagacgtacacgagaatgttctggtcagcggaatcactgtattataatccagcttggcacatcattgtttcttcctgggagatgatcgtgtacagccctattcttgatctggacagatgggccatcccaattgtcataatgctatcattgggggttctttactggaggtgcttcggccgcagaaggaagcgggtaaagggttccctcctcccattgtacaagaattcttacaagaactcgagtcgcccgagatcagattagttatacgcaatgtttaagtttttcttttaaaggatggtacaaaacatctgcttatagaagaggctacactgcccgtgcttttggatgggcatgttttgatgctgccttgcctatggatctccaattgttttttggtggacgaagagagacagtgaagctgctagcgatggccgatggggcacctgcacaagcctccgttgtaattgtaattctacttctctgccttctgtagctaggctatccttacatgtcacggtctcaattctttgcttattgtttacatccactgcaatttttgcaaggattttgtttttatcgggtcatatacaatgtagttgttatttagagcgtgcaccgtgacattcatatgctcgaagtctggcggtggaatttggaaacgtgccttttttatactgctattatacagttaatgtactcatgctatccttttggccaggagctgtgtttttgtttttgcattaaacgagtttggcgagcaatctaacgtagac

SEQ ID NO: 52266 - DNA, 2282 bp, Zea Mays
gtcgtggacacaattttccagctttcaagcagtgttgaaactgggactgctctggctgctctatggcagatggagtgcagtattgttttgcgaatgttcctgtttgatgaatatttttggtgctttctcagaaaccggtttccaatagtggagccagaccacagacacactaaacttcgtctctcagagcaaggtctagaagcaattcgaaggatcgaaactcctattgctgttgttggtgtcattggtccctatcgatctggaaaatcatttctcctcaaccagcttctctccttatcttgtgataaaggttttggagttggtcatatgcgagatactaaaactaaaggtatttggatttggggtactcctgttgagatggatgttgatggttccaaagtttctgtcctttatctagacactgaagggtttgaaagtgttgggaaatcaaatgtgtatgatgataggatatttgctttggcgactgtcttaagctcggtccttatctacaaccttcctgagacggtacgtgaagctgatatatctaggctttcatttgccgttgaaattgctgaagagttctatggaagtcttcaggggcaagatgttgcttttgagccagcaaagcttctctggcttatccagagggatttcctccaaggaaaatctgttcaacaaatggtcaatgaagccctccaacgggtgcctaatgataatggtgacagatatattaatgaggtcaatcaaatacgagattctttggcagttatgggcaaccacagcactgcttttagcttgccccagccacatcttcaaagaacaaaattatgtgatatggaggacaaagagcttgaacccttatatgtaaaacggcgggagcaactaaagcagcttgtttcgtccattgtaaaaccaaaaatcgtgcagggtagaactctaaatgggaaggactttgtgtctttcttgcagcaggtgtacagggagaaaatggatagcttaaacctaccagtgccggtagacgaactgcagaaacttcatgagatgacaaatggtgaagctagaattctctttgataagcagcactttggcaaacatcatgctgctcagtcggccctcaagcttgaagatgagattaaagaggtgtacagaaacttccttctagctaatgaatatcaatcgtcaaagctatgtgaagctcgcttttctgagtgtgaagataagatggatcaccttcaagtcttgaaacttccttcaatggcaaaattcaatgcaggctttactcactgcaaccaaagtttcgtaaaggactgcgtgggacctgcaaaagaaagctacgaacgtagaatgtcaaagatgcttgccaagtctcgtgctcttttcatcaaggagtacaataacaagcttttcaattggttggcgacattctctttggtcatggtggtgatcgggcgctttgtcatcaagttcttcctacttgaaattgttgcttgggtgatgtttatcttcctagagacgtacacgagaatgttctggtcagcggaatcactgtattataatccagcttggcacatcattgtttcttcctgggagatgatcgtgtacagccctattcttgatctggacagatgggccatcccaattgtcataatgctatcattgggggttctttactggaggtgcttcggccgcagaaggaagcgggtaaagggttccctcctcccattgtacaagaattcttacaagaactcgagtcgcccgagatcagattagttatacgcaatgtttaagtttttcttttaaaggatggtacaaaacatctgcttatagaagaggctacactgcccgtgcttttggatgggcatgttttgatgctgccttgcctatggatctccaattgttttttggtggacgaagagagacagtgaagctgctagcgatggccgatggggcacctgcacaagcctccgttgtaattgtaattctacttctctgccttctgtagctaggctatccttacatgtcacggtctcaattctttgcttattgtttacatccactgcaatttttgcaaggattttgtttttatcgggtcatatacaatgtagttgttatttagagcgtgcaccgtgacattcatatgctcgaagtctggcggtggaatttggaaacgtgccttttttatactgctattatacagttaatgtactcatgctatccttttggccaggagctgtgtttttgtttttgcattaaacgagtttggcgagcaatctaacgtagac

SEQ ID NO: 52267 - DNA, 2299 bp, Zea Mays
atgttctatgacattctttcagtgaattgtcgtggacacaattttccagctttcaagcagtgttgaaactgggactgctctggctgctctatggcagatggagtgcagtattgttttgcgaatgttcctgtttgatgaatatttttggtgctttctcagaaaccggtttccaatagtggagccagaccacagacacactaaacttcgtctctcagagcaaggtctagaagcaattcgaaggatcgaaactcctattgctgttgttggtgtcattggtccctatcgatctggaaaatcatttctcctcaaccagcttctctccttatcttgtgataaaggttttggagttggtcatatgcgagatactaaaactaaaggtatttggatttggggtactcctgttgagatggatgttgatggttccaaagtttctgtcctttatctagacactgaagggtttgaaagtgttgggaaatcaaatgtgtatgatgataggatatttgctttggcgactgtcttaagctcggtccttatctacaaccttcctgagacggtacgtgaagctgatatatctaggctttcatttgccgttgaaattgctgaagagttctatggaagtcttcaggggcaagatgttgcttttgagccagcaaagcttctctggcttatccagagggatttcctccaaggaaaatctgttcaacaaatggtcaatgaagccctccaacgggtgcctaatgataatggtgacagatatattaatgaggtcaatcaaatacgagattctttggcagttatgggcaaccacagcactgcttttagcttgccccagccacatcttcaaagaacaaaattatgtgatatggaggacaaagagcttgaacccttatatgtaaaacggcgggagcaactaaagcagcttgtttcgtccattgtaaaaccaaaaatcgtgcagggtagaactctaaatgggaaggactttgtgtctttcttgcagcagattcttgaggctttgaataaaggcgaaattccatcaactggatctctggttgaaatttttaacaaagccattcttgatcgctgtctgaaggtgtacagggagaaaatggatagcttaaacctaccagtgccggtagacgaactgcagaaacttcatgagatgacaaatggtgaagctagaattctctttgataagcagcactttggcaaacatcatgctgctcagtcggccctcaagcttgaagatgagattaaagaggtgtacagaaacttccttctagctaatgaatatcaatcgtcaaagctatgtgaagctcgcttttctgagtgtgaagataagatggatcaccttcaagtcttgaaacttccttcaatggcaaaattcaatgcaggctttactcactgcaaccaaagtttcgtaaaggactgcgtgggacctgcaaaagaaagctacgaacgtagaatgtcaaagatgcttgccaagtctcgtgctcttttcatcaaggagtacaataacaagcttttcaattggttggcgacattctctttggtcatggtggtgatcgggcgctttgtcatcaagttcttcctacttgaaattgttgcttgggtgatgtttatcttcctagagacgtacacgagaatgttctggtcagcggaatcactgtattataatccagcttggcacatcattgtttcttcctgggagatgatcgtgtacagccctattcttgatctggacagatgggccatcccaattgtcataatgctatcattgggggttctttactggaggtgcttcggccgcagaaggaagcgggatggtacaaaacatctgcttatagaagaggctacactgcccgtgcttttggatgggcatgttttgatgctgccttgcctatggatctccaattgttttttggtggacgaagagagacagtgaagctgctagcgatggccgatggggcacctgcacaagcctccgttgtaattgtaattctacttctctgccttctgtagctaggctatccttacatgtcacggtctcaattctttgcttattgtttacatccactgcaatttttgcaaggattttgtttttatcgggtcatatacaatgtagttgttatttagagcgtgcaccgtgacattcatatgctcgaagtctggcggtggaatttggaaacgtgccttttttatactgctattatacagttaatgtactcatgctatccttttggccaggagctgtgtttttgtttttgcattaaacgagtttggcgagcaatctaacgtagac

SEQ ID NO: 52268 - DNA, 2656 bp, Zea Mays
ctgttccccccgatttttccctctcccttccgagttccaatctcatcggtcgtcgccccgctgctccagctcttcccattcgttcccactccctcgcgccgaagcaactcctgaatcctcctgcgcgccaaaaccctagccgcagatcccgcacctcgccgcccggagcccaagcggcggcgtcgacgtccgcgcacgcaccgaccattgccgctcgccgcattggggcgcttacggcgtcgcctccgctcccggggcagagatctgggtcgaggagacctggttgcgcgtgggctgcgtaggggatgtggcgggggcggtgtgccccggggatcagcgtggcggcgctggccctgctcgccgtcgcggctgctgcaggagccgccgcgggggatcccgatcccgacgacctcgagcgcgcgtttccaatagtggagccagaccacagacacactaaacttcgtctctcagagcaaggtctagaagcaattcgaaggatcgaaactcctattgctgttgttggtgtcattggtccctatcgatctggaaaatcatttctcctcaaccagcttctctccttatcttgtgataaaggttttggagttggtcatatgcgagatactaaaactaaaggtatttggatttggggtactcctgttgagatggatgttgatggttccaaagtttctgtcctttatctagacactgaagggtttgaaagtgttgggaaatcaaatgtgtatgatgataggatatttgctttggcgactgtcttaagctcggtccttatctacaaccttcctgagacggtacgtgaagctgatatatctaggctttcatttgccgttgaaattgctgaagagttctatggaagagtgaaggggcaagatgttgcttttgagccagcaaagcttctctggcttatccagagggatttcctccaaggaaaatctgttcaacaaatggtcaatgaagccctccaacgggtgcctaatgataatggtgacagatatattaatgaggtcaatcaaatacgagattctttggcagttatgggcaaccacagcactgcttttagcttgccccagccacatcttcaaagaacaaaattatgtgatatggaggacaaagagcttgaacccttatatgtaaaacggcgggagcaactaaagcagcttgtttcgtccattgtaaaaccaaaaatcgtgcagggtagaactctaaatgggaaggactttgtgtctttcttgcagcagattcttgaggctttgaataaaggcgaaattccatcaactggatctctggttgaaatttttaacaaagccattcttgatcgctgtctgaaggtgtacagggagaaaatggatagcttaaacctaccagtgccggtagacgaactgcagaaacttcatgagatgacaaatggtgaagctagaattctctttgataagcagcactttggcaaacatcatgctgctcagtcggccctcaagcttgaagatgagattaaagaggtgtacagaaacttccttctagctaatgaatatcaatcgtcaaagctatgtgaagctcgcttttctgagtgtgaagataagatggatcaccttcaagtcttgaaacttccttcaatggcaaaattcaatgcaggctttactcactgcaaccaaagtttcgtaaaggactgcgtgggacctgcaaaagaaagctacgaacgtagaatgtcaaagatgcttgccaagtctcgtgctcttttcatcaaggagtacaataacaagcttttcaattggttggcgacattctctttggtcatggtggtgatcgggcgctttgtcatcaagttcttcctacttgaaattgttgcttgggtgatgtttatcttcctagagacgtacacgagaatgttctggtcagcggaatcactgtattataatccagcttggcacatcattgtttcttcctgggagatgatcgtgtacagccctattcttgatctggacagatgggccatcccaattgtcataatgctatcattgggggttctttactggaggtgcttcggccgcagaaggaagcgggtaaagggttccctcctcccattgtacaagaattcttacaagaactcgagtcgcccgagatcagattagttatacgcaatgtttaagtttttcttttaaaggatggtacaaaacatctgcttatagaagaggctacactgcccgtgcttttggatgggcatgttttgatgctgccttgcctatggatctccaattgttttttggtggacgaagagagacagtgaagctgctagcgatggccgatggggcacctgcacaagcctccgttgtaattgtaattctacttctctgccttctgtagctaggctatccttacatgtcacggtctcaattctttgcttattgtttacatccactgcaatttttgcaaggattttgtttttatcgggtcatatacaatgtagttgttatttagagcgtgcaccgtgacattcatatgctcgaagtctggcggtggaatttggaaacgtgccttttttatactgctattatacagttaatgtactcatgctatccttttggccaggagctgtgtttttgtttttgcattaaacgagtttggcgagcaatctaacgtagac

SEQ ID NO: 52269 - DNA, 852 bp, Zea Mays
cccagctcgactagcccttcactgtgattccaacggatgatggattctgctcttcggcgattttttgtgtgggcgagtttgagggacgacgaggggctgtacctcgccagtgattcggacgagcagctgctgatctacatccccttcatgcaagtggtcaaactgcattccgtgctattcaaaggccccgaggaagagggccctaaaacagtaaaactcttttccaacaaagagcatatgggtttcagcaatgtcaatgactatccaccaatggacacccttgagctatcctccgatcatttgatagagaataaacctttgccgctaaagtatgtcaagttccaaaatgttcgcagcctgactgtatttattgaggacaatcaatctggaagtgatgtctcgaaaattcaaaaggttgctctttatggcacaactgtggacacgacaaatatgaaggatctgagaaagacagaagagcactgagaccatttaaaggctgagcttaatccagtgggtgtatgacatactagaaacagttagatgttgaattgagcaatttctagttgaccctggcaaactttttccccaatttttatacacgaggagttaaaagacggtctggtgatgccgaagctattacctcttggcatcttgtaatcctgcaatttatgtcttggggatccgaattcatttcatgaatttaccaaaattagtccatgcgtcgatggtctcgcaaactttgccagcagagcttagttcgttcatggcgctgtgatatgcgtaagatttaatcaagtcgtggctgtacttgccgtatggctgctggcctggccaatctgtgtcttgctgttt

SEQ ID NO: 52270 - DNA, 1047 bp, Zea Mays
accaaatcagccttagcgtagcaaatacgcccctcttccagccttcccctccctgtacctactacccgccccgcccttccagttccagaagtttctggaagccaacccaagccatggacgccgccagcatagccgccgccgccgccgccgtggccaccccgccccctggcccggccgtgaccgtgcaggtaccgcgcgggcaggtggatctgattgacttcatcgactggactggcgtcgagtgcctaaaccaggactcctcccacagcatcgtcaacgcgctcaagcagagtttgagggacgacgaggggctgtacctcgccagtgattcggacgagcagctgctgatctacatccccttcatgcaagtggtcaaactgcattccgtgctattcaaaggccccgaggaagagggccctaaaacagtaaaactcttttccaacaaagagcatatgggtttcagcaatgtcaatgactatccaccaatggacacccttgagctatcctccgatcatttgatagagaataaacctttgccgctaaagtatgtcaagttccaaaatgttcgcagcctgactgtatttattgaggacaatcaatctggaagtgatgtctcgaaaattcaaaagtgtggacacgacaaatatgaaggatctgagaaagacagaagagcactgagaccatttaaaggctgagcttaatccagtgggtgtatgacatactagaaacagttagatgttgaattgagcaatttctagttgaccctggcaaactttttccccaatttttatacacgaggagttaaaagacggtctggtgatgccgaagctattacctcttggcatcttgtaatcctgcaatttatgtcttggggatccgaattcatttcatgaatttaccaaaattagtccatgcgtcgatggtctcgcaaactttgccagcagagcttagttcgttcatggcgctgtgatatgcgtaagatttaatcaagtcgtggctgtacttgccgtatggctgctggcctggccaatctgtgtcttgctgttt

SEQ ID NO: 52271 - DNA, 801 bp, Zea Mays
gtcaggttcgcccattggccgttgagtttgagggacgacgaggggctgtacctcgccagtgattcggacgagcagctgctgatctacatccccttcatgcaagtggtcaaactgcattccgtgctattcaaaggccccgaggaagagggccctaaaacagtaaaactcttttccaacaaagagcatatgggtttcagcaatgtcaatgactatccaccaatggacacccttgagctatcctccgatcatttgatagagaataaacctttgccgctaaagtatgtcaagttccaaaatgttcgcagcctgactgtatttattgaggacaatcaatctggaagtgatgtctcgaaaattcaaaaggttgctctttatggcacaactgtggacacgacaaatatgaaggatctgagaaagacagaagagcactgagaccatttaaaggctgagcttaatccagtgggtgtatgacatactagaaacagttagatgttgaattgagcaatttctagttgaccctggcaaactttttccccaatttttatacacgaggagttaaaagacggtctggtgatgccgaagctattacctcttggcatcttgtaatcctgcaatttatgtcttggggatccgaattcatttcatgaatttaccaaaattagtccatgcgtcgatggtctcgcaaactttgccagcagagcttagttcgttcatggcgctgtgatatgcgtaagatttaatcaagtcgtggctgtacttgccgtatggctgctggcctggccaatctgtgtcttgctgttt

SEQ ID NO: 52272 - DNA, 677 bp, Zea Mays
gtcaggttcgcccattggccgttggccctaaaacagtaaaactcttttccaacaaagagcatatgggtttcagcaatgtcaatgactatccaccaatggacacccttgagctatcctccgatcatttgatagagaataaacctttgccgctaaagtatgtcaagttccaaaatgttcgcagcctgactgtatttattgaggacaatcaatctggaagtgatgtctcgaaaattcaaaaggttgctctttatggcacaactgtggacacgacaaatatgaaggatctgagaaagacagaagagcactgagaccatttaaaggctgagcttaatccagtgggtgtatgacatactagaaacagttagatgttgaattgagcaatttctagttgaccctggcaaactttttccccaatttttatacacgaggagttaaaagacggtctggtgatgccgaagctattacctcttggcatcttgtaatcctgcaatttatgtcttggggatccgaattcatttcatgaatttaccaaaattagtccatgcgtcgatggtctcgcaaactttgccagcagagcttagttcgttcatggcgctgtgatatgcgtaagatttaatcaagtcgtggctgtacttgccgtatggctgctggcctggccaatctgtgtcttgctgttt

SEQ ID NO: 52273 - DNA, 768 bp, Zea Mays
cccggcgaggggctgtacctcgccagtgattcggacgagcagctgctgatctacatccccttcatgcaagtggtcaaactgcattccgtgctattcaaaggccccgaggaagagggccctaaaacagtaaaactcttttccaacaaagagcatatgggtttcagcaatgtcaatgactatccaccaatggacacccttgagctatcctccgatcatttgatagagaataaacctttgccgctaaagtatgtcaagttccaaaatgttcgcagcctgactgtatttattgaggacaatcaatctggaagtgatgtctcgaaaattcaaaaggttgctctttatggcacaactgtggacacgacaaatatgaaggatctgagaaagacagaagagcactgagaccatttaaaggctgagcttaatccagtgggtgtatgacatactagaaacagttagatgttgaattgagcaatttctagttgaccctggcaaactttttccccaatttttatacacgaggagttaaaagacggtctggtgatgccgaagctattacctcttggcatcttgtaatcctgcaatttatgtcttggggatccgaattcatttcatgaatttaccaaaattagtccatgcgtcgatggtctcgcaaactttgccagcagagcttagttcgttcatggcgctgtgatatgcgtaagatttaatcaagtcgtggctgtacttgccgtatggctgctggcctggccaatctgtgtcttgctgttt

SEQ ID NO: 52274 - DNA, 3779 bp, Zea Mays
agacggaagcccaacccgcccgcctgcccgcacacacgcgcgtggccatcgcccctccttccccttcccccgcacacacgcgcctcacctttcgtcccttcgcccctacagatcgaaccaaggaggcagcaaccagcgcacgccactgcggcgctaggagctcgcagaagcgccgccccacgagagggagtccagagcaaggaagagatccggtggcagagcaggtcggtcggagatgggagtaccggcgttctaccggtggctggcggaccgctacccgctgacggtgtctgacgcggaggaggaggagcccgtggagctcgagcccggcgccttcgtccccgttgacctccgccgccccaatcccaacggcctcgagtttgacaacctctacctcgacatgaatggtatcatccacccatgcttccaccccgagggccggccggcgcccaccacctacgacgaggtgttcaagtcgatttttgattacatcgaccacctcttcggcctcatccgccccaggaagcttctctacatggccattgatggtgttgctccaagggcaaaaatgaaccagcagaggtccaggcgattccgggctgctaaggacgcggctgatgcggcagcggaggaagagaggctgaggaaggagtttgaggcagagggtaggactctagcccagaaagagaagtcggaggcaattgactccaatgtcattactccagggacggagttcatgtttgtactatctacggcgcttcagtactacatacagctgaggctgaatcacacgcttggatggcagtctgtaaagataatactgtctgattccaatgtccctggagagggagagcacaaaattatgtcatacatccgcctgcagcgcaatcttcctggctttgatcccaatacacgccattgcttatatggcctggacgctgatttgattatgcttgctctagcgactcacgaggttcacttctcaattttaagagagggcaacatgaaaaatgttttctttgtggtcaagttgggcatttggctgctgaatgcagaggtcctagtcagcctgataattctgtggagctacctcctattcataaaaagaaataccagtttcttaacatatgggtgttgcgtgaatacctggcaaaggatttggaaattatagatgctcccttcaagataaactttgaacgtcttattgatgattttgtgtttatgtgtttctttgttggcaatgactttcttcctcatatgccaactttggaaattcgtgagggtgccattaatcttctcatgagtatctacaggtcggagttcacatcaatgggtggttacctaactgatgtgggtgaggttatattggaccgagtggaacatttcatccagtctgttgcggtcaatgaagaacagattttccagaaacgggcacgcattcaacaggcacgtgagaataatgaagagaaacataaaatgcagagagagaattctgaggaggatcaatatgtggataaggtgaagttaggagagccaggatacagggagcgttattatgctgataagtttaaagaagaggcagaatcaaaacccattgttcaagttcggagagatgttgtccagaaatacgtggaaggtctttgttgggttatgagatactactatcaaggtgtttgttcatggcagtggttttatccctatcattatgcgcctttcgcatctgatctaaaaggcttggctgaattggaaataaccttttttttgggtcaacctttcaagccatttgatcaactaatgggaaccctaccagctgcaagctccaatgcactgccaaaatactatggggatttgatgagtgatccagattcaccgttgaagtctttctacccaaaagattttgagatagacatgaatgggaaacgttttgcatggcagggtgttgcaaaattgccttttattgatgaaaggcgtctgcttgcggaaacaagaaaacttgaagatactttgacagaagaagagaaattcaggaataggactatgcttgacataatttacgttagagatactcatccattgatcactcagattatcttcctgtatcagaactattaccatctatcaagaacagacccttatgttattcccattgagcctgctgctagtggtggaatgaatggattcctatgtttatctgaaaggaactggtatagtgtcactgtcacttctccagttaaggggttcaatggcattgctcagaacagagttttgaatgctgcctatctcaatcctcagtatcacaaacacatcccagagcctccagcgggggtcatcatacctgcgaagatactgaagcctagtgatttcaaaccctttcctgtgttgtggcatcaagataatagtcgtcgacaagtaagagaaaggcctcaggtttctggagccctgtccggttctctcttaggagaagctgcacaccgactggtgaaaaactccctccagatcagatctggcaatgctgctgggttactttatatgccatacagaggtgcaccctatggccctggaaacagaccaaggcctgctgggccattggggtatgagaggggttttgtggataatccataccatgcacacatgtctagaagtgttccaaaccctcacgctcaattctttggtgattctcaagctaacagacagcccatgcggatactagaacggccagactcccgaagtcatgatgctggtatccgtgcatcaatgtctaaactgacaatccaagaagggccaaggcctcatcaaaataacaggatgcagaattccgggtactggcccaatcaaccacatcctactcactttactggacccccagcccagcggcctatgcagaacatcagttttacacctcagcgacctttccaaaccgggggatttccgcagcagagacctgtaaatggggctccaccaccattacctcccagtaactggattggtaagcaaccaagtggatgccacatgagtgtatcacctgcaaaactcgatccaaggacagctccagacagacagcccaagcaggataacccaagatctcaacaggataagaggcagcaggcgaccaaggtataccgtgtcaaaactcaagctactaatgttaatggtttgtcagagccaggtaaacaggaagaacctgaagggtaactgggttgctgcaaatccacacgccaagtttaatgtgcgtggagagaatacgctggctcttggtgatagcagcagagggtttccatgtatccctcccacaatttacctttcgatgttgaattgtttgttgtattacccggaaaggagtcggctaaattttaggtcaggggatttagacacagcttttgtttagttgataggacatggtatgggcattcactgcttgttgtaaagctgttagttggatagctgaaactgttttgtgctggctgactgctgcatattcaacatagacccgtgcggaggctggctcaactgccctgctcctgctctatctcatggaagttgggggcagatgtgcttgtggtcttcaaactgagcagtttgtgtctctgagaaaggaggaagcattccgaatttttcattgtaccgttgaaccaagttgagtctttaacactgaaaagaacatgttcctctcgagcttaacgagtgccataattaggacatggaataatatatatatttttcttttctgggatgcaaacatggtgttcaaattcccattacgcactgtttgaattcgattt

SEQ ID NO: 52275 - DNA, 3703 bp, Zea Mays
agacggaagcccaacccgcccgcctgcccgcacacacgcgcgtggccatcgcccctccttccccttcccccgcacacacgcgcctcacctttcgtcccttcgcccctacagatcgaaccaaggaggcagcaaccagcgcacgccactgcggcgctaggagctcgcagaagcgccgccccacgagagggagtccagagcaaggaagagatccggtggcagagcaggtcggtcggagatgggagtaccggcgttctaccggtggctggcggaccgctacccgctgacggtgtctgacgcggaggaggaggagcccgtggagctcgagcccggcgccttcgtccccgttgacctccgccgccccaatcccaacggcctcgagtttgacaacctctacctcgacatgaatggtatcatccacccatgcttccaccccgagggccggccggcgcccaccacctacgacgaggtgttcaagtcgatttttgattacatcgaccacctcttcggcctcatccgccccaggaagcttctctacatggccattgatggtgttgctccaagggcaaaaatgaaccagcagaggtccaggcgattccgggctgctaaggacgcggctgatgcggcagcggaggaagagaggctgaggaaggagtttgaggcagagggtaggactctagcccagaaagagaagtcggaggcaattgactccaatgtcattactccagggacggagttcatgtttgtactatctacggcgcttcagtactacatacagctgaggctgaatcacacgcttggatggcagtctgtaaagataatactgtctgattccaatgtccctggagagggagagcacaaaattatgtcatacatccgcctgcagcgcaatcttcctggctttgatcccaatacacgccattgcttatatggcctggacgctgatttgattatgcttgctctagcgactcacgaggttcacttctcaattttaagagaggtgatctccatgccagggcaacatgaaaaatgttttctttgtggtcaagttgggcatttggctgctgaatgcagaggtcctagtcagcctgataattctgtggagctacctcctattcataaaaagaaataccagtttcttaacatatgggtgttgcgtgaatacctggcaaaggatttggaaattatagatgctcccttcaagataaactttgaacgtcttattgatgattttgtgtttatgtgtttctttgttggcaatgactttcttcctcatatgccaactttggaaattcgtgagggtgccattaatcttctcatgagtatctacaggtcggagttcacatcaatgggtggttacctaactgatgtgggtgaggttatattggaccgagtggaacatttcatccagtctgttgcggtcaatgaagaacagattttccagaaacgggcacgcattcaacaggcacgtgagaataatgaagagaaacataaaatgcagagagagaattctgaggaggatcaatatgtggataaggtgaagttaggagagccaggatacagggagcgttattatgctgataagtttaaagaagaggcagaatcaaaacccattgttcaagttcggagagatgttgtccagaaatacgtggaaggtctttgttgggttatgagatactactatcaaggtgtttgttcatggcagtggttttatccctatcattatgcgcctttcgcatctgatctaaaaggcttggctgaattggaaataaccttttttttgggtcaacctttcaagccatttgatcaactaatgggaaccctaccagctgcaagctccaatgcactgccaaaatactatggggatttgatgagtgatccagattcaccgttgaagtctttctacccaaaagattttgagatagacatgaatgggaaacgttttgcatggcagggtgttgcaaaattgccttttattgatgaaaggcgtctgcttgcggaaacaagaaaacttgaagatactttgacagaagaagagaaattcaggaataggactatgcttgacataatttacgttagagatactcatccattgatcactcagattatcttcctgtatcagaactattaccatctatcaagaacagacccttatgttattcccattgagcctgctgctagtggtggaatgaatggattcctatgtttatctgaaaggaactggtatagtgtcactgtcacttctccagttaaggggttcaatggcattgctcagaacagagttttgaatgctgcctatctcaatcctcagtatcacaaacacatcccagagcctccagcgggggtcatcatacctgcgaagatactgaagcctagtgatttcaaaccctttcctgtgttgtggcatcaagataatagtcgtcgacaagtaagagaaaggcctcaggtttctggagccctgtccggttctctcttaggagaagctgcacaccgactggtgaaaaactccctccagatcagatctggcaatgctgctgggttactttatatgccatacagaggtgcaccctatggccctggaaacagaccaaggcctgctgggccattgggctaacagacagcccatgcggatactagaacggccagactcccgaagtcatgatgctggtatccgtgcatcaatgtctaaactgacaatccaagaagggccaaggcctcatcaaaataacaggatgcagaattccgggtactggcccaatcaaccacatcctactcactttactggacccccagcccagcggcctatgcagaacatcagttttacacctcagcgacctttccaaaccgggggatttccgcagcagagacctgtaaatggggctccaccaccattacctcccagtaactggattggtaagcaaccaagtggatgccacatgagtgtatcacctgcaaaactcgatccaaggacagctccagacagacagcccaagcaggataacccaagatctcaacaggataagaggcagcaggcgaccaaggtataccgtgtcaaaactcaagctactaatgttaatggtttgtcagagccaggtaaacaggaagaacctgaagggtaactgggttgctgcaaatccacacgccaagtttaatgtgcgtggagagaatacgctggctcttggtgatagcagcagagggtttccatgtatccctcccacaatttacctttcgatgttgaattgtttgttgtattacccggaaaggagtcggctaaattttaggtcaggggatttagacacagcttttgtttagttgataggacatggtatgggcattcactgcttgttgtaaagctgttagttggatagctgaaactgttttgtgctggctgactgctgcatattcaacatagacccgtgcggaggctggctcaactgccctgctcctgctctatctcatggaagttgggggcagatgtgcttgtggtcttcaaactgagcagtttgtgtctctgagaaaggaggaagcattccgaatttttcattgtaccgttgaaccaagttgagtctttaacactgaaaagaacatgttcctctcgagcttaacgagtgccataattaggacatggaataatatatatatttttcttttctgggatgcaaacatggtgttcaaattcccattacgcactgtttgaattcgattt

SEQ ID NO: 52276 - DNA, 1237 bp, Zea Mays
cttcctcgttgcttccacgagaaagcgacagcctcgtataccaatttgcatatctgcatcaagcttgcggatcaagattctcctctctctctctctctagccagagtggaacaggttgccgccgcatcacctctgggaacagagccgagcagctgcactgtcgcgtcgagaaataatcggagcataagaaaactgcttcagccatggaggtcacggcgacgccaagaatccaagaagccaagaccgtgcccggcactgcgaaggcaaccgtggacgacgaggtgacgctccgtcggttcgagctgaccgacgtggacgccatgatggagtgggcgtcggaccctcaggtggcggccttctgccggtgggagccgtacgcgtcggcggagccgctgctggagttcctgcgcgacgccgtgctcccgcacccgtggtaccgcgccatctgcgtctccggcgcggtggtgggcgcggtgtctctggcgcccacgccggagcgctgccgctgggagctcggctacgtgctggcccgcgcgcactgggggaaaggcgtggcgacggcggccgtgcggcgcgcgctgcgggacgcgttcgcggacctggagcccgagggcctgcggcgcgtggaggcgctggtggacgtgggcaacccggcgtcgcagcgcgtggcggagaaggccgggttccgccgcgagggcgtgctgcggcgccactactggcacaaggggcgcgccagggacatggtcatgtacagcttcctctcctccgacctcctccccgaccccgagtgagaacgatccccatggcgggtggattccccatgcagttaacgttcgtttacctgtatgacgaaacgctggcctgcaatgcctttgccatgctctgcaagcaaagcttcggtagcaaacagaactccccttccagtagcggcttctctttccaatgatcctccaaggtcctgtgtattcagaaggaaattcacagtacatgaaagataatgagaagatctacaaggagcacaaacaaatcaaacctgtccaagaaaaccaagggtacgtttttctatcatgattccccatggaacaaaacaacaaaatgtattgccgccaggtgaggtttggtttccgattttttccaatcctgagaagcaagtgtttgaggctgatctctttcagtgatctggtcatgaattcatgattcacagtcccaaagagttgggtgcgtgcgtgcaattgac

SEQ ID NO: 52277 - DNA, 3084 bp, Zea Mays
ctcgctttcgcattgcacacaccaccatacaccgcactgctgagtgcagattgctgacctctactacactctactctactctactcctcctagtccttgttctgtacaaacctgttttcggcgtctggctgtaccgctagccttaacccctagagccagacggaggaggcctgcggaagcgggagcggaagaggaggaggagagtgtgttcagaatttcagaagcaaagtgctgtcttgccatacccctacagtgctactagcctgtgctgctgcagagaagccaatcgaggcggggcactcgttcctccccgttacaaggagaggaggaagatttaggggcggaggaggtcacagactcacaggaaggaaagatggactcttgatccccgtcgcggtcgcggctggtttgttgtgggcaagccgaaccattttgctgctataatactcgagcagtcgattcgcggctcccggggccagaatcttgctctgagaggcggaatttgtgcgggatttgagctttctttcctccaacgaggtgccctgaggaagggagggagcgccagttctcccactgctgtagtgcgtggtttcagggaggtatgagacaatgagggaagagagcaacaagaagagcaagctctcctggtcgaaatccctcgtgaggaagtggttcaacatcaagactaagccacatgatttccgtgcggattgcgccgccgcccaagggagggtcgggcatgatgatggcgaatggaggaccagctgctcagagcgggaggcaggcgccgccaagaaaagcagaactgaccgaccgtcgaagcggagtagtatggatcgaatcagaggaggaaaaaacgacttcgatgcggcatgcctcacagaagttcagaactacaggtgctagtagtagtatggtagtgtgcatcccagattttcagttttgaaaccaaatctttgcctccacatggaatgtaggtggtaaatccccaccgaggggattgaatcttgatgactggctccattcttcaccttcagctgatatctatgtgttaggatttcaagaaattgttcctttgaatgctggaaatgttcttggcacagaagataatctcccagcgaaaaaatgggtatcccttgtcaggaggacactgaataagaatcctggttcatgctgttatggtggctatcgcacgccatctcctgtccctgatccagttgtagaacaaaatgctgattttgagggatcgtcgagaaggctggacagtttatcctatttgcatcgtcggtcgttcaaccttagccggagtttaagagttgaaggggatcatatgctaccacaccaaaggttggatcgtaggttcagtgtctgtgacccagttagcttgggaggcaggccaagtgattttgataggaacttcccattcatgggatcaccggatgatcattgtatcgaggaggatacaagcaatgaagcatattttccacccttcccatatggctatggtgcctccgcgcctatggaagaaaatgatcatcagacaaatacatctaggtattgtttggttgccagcaagcaaatggtcggtatatttctcaccgtttgggtgcgcagcgaaataagaaatgatgtgagaaacctgaaagtttcttgcgtgggtagaggactaatgggttatcttggaaataagggttctatatccataagcatgtctttgcaccacacaaccttttgttttgtctgctgtcatctgacctctggtgaaaaggagggagatgaactacggagaaactctgacgttatggaaattctaagaaagactagatttccacaggtccgtggtgctgctgatgtcaagtcaccagaaacgattcttgagcatgaccgtatcatttggcttggggatttgaattatcggattgccctatcgtactgctcagctaaagctcttgtcgaaatgcataactggaagcaacttttagagaaagatcagcttcggatagaacgaagatgcgggcgtgttttccatggttggaaagaaggcaggatttattttcctccgacatataagtactcattcaactcggatcgttattctggtgtgcggcccaaagaaaagcggagaacacccgcttggtgcgatcgcattctgtggtacggtaatggcctctcgcagctgtcctacgttcgcggagagtctcgcttctctgaccacagaccagtctacagtattttcatggctgaggttgagagtgcccgccacagaagaaggaacatgggctattccagctctagaatcgaggtggaagagcttttgccgtatccatacagctccggagaaatgaagttctactggtttggctgacatagggcatatggctggagcttgttttctacttcaacttaggttgccgggtccttgatgaacaaacaataccttgggccatagactgcatggtcactagcttgatcagatgtaagcctggttatttttctcatctggctttcacagcttccagtcagatggttgagaagcgcaatgcacaaaactgacataaaagccgtgttgaaacaaggatcggcccgcatctgtacatgtcattaaccacacagctcagaaaaaaaaaacccttctcgtccccaatttggttctctttttttaggagagttagtaaacatacatattttttctttctttgtttctccctttgcatttgggaaatctttttagaatgagattttggagtgtatcagcatgaggtgtaaaatcattgtgaatcggtaaaaggctggaatgatgcttgaaccgaactgatccgtgatcatgatctccattgctgatgagggaacagtggtgatggattgatgtgacttgggaggtttgcaaaggtgtaatcatgtgtataataacccttttatttgtttttttcctctgtccctgtggtgtagtgcctgagaagcgaaatgatgcctgcgtttgctgtgctcattgctgttaaaccttttttttctaattgtaacaggtcagagccttgcttcctggctggaaagcatggcattattcttgttatcagcttgcttgct

SEQ ID NO: 52278 - DNA, 2985 bp, Zea Mays
ctcgctttcgcattgcacacaccaccatacaccgcactgctgagtgcagattgctgacctctactacactctactctactctactcctcctagtccttgttctgtacaaacctgttttcggcgtctggctgtaccgctagccttaacccctagagccagacggaggaggcctgcggaagcgggagcggaagaggaggaggagagtgtgttcagaatttcagaagcaaagtgctgtcttgccatacccctacagtgctactagcctgtgctgctgcagagaagccaatcgaggcggggcactcgttcctccccgttacaaggagaggaggaagatttaggggcggaggaggtcacagactcacaggaaggaaagatggactcttgatccccgtcgcggtcgcggctggtttgttgtgggcaagccgaaccattttgctgctataatactcgagcagtcgattcgcggctcccggggccagaatcttgctctgagaggcggaatttgtgcgggatttgagctttctttcctccaacgaggtgccctgaggaagggagggagcgccagttctcccactgctgtagtgcgtggtttcagggaggtatgagacaatgagggaagagagcaacaagaagagcaagctctcctggtcgaaatccctcgtgaggaagtggttcaacatcaagactaagccacatgatttccgtgcggattgcgccgccgcccaagaatctttgcctccacatggaatgtaggtggtaaatccccaccgaggggattgaatcttgatgactggctccattcttcaccttcagctgatatctatgtgttaggatttcaagaaattgttcctttgaatgctggaaatgttcttggcacagaagataatctcccagcgaaaaaatgggtatcccttgtcaggaggacactgaataagaatcctggttcatgctgttatggtggctatcgcacgccatctcctgtccctgatccagttgtagaacaaaatgctgattttgagggatcgtcgagaaggctggacagtttatcctatttgcatcgtcggtcgttcaaccttagccggagtttaagagttgaaggggatcatatgctaccacaccaaaggttggatcgtaggttcagtgtctgtgacccagttagcttgggaggcaggccaagtgattttgataggaacttcccattcatgggatcaccggatgatcattgtatcgaggaggatacaagcaatgaagcatattttccacccttcccatatggctatggtgcctccgcgcctatggaagaaaatgatcatcagacaaatacatctaggtattgtttggttgccagcaagcaaatggtcggtatatttctcaccgtttgggtgcgcagcgaaataagaaatgatgtgagaaacctgaaagtttcttgcgtgggtagaggactaatgggttatcttggaaataagggttctatatccataagcatgtctttgcaccacacaaccttttgttttgtctgctgtcatctgacctctggtgaaaaggagggagatgaactacggagaaactctgacgttatggaaattctaagaaagactagatttccacaggtccgtggtgctgctgatgtcaagtcaccagaaacgattcttgagcatgaccgtatcatttggcttggggatttgaattatcggattgccctatcgtactgctcagctaaagctcttgtcgaaatgcataactggaagcaacttttagagaaagatcagcttcggatagaacgaagatgcgggcgtgttttccatggttggaaagaaggcaggatttattttcctccgacatataagtactcattcaactcggatcgttattctggtgtgcggcccaaagaaaagcggagaacacccgcttggtgcgatcgcattctgtggtacggtaatggcctctcgcagctgtcctacgttcgcggagagtctcgcttctctgaccacagaccagtctacagtattttcatggctgaggttgagagtgcccgccacagaagaaggaacatgggctattccagctctagaatcgaggtggaagagcttttgccgtatccatacagctccggagaaatgaagttctactggtttggctgacatagggcatatggctggagcttgttttctacttcaacttaggtagtagacgtggtcgacaattctgcttgccttttttttacatgtatgccttgtatttacacagctgcgttgatgacacaggttgccgggtccttgatgaacaaacaataccttgggccatagactgcatggtcactagcttgatcagatgtaagcctggttatttttctcatctggctttcacagcttccagtcagatggttgagaagcgcaatgcacaaaactgacataaaaggatagccgggcagttttgcaactaaccgtttgccttttggacagccgtgttgaaacaaggatcggcccgcatctgtacatgtcattaaccacacagctcagaaaaaaaaaacccttctcgtccccaatttggttctctttttttaggagagttagtaaacatacatattttttctttctttgtttctccctttgcatttgggaaatctttttagaatgagattttggagtgtatcagcatgaggtgtaaaatcattgtgaatcggtaaaaggctggaatgatgcttgaaccgaactgatccgtgatcatgatctccattgctgatgagggaacagtggtgatggattgatgtgacttgggaggtttgcaaaggtgtaatcatgtgtataataacccttttatttgtttttttcctctgtccctgtggtgtagtgcctgagaagcgaaatgatgcctgcgtttgctgtgctcattgctgttaaaccttttttttctaattgtaacaggtcagagccttgcttcctggctggaaagcatggcattattcttgttatcagcttgcttgct

SEQ ID NO: 52279 - DNA, 3157 bp, Zea Mays
ctcgctttcgcattgcacacaccaccatacaccgcactgctgagtgcagattgctgacctctactacactctactctactctactcctcctagtccttgttctgtacaaacctgttttcggcgtctggctgtaccgctagccttaacccctagagccagacggaggaggcctgcggaagcgggagcggaagaggaggaggagagtgtgttcagaatttcagaagcaaagtgctgtcttgccatacccctacagtgctactagcctgtgctgctgcagagaagccaatcgaggcggggcactcgttcctccccgttacaaggagaggaggaagatttaggggcggaggaggtcacagactcacaggaaggaaagatggactcttgatccccgtcgcggtcgcggctggtttgttgtgggcaagccgaaccattttgctgctataatactcgagcagtcgattcgcggctcccggggccagaatcttgctctgagaggcggaatttgtgcgggatttgagctttctttcctccaacgaggtgccctgaggaagggagggagcgccagttctcccactgctgtagtgcgtggtttcagggaggtatgagacaatgagggaagagagcaacaagaagagcaagctctcctggtcgaaatccctcgtgaggaagtggttcaacatcaagactaagccacatgatttccgtgcggattgcgccgccgcccaagggagggtcgggcatgatgatggcgaatggaggaccagctgctcagagcgggaggcaggcgccgccaagaaaagcagaactgaccgaccgtcgaagcggagtagtatggatcgaatcagaggaggaaaaaacgacttcgatgcggcatgcctcacagaagttcagaactacagaatctttgcctccacatggaatgtaggtggtaaatccccaccgaggggattgaatcttgatgactggctccattcttcaccttcagctgatatctatgtgttaggatttcaagaaattgttcctttgaatgctggaaatgttcttggcacagaagataatctcccagcgaaaaaatgggtatcccttgtcaggaggacactgaataagaatcctggttcatgctgttatggtggctatcgcacgccatctcctgtccctgatccagttgtagaacaaaatgctgattttgagggatcgtcgagaaggctggacagtttatcctatttgcatcgtcggtcgttcaaccttagccggagtttaagagttgaaggggatcatatgctaccacaccaaaggttggatcgtaggttcagtgtctgtgacccagttagcttgggaggcaggccaagtgattttgataggaacttcccattcatgggatcaccggatgatcattgtatcgaggaggatacaagcaatgaagcatattttccacccttcccatatggctatggtgcctccgcgcctatggaagaaaatgatcatcagacaaatacatctaggtattgtttggttgccagcaagcaaatggtcggtatatttctcaccgtttgggtgcgcagcgaaataagaaatgatgtgagaaacctgaaagtttcttgcgtgggtagaggactaatgggttatcttggaaataagggttctatatccataagcatgtctttgcaccacacaaccttttgttttgtctgctgtcatctgacctctggtgaaaaggagggagatgaactacggagaaactctgacgttatggaaattctaagaaagactagatttccacaggtccgtggtgctgctgatgtcaagtcaccagaaacgattcttgagcatgaccgtatcatttggcttggggatttgaattatcggattgccctatcgtactgctcagctaaagctcttgtcgaaatgcataactggaagcaacttttagagaaagatcagcttcggatagaacgaagatgcgggcgtgttttccatggttggaaagaaggcaggatttattttcctccgacatataagtactcattcaactcggatcgttattctggtgtgcggcccaaagaaaagcggagaacacccgcttggtgcgatcgcattctgtggtacggtaatggcctctcgcagctgtcctacgttcgcggagagtctcgcttctctgaccacagaccagtctacagtattttcatggctgaggttgagagtgcccgccacagaagaaggaacatgggctattccagctctagaatcgaggtggaagagcttttgccgtatccatacagctccggagaaatgaagttctactggtttggctgacatagggcatatggctggagcttgttttctacttcaacttaggtagtagacgtggtcgacaattctgcttgccttttttttacatgtatgccttgtatttacacagctgcgttgatgacacaggttgccgggtccttgatgaacaaacaataccttgggccatagactgcatggtcactagcttgatcagatgtaagcctggttatttttctcatctggctttcacagcttccagtcagatggttgagaagcgcaatgcacaaaactgacataaaaggatagccgggcagttttgcaactaaccgtttgccttttggacagccgtgttgaaacaaggatcggcccgcatctgtacatgtcattaaccacacagctcagaaaaaaaaaacccttctcgtccccaatttggttctctttttttaggagagttagtaaacatacatattttttctttctttgtttctccctttgcatttgggaaatctttttagaatgagattttggagtgtatcagcatgaggtgtaaaatcattgtgaatcggtaaaaggctggaatgatgcttgaaccgaactgatccgtgatcatgatctccattgctgatgagggaacagtggtgatggattgatgtgacttgggaggtttgcaaaggtgtaatcatgtgtataataacccttttatttgtttttttcctctgtccctgtggtgtagtgcctgagaagcgaaatgatgcctgcgtttgctgtgctcattgctgttaaaccttttttttctaattgtaacaggtcagagccttgcttcctggctggaaagcatggcattattcttgttatcagcttgcttgct

SEQ ID NO: 52280 - DNA, 3039 bp, Zea Mays
tttgcatctcgctttcgcattgcacacaccaccatacaccgcactgctgagtgcagattgctgacctctactacactctactctactctactcctcctagtccttgttctgtacaaacctgttttcggcgtctggctgtaccgctagccttaacccctagagccagacggaggaggcctgcggaagcgggagcggaagaggaggaggagagtgtgttcagaatttcagaagcaaagtgctgtcttgccatacccctacagtgctactagcctgtgctgctgcagagaagccaatcgaggcggggcactcgttcctccccgttacaaggagaggaggaagatttaggggcggaggaggtcacagactcacaggaaggaaagatggactcttgatccccgtcgcggtcgcggctggtttgttgtgggcaagccgaaccattttgctgctataatactcgagcagtcgattcgcggctcccggggccagaatcttgctctgagaggcggaatttgtgcgggatttgagctttctttcctccaacgaggtgccctgaggaagggagggagcgccagttctcccactgctgtagtgcgtggtttcagggaggtatgagacaatgagggaagagagcaacaagaagagcaagctctcctggtcgaaatccctcgtgaggaagtggttcaacatcaagactaagccacatgatttccgtgcggattgcgccgccgcccaagggagggtcgggcatgatgatggcgaatggaggaccagctgctcagagcgggaggcaggcgccgccaagaaaagcagaactgaccgaccgtcgaagcggagtagtatggatcgaatcagaggaggaaaaaacgacttcgatgcggcatgcctcacagaagttcagaactacagaatctttgcctccacatggaatgtaggtggtaaatccccaccgaggggattgaatcttgatgactggctccattcttcaccttcagctgatatctatgtgttaggatttcaagaaattgttcctttgaatgctggaaatgttcttggcacagaagataatctcccagcgaaaaaatgggtatcccttgtcaggaggacactgaataagaatcctggttcatgctgttatggtggctatcgcacgccatctcctgtccctgatccagttgtagaacaaaatgctgattttgagggatcgtcgagaaggctggacagtttatcctatttgcatcgtcggtcgttcaaccttagccggagtttaagagttgaaggggatcatatgctaccacaccaaaggttggatcgtaggttcagtgtctgtgacccagttagcttgggaggcaggccaagtgattttgataggaacttcccattcatgggatcaccggatgatcattgtatcgaggaggatacaagcaatgaagcatattttccacccttcccatatggctatggtgcctccgcgcctatggaagaaaatgatcatcagacaaatacatctaggtattgtttggttgccagcaagcaaatggtcggtatatttctcaccgtttgggtgcgcagcgaaataagaaatgatgtgagaaacctgaaagtttcttgcgtgggtagaggactaatgggttatcttggaaataagggttctatatccataagcatgtctttgcaccacacaaccttttgttttgtctgctgtcatctgacctctggtgaaaaggagggagatgaactacggagaaactctgacgttatggaaattctaagaaagactagatttccacaggtccgtggtgctgctgatgtcaagtcaccagaaacgattcttgagcatgaccgtatcatttggcttggggatttgaattatcggattgccctatcgtactgctcagctaaagctcttgtcgaaatgcataactggaagcaacttttagagaaagatcagcttcggatagaacgaagatgcgggcgtgttttccatggttggaaagaaggcaggatttattttcctccgacatataagtactcattcaactcggatcgttattctggtgtgcggcccaaagaaaagcggagaacacccgcttggtgcgatcgcattctgtggtacggtaatggcctctcgcagctgtcctacgttcgcggagagtctcgcttctctgaccacagaccagtctacagtattttcatggctgaggttgagagtgcccgccacagaagaaggaacatgggctattccagctctagaatcgaggtggaagagcttttgccgtatccatacagctccggagaaatgaagttctactggtttggctgacatagggcatatggctggagcttgttttctacttcaacttaggttgccgggtccttgatgaacaaacaataccttgggccatagactgcatggtcactagcttgatcagatgtaagcctggttatttttctcatctggctttcacagcttccagtcagatggttgagaagcgcaatgcacaaaactgacataaaagccgtgttgaaacaaggatcggcccgcatctgtacatgtcattaaccacacagctcagaaaaaaaaaacccttctcgtccccaatttggttctctttttttaggagagttagtaaacatacatattttttctttctttgtttctccctttgcatttgggaaatctttttagaatgagattttggagtgtatcagcatgaggtgtaaaatcattgtgaatcggtaaaaggctggaatgatgcttgaaccgaactgatccgtgatcatgatctccattgctgatgagggaacagtggtgatggattgatgtgacttgggaggtttgcaaaggtgtaatcatgtgtataataacccttttatttgtttttttcctctgtccctgtggtgtagtgcctgagaagcgaaatgatgcctgcgtttgctgtgctcattgctgttaaaccttttttttctaattgtaacaggtcagagccttgcttcctggctggaaagcatggcattattcttgttatcagcttgcttgct

SEQ ID NO: 52281 - DNA, 732 bp, Zea Mays
gtgcattttagccaaccatatcggcacgttcaagctgactctgcaatttacagaagattaccccaacaaacctccgactgttcggtttgtttcgaggatgtttcacccaaacatttatgcggatggaagcatctgtttggacatcctacaaaaccagtggagtcctatatacgatgttgcggcaatattgacctctattcagtccctgctgtgtgacccaaacccaaattctcctgccaactctgaagcagccagaatgttcagcgagaacaagcgtgagtacaaccgcaaagttcgtgaggttgtggagcagagctggacagctgattaaaactttagagctggacagccgattaaaactttattggcttcaccagatggtgcagataagcatccacctttcctaggttcctaggtctgttttattgacttaaccgttaaaaatccccaggtatcgttgtgttcttgtggttcagtcccctgttgtattgctgcctgccggttttcctaatatagtggtgaacggtttcatgaacttggatattggtgtgtatgcaaaagatatagcaagtcaagttgttgctaggtttgcagaaaccgcatcctcctttctcgctgcacgaacggcctctcacgaggtgctctcctgtggaggctgttcatcctgtttctgtgcttctggtaactggtaagtcatgaatgaaagctttagcagttgtacgtgatcacgaa

SEQ ID NO: 52282 - DNA, 854 bp, Zea Mays
gtcgtgtcatctcttttataccatttaccaagtaagtaaaaagcttgatccgtaacgcctttattttgttctttaaatgctaatggttgtcacaagccaccaaagggaagcgtgtctgattggcatattgtttggtcaactctgggcacgttcaagctgactctgcaatttacagaagattaccccaacaaacctccgactgttcggtttgtttcgaggatgtttcacccaaacatttatgcggatggaagcatctgtttggacatcctacaaaaccagtggagtcctatatacgatgttgcggcaatattgacctctattcagtccctgctgtgtgacccaaacccaaattctcctgccaactctgaagcagccagaatgttcagcgagaacaagcgtgagtacaaccgcaaagttcgtgaggttgtggagcagagctggacagctgattaaaactttagagctggacagccgattaaaactttattggcttcaccagatggtgcagataagcatccacctttcctaggttcctaggtctgttttattgacttaaccgttaaaaatccccaggtatcgttgtgttcttgtggttcagtcccctgttgtattgctgcctgccggttttcctaatatagtggtgaacggtttcatgaacttggatattggtgtgtatgcaaaagatatagcaagtcaagttgttgctaggtttgcagaaaccgcatcctcctttctcgctgcacgaacggcctctcacgaggtgctctcctgtggaggctgttcatcctgtttctgtgcttctggtaactggtaagtcatgaatgaaagctttagcagttgtacgtgatcacgaa

SEQ ID NO: 52283 - DNA, 732 bp, Zea Mays
aacgccaggacccacaccaccgcaccatcagactcaggaggcgacgcgcgcttggaggtaacgcgatcacggccgctcgggtgaaggcctgaagggggcacgtcacgtcacgccgctcgcgccgcgtcgttttcgcacccggggaccaggctcgggcgctcggctccgtcctcccccacatccacctgcccgtttctcgctccgaagcttctcctctcgcgtctcgtaccaggtcaggaggggagggagggagacgggagaaccagggagcggaggcgtgcgtgctgcggcctgcggcctgcaggaccagagatcggggactgagctagggtctgggactgggaggcggagatgtcgacgccggcgaggaagcgcctgatgcgggacttcaagcggttgcagcaggacccgcccgccggcatcagcggcgcgccgcacgacaacaacatcatgctctggaacgccgtcatattcgggccggatgacacgccgtgggacggaggtgaacatcaaccataatatagtttgcggcacgttcaagctgactctgcaatttacagaagattaccccaacaaacctccgactgttcggtttgtttcgaggatgtttcacccaaacatttatgcggatggaagcatctgtttggacatcctacaaaaccagtggagtcctatatacgatgttgcggcaatattgacctctattcagaaagctgaaagctcatgcatttg

SEQ ID NO: 52284 - DNA, 1217 bp, Zea Mays
gttaatagtgttacttataagggaaggtaccagtgtcagactggaacaaggacacttgagatagaattggcgatgttgtcaagtgctcaccatgtagagatgaaccccagtgatgctggctttcaggacaggtatgttgtccaggagatcattaaagagatggccaagaacaggccaattgatgccaaaggaaggagagcatttaaagtccttgtgttaaatgaagttgacaagctctcaagagaagcccagcattccctccgtaggactatggagaagtatagctcatcatgcagactgatcctatgctgtaacagctcctcaaaagtgacagaggctgtaagatcccgttgcttaaatgtgcgagtaaacgcacccagtgaagatcagattgtccaagttctagaattcattgggaagaaagaaaacctgattcttccagctggatttgctgctcgtatcgcagcacaatcaaaccgtaatctgagacgtgctatactgttttttgagacttgcaaagttcaacaatacccatttacatcaaatcaagtggcgcctcctcttgattgggagcaatacgtgtctgaaatagccacggatatactgacagaacaaagccctaaaaggctatttgatgtacgccagaaattctatgaattactcgtcaattgtatcccacccgaaagtattttgaagaagttgctagcagagttactgaggaagttagatgctgatctgaaatatgaaatctgtcgctgggccgcacactacgagcacaagatgcgccttggatcaaaggctatttttcatctggaagctttcgtggccaagttcatgagcatttacaaggagttcctggtggctacatttggttgagcaaaacctcgagctacaattagggttgtcacgttctgtcaggggctatcgcattgtatcggtatagttttgtactaatctcgtcagcgactatccttctgtcaacccgggtgacccctctgacttcatcatagcgtctgcttgcacgttgacgttcgtgacgacattatcagacgtcattacgcttggttaacaaacagcctgaaagcgggacaggctcggaagttagaaataacagcctgtgaagacgtagacgttgatgacgacacgataagaaatcatttcgctcggttaaagagaatatccttaatgtgcggcagactcagaattcagaaccaaat

SEQ ID NO: 52285 - DNA, 1673 bp, Zea Mays
aaaacccttgtctgccaactgctgtctcgcaagtcgcaacggctgagtgcgcgcccatcagtcccgggttcccgccacacccctcccatccccctctcaatcctgtccccaaatctctctcttctctctagcggcgaggcgaggcggtgaagacgagcgagcggcgaggatgttgtgggtagacaagtaccggccgaaaaccctagacaaggtcaccgtccacgaccaggttgcgcggaacctcagaaagtgtcggagcaggattgcccgcacctgctgttctatgggccgtcggggtccgggaagaaaaccctaatcctcgcgctcatcaagcagatgtttggcgccggcgcggagaaggttaagctggagaataagacatggaaaattgatactggaacaaggacacttgagatagaattggcgatgttgtcaagtgctcaccatgtagagatgaaccccagtgatgctggctttcaggacaggtatgttgtccaggagatcattaaagagatggccaagaacaggccaattgatgccaaaggaaggagagcatttaaagtccttgtgttaaatgaagttgacaagctctcaagagaagcccagcattccctccgtaggactatggagaagtatagctcatcatgcagactgatcctatgctgtaacagctcctcaaaagtgacagaggctgtaagatcccgttgcttaaatgtgcgagtaaacgcacccagtgaagatcagattgtccaagttctagaattcattgggaagaaagaaaacctgattcttccagctggatttgctgctcgtatcgcagcacaatcaaaccgtaatctgagacgtgctatactgttttttgagacttgcaaagttcaacaatacccatttacatcaaatcaagtggcgcctcctcttgattgggagcaatacgtgtctgaaatagccacggatatactgacagaacaaagccctaaaagtttttttcgaagggattaaactaggcaccaaaatttgccacgatgaggacttgaacttgggaggtttggatatactttcacaccctcaaccaactgaaataggctatttgatgtacgccagaaattctatgaattactcgtcaattgtatcccacccgaaagtattttgaagaagttgctagcagagttactgaggaagttagatgctgatctgaaatatgaaatctgtcgctgggccgcacactacgagcacaagatgcgccttggatcaaaggctatttttcatctggaagctttcgtggccaagttcatgagcatttacaaggagttcctggtggctacatttggttgagcaaaacctcgagctacaattagggttgtcacgttctgtcaggggctatcgcattgtatcggtatagttttgtactaatctcgtcagcgactatccttctgtcaacccgggtgacccctctgacttcatcatagcgtctgcttgcacgttgacgttcgtgacgacattatcagacgtcattacgcttggttaacaaacagcctgaaagcgggacaggctcggaagttagaaataacagcctgtgaagacgtagacgttgatgacgacacgataagaaatcatttcgctcggttaaagagaatatccttaatgtgcggcagactcagaattcagaaccaaat

SEQ ID NO: 52286 - DNA, 1690 bp, Zea Mays
agcatcggacgaaaccaagctcacggcccacctcacttcgttggtgcaggcccggcatcagggttactgacaaatactagaacacaactaccgtcaaagagatagccggaaagcccgcaaaaacccttgtctgccaactgctgtctcgcaagtcgcaacggctgagtgcgcgcccatcagtcccgggttcccgccacacccctcccatccccctctcaatcctgtccccaaatctctctcttctctctagcggcgaggcgaggcggtgaagacgagcgagcggcgaggatgttgtgggtagacaagtaccggccgaaaaccctagacaaggtcaccgtccacgaccaggttgcgcggaacctcagaaagtgtcggagcaggattgcccgcacctgctgttctatgggccgtcggggtccgggaagaaaaccctaatcctcgcgctcatcaagcagatgtttggcgccggcgcggagaaggttaagctggagaataagacatggaaaattgatactggaacaaggacacttgagatagaattggcgatgttgtcaagtgctcaccatgtagagatgaaccccagtgatgctggctttcaggacaggtatgttgtccaggagatcattaaagagatggccaagaacaggccaattgatgccaaaggaaggagagcatttaaagtccttgtgttaaatgaagttgacaagctctcaagagaagcccagcattccctccgtaggactatggagaagtatagctcatcatgcagactgatcctatgctgtaacagctcctcaaaagtgacagaggctgtaagatcccgttgcttaaatgtgcgagtaaacgcacccagtgaagatcagattgtccaagttctagaattcattgggaagaaagaaaacctgattcttccagctggatttgctgctcgtatcgcagcacaatcaaaccgtaatctgagacgtgctatactgttttttgagacttgcaaagttcaacaatacccatttacatcaaatcaagtggcgcctcctcttgattgggagcaatacgtgtctgaaatagccacggatatactgacagaacaaagccctaaaaggctatttgatgtacgccagaaattctatgaattactcgtcaattgtatcccacccgaaagtattttgaagaagttgctagcagagttactgaggaagttagatgctgatctgaaatatgaaatctgtcgctgggccgcacactacgagcacaagatgcgccttggatcaaaggctatttttcatctggaagctttcgtggccaagttcatgagcatttacaaggagttcctggtggctacatttggttgagcaaaacctcgagctacaattagggttgtcacgttctgtcaggggctatcgcattgtatcggtatagttttgtactaatctcgtcagcgactatccttctgtcaacccgggtgacccctctgacttcatcatagcgtctgcttgcacgttgacgttcgtgacgacattatcagacgtcattacgcttggttaacaaacagcctgaaagcgggacaggctcggaagttagaaataacagcctgtgaagacgtagacgttgatgacgacacgataagaaatcatttcgctcggttaaagagaatatccttaatgtgcggcagactcagaattcagaaccaaat

SEQ ID NO: 52287 - DNA, 761 bp, Zea Mays
ggttgcagttgcagggttcaggcgttggcggccgaaatcctccgccacggccatgccaaacattgggcctaacccaacggcagcggcgatccggcaacacccacacagcatcagctctctcgtgcgtcatgggcaagagcacacagctacacatcccgcgaaatcaacctacaggttacagcgcgcggggagtgtgaggcaaaacatagccgggagagaagttatcctccatccacccagcgcgcgggggagaagctgccagcgaaagtcgcgacgaggcttaacctaggtggctggtccatccaatctgaccccatatatccagaagggtgtaaaggtgccaatttgtgatggaaggtcgcaataactgagcctgaaatttcgaggaaaaaaagggttccttctttgctgcttttgctggtgttctgctgatatatgacgaagacctgaagagcaggaatttgatctaggtgctgcgggcctgccgaaaacagagtggtcttcaatctgggtgctgtgagccttgcgactgtatgtttggtttcttcgtctgcccttgggtgtgttttggcaagaaagcaggctagatggctgggactgggtggggtgggggctctcagcttcatggcgcgtccgtaagacggctgacgtcccaagaaaattggaaagggcaaccagaccagcagcctctatatgctactcgctatttcaaatgtacatccatatgagcacgtcacggcacggcctgcggttgcatgtta

SEQ ID NO: 52288 - DNA, 583 bp, Zea Mays
gttatgggagatctacagggaagacattgaagcagcatataactgcctcaaggaaaaatatggtgtagcagatgaggatataatcttatatggtcaatctgttggaagtggtccgaccattgatcttgcttcccggttgccagacttgcgagctgtggttttgcatagtcctattttatctggactaagagtaatatatcctgtcaagcggacgttttggtttgacatttacaagaacatcgataaaattggcttggtaaattgtccagtacttgtcattcatgtgagttctaatatccatcttaagaaaccaatgtttgttataattcagtatcatagttgctttggtagattattgctgctctgactaacataacctaatactttcttgcaccagggtacatcagatgatatcgttgactgctcccatggaaaacagctatgggagtgtggttaagtggtggtggccactgcaatctcgagctctatccagattacattaagcacttgaagaagtttgtgtcaagcgttagcaaaaaagcatcatcgaaacctgacccaaaagaaacaacgtcaaaggatg

SEQ ID NO: 52289 - DNA, 7627 bp, Zea Mays
atgtggacggctccctctgcctctccagggcagccccagcccaccagttcagttcgttcgtctttcggtatcacagccccttctccgtctactggcagcttgcgaatcgcgaccgctgaccgaagagcccagccacttggcacgtcgcttccagcagcttgcctgcagcgtgtttcgttggggaacaaaagcgtaagactaactgcacaattaagataaatcatgacaccgacatggcgccgaacagaggcaaggaatgcttgggtagaaagtaacaagaataaacgctagattatgccgccacagattgcctgtcaaatcagcaggacggcacccgatgccgtgtaaatattttaggcgaaagaaagctcgcagatttttttttataaaaaaaacatgtatgtaaaccaaaacgaaaaggctgattcactagtgaatgatgaagatgagatgcaccaaagaatgccattgagaaaaaatctccctgatcaggaaagcattggagaggattaatatggattagaggattttaacttattagggattgaaacgccctcaatctccctcaatccatatggattggggtagaaccgaacaagccccaactgggcctgcctaatgagttttaggtccctgcccttcagacagtgtcctagaaggtttcggtattattccggaccccaagtgcccagcctcgggtagccatctgatttcacaacaatttaaccaaggcctacaaaaggtttaagggtctggattgaagtgagctgtccaattcaacttaggcttgttcggtttcatcagaatccatatggatttgaagggattgggtgggttccaatccatagcaagtcaaaatgcttcattttttttttccaatcccttccaatattgccgtaaggcataggaaaaaccgaacaaggcatggcatgcttttgaggttttccctctctagcacagtgcagatttttgtttctgctcatctatcagtttctgcagtttgtaatactaccaacgattgctattttcccctacaaggcacacatttcggcctagccctacctctacccataaccaataccactcgacctaaactatgaaaacaaggacagcaaggacgtgactaaggcttcggcatgagacgtccacctaaactatgaaaaagaagaaattgttgctcatgggtcatgggttaaaggacagtgttggcttgcagtcccaggaacggtatcagccatcaaagagatgttcatgaagacaaccagccaccagcatatgctcaactaccacttgcttcacttcacctccatgttttcacgatggcctcacgttggccaatactgaggttgagcatctgccacacatcgtttaaaaaacctacggaaactacagtagttttagttcagtgatggtagaaaatgtccagacgggcaccgacaggcccatatgccttcctccaaatccaatacggccatgtcaataggacagtaataaggaaaccgaactgctgtttctattttatgccaacgcgttcgtctttattctactacccaggactcatcacccaccaacaccaactgataaataaattattaaatcctggacgctaggatgggaaccctcaccggcaacattctgaccactagatgaacttgcattgattgatgctagcgattagttgtgaaattaatctacacacctccccaatcttcttctttttttgatgtaaatttcggtgctattattgaaaaaaaggacaatgcggtggtgggatacttttgagcaatctgtaatggtacgagtaggacacaaaggagcaaaggtccagatctgaaggtaggtaggtactaacctcgccggagcttgatcttcttcttgtgggtgacgatggcgggaggcttcctgttggggtcggcggtctgcgtggccttggcgtcgtccggcgcgaagagcacggcgtcgatgccctgcacggagatcctgccgtcggtgtagatgtccgggtcgaagaggtaggcggagccctcgccctggccgaacttgacggagccgtcggcctcccgcgcgacgaccttgtgcggcaggcgcagggtgtcgtagcgcaccttgccgaagcggcgcacggcgttgtacatggactcctcggtctggtactcggggatcatgtggtagtagaggatgttctcgggcgacccgggctcgctgagctggtccgtggtgaggcgcgccatggcctcgtcgttgggggcgagcacggtgagcacgtagccctcggagacgaggcggcccatctcggtggcgagggaggtgaggttgacgaggatgtcggccagctcgttgtagccgccgtagaggagcagcgtctggatgaagtccttcacctggctgtgcccgtcgaagtggtgcttcccggagcccgggccgggcgccggcgcgggggcgatggagggcccgggcgccatggcgtcccagacggggagcacgggcggcgcgccggggggaaccggcggcgcgggcttcttgaggcggtgcgtcctggggtcgacctcgggcgcgcccgtgggcagcacggccgagatcgccgcgaggctgcggcgccggttgaagtcctcctgcacggagcgcgggaccaggaggcgctcgatgccgtggatgacgccgtcgggccggagcacggcgtccgggcgcgtgacggcggcgtggccgacgcgcatgccgccggcgccggccgaggcgagctcgacgtcctcgccggagagcgtggggtgcggggccgcgggccacgagccggagggcaggcgcgagggcaggacgtggtagagcagcagcgcctgcagcgacctgaggttgcgcggctccagcaggaagcgcttgaactccgggtccaggtcccgctccagcgcctcgttccgcggcgcgaagatggtgacgttgtgcttcccgacggcgtcctccagcgtctgcaggagcagcgccttctccaccagctccgcaagctcggtgtagtgcgagtcgagcagcgcgaccagcacggagttggagttgaccccgaccgccgcgccggcgccggcgccggagccggagccggagccggcggcgggcaatgtgggttcctgcggagccgtctcctcggtcaccgcccccgttccagccagcagcaggaggaacaagacgacggcgccgttcaccggcgcgcccatggctgcctgcgctgcgcgcgcggcctctgctcccggcggactgctctgccgccgccgccgccgccgctgctccgtggcgcgtgttgcgctgccctccccaggctctatagccctctcgttcccagcaaggtcgatttgttggctggggagtggggaagatagcgagagaatggaggaaggagaggatagtaggctgctatggaggtgggtggtgtgagcctttcttttgggtgcgttttttccactttgtatgtagagagagagagagagagagagagagagagagagagagaaagcagagtgaggtgtgtgtgagagagcttgcttataagcgaagagagagagagacagagaggtggggggaagcacagccaaagccgccgacggaaggagggagagagacgtgagacgcggtgtggtgggtggggccgcgtgggcgggcagtgcgagggcacaggctggcatctgctgaaccgcggaggctagtgtcggtgtgcgcaaccgcagcagcgcacacaaggttcgcgacgcaatgttcagggcgggggcgtgtccgtgcctcgatgcgtgcgacgagacgaggcgggggcggagcacgctagtactcatttcgatcggcatacgtgtgagattttttgggctgaaaagcctgcggtcaaaagtataatcgcagcttgtgctacgtatttacacgccaagtaccgtgacagtatgagtctaccagttcttagtacatgctgagacagttcaccctgcttgctggtctaaaaaaacggagtcggtttgctttttgctttggtggccaatccgtcggcgctgcgacttggggccgggggcggggggccaaaagaagacgacgaccgatcaagcgatcgagtgcgttccgattcctctcgtgagaaaacaaacgcgtttgggtaaggtgcagcgtggcagcaagagcttcttttccttgctagagtatgatatcatcatcatcatgttttgttattgttgaggtcagacaagactactggaagagccttggctgcggcatgtgcattgcgtttcgccacggagcaagtaattgataagacgccctaactactgctggccactctctctctctctccctctgcaactactgttactatagtgtatgctttggcctcgtttacctgcgccaagttgcgatagcaacaagtcaacgaggaatgaggcgcaagatcaggatcaggccagagccgcagaccggcgatgcgctatcatcaacttgggtttaatacgtacagaattctactatttttacgatattttttatctttataaattatagcggcataacttcgcccatttgactatttttttaacggaccacgcacgctagagctccattggttcacagcccagcagactcttcaccgaccaccaaacaccaacaccgacatgcctgacgccttgcttgtgcagtgtaggtagctgtactgtaccgcctagcgcgtacagagaagcaagcaacagtcgaggactagctgctcaccaccaaacctactagtagcatcgaacggagggaggagggatggcgaggaagaggccgggtcgtttcgttgcgggccgggggtcgtgtccatccgccgccgttggcatctcgcggcacgacgggccacggactccctccatctagggctggaaaaaaagctcgaggctcgcgagccggctcgggctcgatcaggctcggctcggctcggtgaggctcgcgagcctaaacgagcccgagccgagcctaattctgcggctcgctacactaacgagccgagccgagccggctcggtgaggctcgcgagccggctcgaggctcggtccaaactactgcttactcgaatctccgttgaccagtgtgtaattgtgctgttttggtcacaactcacaaggaactagagtgcagggacataattttttattacatggaacatattgtgcttcaaatttgagctaatgactataattaatgttgttgagtacttgagtgtacaggctcgcgagccgagccgagccggctcgcgagcctatatcgagccgagccgagcctcattaccgagctcggtaaatgaccgagccgagcctggcaggctcggctcggctcatttccagccctacctccatccacgtctccttccgcgcgcaggccgtgtcgtcctcgtgtctgtcacgctcgctactaaccgcgctggctgtgttgcggattgtcactggcggcgcacctttgcgcgctgtctggctccatccctatacacattgccccgtctctggcgcttgcacgtgctcttctactacttgcctgcttcgaggaattcgagatgggctggccacgtgacaaggccgttttgcctccgtgccgtcaaacctctgcttcatctagccttgcatgctctaagcgcacgttgagaaagctctatcattagatccaccaaaattaggcataattttttttttaaagttgaacatctctaactctatcagctacaccgttggacctccttcgttaaataattccatacactcatcttagaatcaataaattgatggagcactccaactacatataagtttaatgtagtatataaaagttatctaccatataagggggtgtttggttacaccccgctaaaatttagcctctgtcccatcaaatgtttgaacctccgttccgggtattaaatgtagtcggattataaaactaatttgtcagccgaagattaaaagacgagacgaatctagtccagttggttggatctatatttcatactcctatttaaaagtcaaacgcttgatgtgacccgggctaaactttagcagaagcaaccaaacaccccttaactctacaaagaaaaattggtttcttctttcttttctagtgcttctttctcgtcgtgatacaactatgactgtcagtcacgctcgcgcagcctccaatttgcctagtcgggggcagccattctcatcaagccctccatgtttgtttactgatggcaatgcggaattcttgtggggaatagctccatatcctcgtccacacgacgaaaaatctcgacgaaaattccaacgaacaattgtggtgggcatttcttccccatcactatttctcgcggggatacatcctttgttattaatgtaaaaattatcacttatacatattgttagatgtaagaaattattatgcttacatcaaaatgaacacatttgtataatgagtgatttcttgacaagttaattatttatttttatcattaagtagtacatgaaaacatcgtcacgtacaagtttaacgggtcctcatggagaacggggatggagaatgcttcccgtccctgtttaccgggaaattttttccctgtttacatccctatgaggagaatattctacatccccgttctctaatagaggaattcctcacggagaatcgaggatcggggcccattgttatctctatccatagccagataacgtttacgggccagttttgaaacttaaattctcttgtagtccctgtcttttttttcccgggatgagtaatccatgggataccaattgaattatacatttagttcttcatgtgaggttttcttccttgagtttgactcctcttggttacaaactaccccttaaaggtttgttcggttaaaggtggattgagagtgataaaatctcttcttatttaaaattgaatagaatgggattgaatcccctcaatcttctctaatccatatgcaaccgaacatgctctaaagagattctctctttggaccctcacaactctcacccacataggattcaaatccattctaaatcacatacgatatctaagaacatgcataaaggtggataagagaccaccaaaaccaagtgaaaaatgacagctcgaaggtcatagtgcatgactgattattgatcttatatttttttctttacatttatttagattaatcaatgagtagtaaaaggatgtaggatattatgcacaatatgatccgaacgtctctaaattgtctagtgtagtttctgatcatgctcatgttcaacacaccactcgtctacgctcctgctctctctactgactttcttctttttgacactttacgtacctcgttgaccgtctacaatgacaaaggtggttaagaaatagattgagtataatctctaaagatgacatgagtttttgttggaggctttgtgggctcgtcgcatctctagacatggagctatcaaaattactccttttgagctagtttatgcgcaagggaccgattatttgtcaaaaatggatttggagacatacaaacttgcaaagaaaaatgatttatttgtgttatgtaacatgatatgatgatggataatatggacgaggtgactgacaagacaatacaaactttgaagtatagtgagaagga

SEQ ID NO: 52290 - DNA, 2225 bp, Zea Mays
gtcaaactcaacagctaggcacccacgagtagccagccacccaatcattgccccccaactgcgcgtacccgtccccgcctcctcctggatggatctcttttttgttcgcttctccgcccgtcgcgtccacactccccctcacgtagtgcgagactgcgagggatgatcacgcgtttccacaccatcagctcctgctgcccttttgtcttcccctctggatgctctcgtcgtcatcacttgttcttcttcgagctaccagctgcctatcatggtcatcatggtcgagctgctgcccccacttgcctctctaatcctcagtcctctgtagagctggtcctcctacccctcactttgccttgagcaatttggtttctagcatctgtggggtggcttgtgggtggtcgccttggactgctccttcctccacctgccgcgccggcagggcgacgaggtccaaaagcctggtggggctcatcatcaagaacaccgaagcggcgagagtggcatgggatctgatccgaggcggagctcgaggagctgaggggctgtacgtgctcttggatccggtagagattccgtgccctcgtgttcgtccccggccgccgcgatggggaacacgtgcgtcggccccagcatcaccatgaacggcttcttccagtccgtgtccacggcgctgtggaagacgccgcaggacagcgacctgttcgaccggatcgtgcggaggggccactacaccgagaggaaggccgccgagctcgcccgcgtcatcgtcggcgtcgtggaggcctgccactccatgggcgtcatgcaccgggacctcaagcccgagaacttcctcttcgctgaccactcggaggaggccgctctcaagaccattgacttcggactctccatcttctttcgccctggccaaatcttcaccgacgtcgtgggcagcccttactacgtggcgccggaggtactgaagaagagatacgggccagaggcggacgtctggagcgctggcgtaatcatctacatcctgctgtgcggagtgccgccattctgggcagagaacgagcagggcatattcgaggaggttctgcacgggaggctggacttcgagtcggagccgtggcccagcatctccgacggcgccaaggatctcgtgaggaggatgcttgtcagggacccgaggaagagactgaccgctcacgaagttctacggcatccgtgggttcaggtcggtggagtggctcctgacaggccgctggactcggccgttctgtctcgcatgaagcagttctcggctatgaataagctgaagaagatggctcttagggtgatcgccgagaacctgtcggaggacgagatcgccgggctgagggagatgttcaagatgatcgacgcggacaacagcgggcagatcacgttcgaggagctcaaggttgggctggagaaggtgggcgccaacctgcaggagtcggagatctacgcgctcatgcaagccgcggacgtggacaacaacggcacgatcgactacggcgagttcatcgcggccacgctgcacctgaacaaggtggagcgggaggaccacctgttcgcggcgttccagtacttcgacaaggacggcagcggctacatcaccgccgacgagctgcaggtggcgtgcgaggagttcggcctgggcgacgtccagctggaggacttgatcggggaagtggaccaggacaacgacgggcgcatagactacaacgagttcgtggcgatgatgcagaagccgacggtgggggtgctcccgaagaaggccgacctgcagaacagcttcagtatcgggttcagggaggcgctcaggatggcctagacctctctgtctctgctcccctgctgcctgcgtgtaggtgtagatgattgaattgagtgcatgtcagtgcagttgctgtagagaccaccgtagcatagagagctgatgagatgcgagttgaggcgggccaggagacgtgtacatgtgccatagtccatagccatacaggcggccctgcagcggtttggctgcttggttccaaacggttctgtttcatgtcgcgtgcactggagcacatgtgccatatctgcctgctgctgctactgctatatgccgtgcacgtgcacgtcggtgacctgaaacctggctgtccgccggccaccgagctctaacggaattctgccatgctctccggccaccgagcccaacaagccgcctgaga

SEQ ID NO: 52291 - DNA, 1695 bp, Zea Mays
ctggaagcatctggaagctccggccaagaccgcccgatccgcatctgacgggacgcgcgccaccctccccaccctcctgcagcttccagagcattcactctccaccacccgtcccgacgatataaactagcccccgctctctctcctcacaaacttcccctgtcacgagagtacgagaccacgccttccgtgggatcaatcggctagggtttcggagatgttcggccgcgcgccgaagaagagcgacaacacccggtactacgagatcctgggggtttccaaggacgcgtcacaggatgacctcaagaaggcctaccgcaaggccgccatcaagaaccaccccgacaagggcggcgaccccgagaagttcaaggagctagctcaggcttatgaggtcctcagcgaccctgaaaagagagagatctatgaccagtatggcgaggatgccctcaaggagggaatgggaggcggtggtgggatgcatgatccctttgacatattccagtcattctttggtggtggaagcccttttggaggtattaggggcagaaggcaacgacggggagatgatgtggttcatcctctgaaggtttctctggaggatttgtacaatggcacatcaaagaagctctctctgtcccgcaatgtcctctgctccaagtgcaatggtaagggttccaagtctggagcttcgtcgaggtgtgctggttgtcaaggttctggcttcaaggtccaaatccggcagttgggacctggaatgattcagcaaatgcaacatccttgcaatgagtgcaagggttccggagagaccatcagcgataaggatagatgcccacaatgcaaaggtgataaagttgtgccggagaagaaagttcttgaagtggtagttgagaaaggtatgcagaatgggcagaagatcacattccctggcgaagctgatgaagcgcctgatactgccactggagatatcatctttgttctccagcagaaggagcatcccaagttcaagagaaagggcgatgacctcttctacgagcacacactgatcttgactgaatctctgtgtggcttccagtttgttctgactcacttggataacaggcagctgctgatcaaatcgaaccccggcgaagttgtgaagcctgattctttcaaggcaatcaacgatgaaggcatgcccatgtatcagaggcccttcatgaagggcaagctgtacatccacttctcggtggagttcccggactcgttgagcccggagcagtgcaagaccctggaggctgttctcccgctcaagccagtatcacagtacactgatatggagctggacgagtgcgaggagacaatgccatacgacgtgaacatcgaagaggagatgcggaggcggcagcagcagcaccaggaggcctacgatgaggatgatgatgtgccaggcggtgggcagagggtgcagtgcgcccagcagtaggcagcttgcggcaattttacctgcttgtattggcctgatgatacttcggttacaagagtgcagtattcgatctgttagttcaagttctgcgtttggggtgttagatccaccagaattagatttgttcggcaagctacgctcgaatacacgtcatgtttggagtatctttatgggtgctctaaagacgcgtatctcatagaagatatactctaaagttgtatcttatagaa

SEQ ID NO: 52292 - DNA, 1483 bp, Zea Mays
caccctcctgcagcttccagagcattcactctccaccacccgtcccgacgatataaactagcccccgctctctctcctcacaaacttcccctgtcacgagagtacgagaccacgccttccgtgggatcaatcggctagggtttcggagatgttcggccgcgcgccgaagaagagcgacaacacccggtactacgagatcctgggggtttccaaggacgcgtcacaggatgacctcaagaaggcctaccgcaaggccgccatcaagaaccaccccgacaagggcggcgaccccgagaagttcaaggagctagctcaggcttatgaggtcctcagcgaccctgaaaagagagagatctatgaccagtatggcgaggatgccctcaaggagggaatgggaggcggtggtgggatgcatgatccctttgacatattccagtcattctttggtggtggaagcccttttggaggtattaggggcagaaggcaacgacggggagatgatgtggttcatcctctgaaggtttctctggaggatttgtacaatggcacatcaaagaagctctctctgtcccgcaatgtcctctgctccaagtgcaatggtaagggttccaagtctggagcttcgtcgaggtgtgctggttgtcaaggttctggcttcaaggtccaaatccggcagttgggacctggaatgattcagcaaatgcaacatccttgcaatgagtgcaagggttccggagagaccatcagcgataaggatagatgcccacaatgcaaaggtgataaagttgtgccggagaagaaagttcttgaagtggtagttgagaaaggtatgcagaatgggcagaagatcacattccctggcgaagctgatgaagcgcctgatactgccactggagatatcatctttgttctccagcagaaggagcatcccaagttcaagagaaagggcgatgacctcttctacgagcacacactgatcttgactgaatctctgtgtggcttccagtttgttctgactcacttggataacaggcagctgctgatcaaatcgaaccccggcgaagttgtgaagcctgattctttcaaggcaatcaacgatgaaggcatgcccatgtatcagaggcccttcatgaagggcaagctgtacatccacttctcggtggagttcccggactcgttgagcccggagcagtgcaagaccctggaggctgttctcccgctcaagccagtatcacagtacactgatatggagctggacgagtgcgaggagacaatgccatacgacgtgaacatcgaagaggagatgcggaggcggcagcagcagcaccaggaggcctacgatgaggatgatgatgtgccaggcggtgggcagagggtgcagtgcgcccagcagtaggcagcttgcggttgcagatcgtgggctgagccaaaccaacttatgagttgacttagcatcgagccttctttacctcgttgggtgggc

SEQ ID NO: 52293 - DNA, 618 bp, Zea Mays
tttttttttttttgataccaaaagggagagatgtagaagataaggatgaatttgtattcaatgaagattttagtgctcctctctaccgcataaaggtaaatgcaattcaaatgaaagagacggtagaagaaaacacgagcaccactgagagagtgttccaggatcggcagtatcaggttgacgcggccatagttcgaataatgaagacgcggaaggtcctcagccacacccttctaataactgagctttaccagcagctcaagttccctgttaagccagctgatatcaagaaaagaatagagagcttgatcgaccgggagtacctggagcgcgacaggagtaacccccagatctacaactatctggcttgacaacgttttggtggatcgttcccatttcattactatcagaaaaaggcactgtaaattaatttattttccggtttcttgttctttcatgcttttcttctctgggaggaagttgtagttgtagctgctgcaacgtgtttatatagaacaattttttcggcatcagtataaaatcaggttccttaaagctattccacgtccgtcgttgtttttgcacaaaccgcaccgttgtttgcagcctatccagcca

SEQ ID NO: 52294 - DNA, 2781 bp, Zea Mays
ccccaagcccccaacccgatctctctcatcagctcgctctttcctgtcccctctccgccacctcaccgccggctcgctcaaaaatcctcgcgccggacgccggccctgcctccgcctccgcctccgctgcgccatgcccgtcggcgcctgattcatgtctcagtcctacgccgccgccgcctcgaagcgccccttctcgtcccccaccacatctccgtccccgacgtcatcccctgcgacgccgcttatgaagaaggccaagcatcccgccgccgcctcctcctcttccgtggggaccgtagagaagaacggcatccagcttgataccgttgccgccgccatgggtgggggccgaacgaatggcgaggaggatgcggacatggtgctcgtcaaccaggacaagctccccgcgcccagcgtgccggcctctgctggcgttgccgccaacctctttcgaaagaaggccacgctcccgcagccgtcgacctccgcccgcaagccgctccgcatcaaaataggctgctggtgatctttgtttacacaagctaggggcaaacctatacgaccgaatcaagaaagaatgtggaatacatatagctgaaaaaatatcagcattagtgggtcaaagcccagatctggttgtattcttgtctctggtccaaagaacatggcaagatttttgtgatcagatgttgattattcgtggtattgctttacttcttgatgtaaaatatgtcaagaatgtggcaaatatctgttcagtgtgggatatggggctgcaactgttccgcaagcatctatcactatccacggagattgaacacaaaactgtaactggccttctcagattgatcgagagtgagaggcttggtgaagcaatagataggacattacttagtcatcttctgaagatgcttactgctcttggaatgtattctgagagttttgaaaaaccctttcttgaatgtacttctgaattttatgctacggaaggtgttagatatatgcaacaatctgatattccagattacctgaagcatgtggagtcgaggttgcaagaagaacacgaaaggtgtattctatatttggaagctaacacgaggaagccactgattgcaactactgaaaagcaattgctagaacgtcatacatctgccattattgagaaggggttcactatgctcatggatgccaatcgtataaatgacctctcgaggatgtacaaccttttccagagggtgaatgctgttgagctgctaaaactagcgcttagttcatatatccgggctacaggccagggcattattatggatgaagaaaaggacagagaattggttccatttcttcttgattttaaggcatccctcgacaaaatattggaagaaagttttgccaagaacgaggctttctccaataccataaaagattcatttgagcaccttatcaatctacgacagaaccgacctgcggaattgattgcaaagtttcttgatgagaaacttcgagctggcaataaagggacatcggaagaagagctggagggtatacttgataaagttctggtcctgtttcggtttatacaaggtaaagatgtatttgaggcattctacaagaaggatctagctaagaggttgctgcttgggaagagtgcatcaatagatgctgaaaaatcgatgatcacaaaactcaaaactgagtgtggaagtcagtttaccaacaagctggagggaatgttcaaggacattgaattatccaaagaaataaatgattcattcagacaatcatctcaagctaggacaaagcttccctctggcattgaaatgagtgtccatgtgcttacaacaggctattggcctacatatccgccaatggacgtgaaactcccacacgaactgaatgtgtatcaggatatatttaaagagttctatttaagcaagtacagtggaaggcgtttaatgtggcagaattctttgggacactgtgtcttgaaagcagactttcccaaaggcaaaaaggaacttgcagtatcattgttccagagcgtggttttgatgttgttcaatgacgcacaaaagttaagcttcattgacatcaaagattccactggtatcgaggataaagaattgagacgaacattgcaatctcttgcatgtggtaaagttcgggttctccaaaagataccaaaagggagagatgtagaagataaggatgaatttgtattcaatgaagattttagtgctcctctctaccgcataaaggtaaatgcaattcaaatgaaagagacggtagaagaaaacacgagcaccactgagagagtgttccaggatcggcagtatcaggttgacgcggccatagttcgaataatgaagacgcggaaggtcctcagccacacccttctaataactgagctttaccagcagctcaagttccctgttaagccagctgatatcaagaaaagaatagagagcttgatcgaccgggagtacctggagcgcgacaggagtaacccccagatctacaactatctggcttgacaacgttttggtggatcgttcccatttcattactatcagaaaaaggcactgtaaattaatttattttccggtttcttgttctttcatgcttttcttctctgggaggaagttgtagttgtagctgctgcaacgtgtttatatagaacaattttttcggcatcagtataaaatcaggttccttaaagctattccacgtccgtcgttgtttttgcacaaaccgcaccgttgtttgcagcctatccagcca

SEQ ID NO: 52295 - DNA, 2766 bp, Zea Mays
ccccaagcccccaacccgatctctctcatcagctcgctctttcctgtcccctctccgccacctcaccgccggctcgctcaaaaatcctcgcgccggacgccggccctgcctccgcctccgcctccgctgcgccatgcccgtcggcgcctgattcatgtctcagtcctacgccgccgccgcctcgaagcgccccttctcgtcccccaccacatctccgtccccgacgtcatcccctgcgacgccgcttatgaagaaggccaagcatcccgccgccgcctcctcctcttccgtggggaccgtagagaagaacggcatccagcttgataccgttgccgccgccatgggtgggggccgaacgaatggcgaggaggatgcggacatggtgctcgtcaaccaggacaagctccccgcgcccagcgtgccggcctctgctggcgttgccgccaacctctttcgaaagaaggccacgctcccgcagccgtcgacctccgcccgcaagccgctccgcatcaaaataggtcaaccaaaactgccaaaaaacttcgaagaggatacatggtcgattttgaaggatgctatcacagctatttttctcaagcagaaactttcttgtgatgttgagaaactctatcaggctgctggtgatctttgtttacacaagctaggggcaaacctatacgaccgaatcaagaaagaatgtggaatacatatagctgaaaaaatatcagcattagtgggtcaaagcccagatctggttgtattcttgtctctggtccaaagaacatggcaagatttttgtgatcagatgttgattattcgtggtattgctttacttcttgatgtaaaatatgtcaagaatgtggcaaatatctgttcagtgtgggatatggggctgcaactgttccgcaagcatctatcactatccacggagattgaacacaaaactgtaactggccttctcagattgatcgagagtgagagaaccagtcaggcacaccatttaactgataatacgcacctgagctgtgcagtcgaggttgcaagaagaacacgaaaggtgtattctatatttggaagctaacacgaggaagccactgattgcaactactgaaaagcaattgctagaacgtcatacatctgccattattgagaaggggttcactatgctcatggatgccaatcgtataaatgacctctcgaggatgtacaaccttttccagagggtgaatgctgttgagctgctaaaactagcgcttagttcatatatccgggctacaggccagggcattattatggatgaagaaaaggacagagaattggttccatttcttcttgattttaaggcatccctcgacaaaatattggaagaaagttttgccaagaacgaggctttctccaataccataaaagattcatttgagcaccttatcaatctacgacagaaccgacctgcggaattgattgcaaagtttcttgatgagaaacttcgagctggcaataaagggacatcggaagaagagctggagggtatacttgataaagttctggtcctgtttcggtttatacaaggtaaagatgtatttgaggcattctacaagaaggatctagctaagaggttgctgcttgggaagagtgcatcaatagatgctgaaaaatcgatgatcacaaaactcaaaactgagtgtggaagtcagtttaccaacaagctggagggaatgttcaaggacattgaattatccaaagaaataaatgattcattcagacaatcatctcaagctaggacaaagcttccctctggcattgaaatgagtgtccatgtgcttacaacaggctattggcctacatatccgccaatggacgtgaaactcccacacgaactgaatgtgtatcaggatatatttaaagagttctatttaagcaagtacagtggaaggcgtttaatgtggcagaattctttgggacactgtgtcttgaaagcagactttcccaaaggcaaaaaggaacttgcagtatcattgttccagagcgtggttttgatgttgttcaatgacgcacaaaagttaagcttcattgacatcaaagattccactggtatcgaggataaagaattgagacgaacattgcaatctcttgcatgtggtaaagttcgggttctccaaaagataccaaaagggagagatgtagaagataaggatgaatttgtattcaatgaagattttagtgctcctctctaccgcataaaggtaaatgcaattcaaatgaaagagacggtagaagaaaacacgagcaccactgagagagtgttccaggatcggcagtatcaggttgacgcggccatagttcgaataatgaagacgcggaaggtcctcagccacacccttctaataactgagctttaccagcagctcaagttccctgttaagccagctgatatcaagaaaagaatagagagcttgatcgaccgggagtacctggagcgcgacaggagtaacccccagatctacaactatctggcttgacaacgttttggtggatcgttcccatttcattactatcagaaaaaggcactgtaaattaatttattttccggtttcttgttctttcatgcttttcttctctgggaggaagttgtagttgtagctgctgcaacgtgtttatatagaacaattttttcggcatcagtataaaatcaggttccttaaagctattccacgtccgtcgttgtttttgcacaaaccgcaccgttgtttgcagcctatccagcca

SEQ ID NO: 52296 - DNA, 2355 bp, Zea Mays
gacagcgtgccgagacccccccacccgacgcgttcatcagtgactagtgtacgcggggcgtggtagggtactagggtagggcagggcaccgaaaggcagtgcagtgccgcagacggcagatctgacctccccctaaagcctgccgccgccgctgtctctcgctacccgcgctgcggctctgcccctgcccgcagcagcacagcagtaccgctgcaccgggcaccacgaagcagcttctgccgctccgcacttccgcagcgccccgggcgcgaggagagagagagagagagaccgacggaggcaacgagcgcccgccgcgcgcccagtgtggcagcgcgcgcgggagccgggaaaatgttgcacgggggtaggagcacgggcgggcgattaggcaggcgtggcagggcagcgtagggataagaccgtgcgaagagctcgagcagcagcacagcagccggggccccgacggacggacgcggccggcgcgctcgaccgccaagcacgccggggagcaccagccgttgcctcattccagcagctacaccgccaggcgccaaagcccacgcgcctgcctggagctccatcttccacttccaccccataaaagcgctgcattcctcctcacggctatctcccgccgcgccagcagccagcgtatgagcagcgcctgcggctgcgggcggcgccactagggggatggaggcagcagccgtgggcgccggcgcgcccggccgctcccagcagcagggctccaagcgcggccgcggcggcgccgtgaggggcagcgaggcggaggcggcgtggggccagccgccgccgccgccgccgccgctgggcccgggggcggggtcccggatctaccgcgtgcgggctagcgggggcaaggaccggcacagcaaggtgtacacggccaagggcatccgcgaccgccgcgtgcgcctgtcggtgccaaccgccatccagttctacgacctgcaggaccgcctcggcttcgaccagcccagcaaggccatcgaatggctcatcaacgccgccgccgccgccatcgacaagctcccggagctcgacccggccgccttcgccgccctccccgcgccgggcgacgcggatgccgccggcaaggacaagcagcagcaggggagcaagtccgcgggcagcagcacgtcggagacgagcaagggatccgagctctcgctctcgcgctccgacagccgcgggggcgcctccgcccgggacagggaggtcaccgtggccagcacctcggcgcaggccgcgtccttcaccgagctgctcaccggggtggcgtcggccggcgccattagcgccgccgagcacaggcagtcctggcatcaccagcccaacgtctccgcggccgccgccggctgcgtcggcattgcgcacaacgggaaaggtgcgcacgggctgtcgacgcacgccttttctggccctgccgccgccaagttcggcagcgcgcctccgttcggcctggttccggcgcagcccttcaacttcaccagccccatcgagatgcctcacttctcgctcggccaggacactctggcggcgtcctcggctgccgccggggactacagcctcggtttctccatgtcctcaggtttcttgggtgccagtagggggacccttcagtccaattcgcagtcgaacttctcgggccatcatcaccaccagctccagaggctggatggcccgctcttgtttggtcacgttcacggtgcggcggtggcgcatcccgcatccgagaaccagctcacatcatccgcggcgttacagctgtgggacggtctccggcactccggcatgaaggagaagagcaaaaactgattgctcattcttcaacgaaaactgaaacacatccagttgctgggaccggttcgggcatatatggattcacccttcggagctgctaccgtttgttgcggtgatgaccatcagattgccgcacacaaggctgctatggtggccatcgtcaaccatccaccaccaccaggcaccagccctgctgccgtcgatcaagcaatcccgtgctttgttttttttccttctctcttccattcctttcctaggcgctgttgtacaaattttgtgagagatgagagtttaaacaggctgttgtaagagtgtgctcggtagccgcggttctagtgctccccgcgcctcactgctggtctagactattctggagtttgtatgaacaggtccatcggacaacagttgtgctcatagtttctcagcttggtttgcgagatatatatatccctcatcaagtggtgccatggctctttccaggtgtggtgaatcttgttttgggccgagcacccactgcctggactcaag

SEQ ID NO: 52297 - DNA, 1834 bp, Zea Mays
cgcgcccagtgtggcagcgcgcgcgggagccgggaaaatgttgcacgggggtaggagcacgggcgggcgattaggcaggcgtggcagggcagcgtagggataagaccgtgcgaagagctcgagcagcagcacagcagccggggccccgacggacggacgcggccggcgcgctcgaccgccaagcacgccggggagcaccagccgttgcctcattccagcagctacaccgccaggcgccaaagcccacgcgcctgcctggagctccatcttccacttccaccccataaaagcgctgcattcctcctcacggctatctcccgccgcgccagcagccagcgtatgagcagcgcctgcggctgcgggcggcgccactagggggatggaggcagcagccgtgggcgccggcgcgcccggccgctcccagcagcagggctccaagcgcggccgcggcggcgccgtgaggggcagcgaggcggaggcggcgtggggccagccgccgccgccgccgccgccgctgggcccgggggcggggtcccggatctaccgcgtgcgggctagcgggggcaaggaccggcacagcaaggtgtacacggccaagggcatccgcgaccgccgcgtgcgcctgtcggtgccaaccgccatccagttctacgacctgcaggaccgcctcggcttcgaccagcccagcaaggccatcgaatggctcatcaacgccgccgccgccgccatcgacaagctcccggagctcgacccggccgccttcgccgccctccccgcgccgggcgacgcggatgccgccggcaaggacaagcagcagcaggggagcaagtccgcgggcagcagcacgtcggagacgagcaagggatccgagctctcgctctcgcgctccgacagccgcgggggcgcctccgcccgggacagggaggtcaccgtggccagcacctcggcgcaggccgcgtccttcaccgagctgctcaccggggtggcgtcggccggcgccattagcgccgccgagcacaggcagtcctggcatcaccagcccaacgtctccgcggccgccgccggctgcgtcggcattgcgcacaacgggaaaggtgcgcacgggctgtcgacgcacgccttttctggccctgccgccgccaagttcggcagcgcgcctccgttcggcctggttccggcgcagcccttcaacttcaccagccccatcgagatgcctcacttctcgctcggccaggacactctggcggcgtcctcggctgccgccggggactacagcctcggtttctccatgtcctcaggtttcttgggtgccagtagggggacccttcagtccaattcgcagtcgaacttctcgggccatcatcaccaccagctccagaggctggatggcccgctcttgtttggtcacgttcacggtgcggcggtggcgcatcccgcatccgagaaccagctcacatcatccgcggcgttacagctgtgggacggtctccggcactccggcatgaaggagaagagcaaaaactgattgctcattcttcaacggtgatctgagatctttggtttgtgatagaacatggtcttccacttgatctggtatgataatatggactctcagttaaagctcgctgaattgtgataccaactttgagagttcgtacaagcttagcttagatgacaaggaatccgaagacaaatgcaatcggctaaaaccctaattatggacttacaaaccataagctgttccactttcacgcgaaactaccttattacttgtcatgacccatgaatctatttggtgttggtgatctgatcatgcaagccatgctttgctgct

SEQ ID NO: 52298 - DNA, 2669 bp, Zea Mays
agagctgcctcataaaagctccctgcgtttgctcctgtttgcagcttgcacggaggcggggtagtagaggacggcctcgcaaggtagctctgctcgagcgaggcagcagcactactcccgttcaggtactacactcggtagaggtggacgtcagctcactagctgagtcgccagttttcatcagcagtaccactagtaaaaggattctctgcaatcgaggattgcaatttgtatcttctcttctcctaccggttcggcttcgacggagaagtttcttcctctggttagttcgctgacgccgactgttcttgccacggggcttccttctgcaggagaggaggcgttctccaccgggtcataggaatcctgacgagatggacggcaatgctaggtcgacggcggcgagtcagaagaagtccatcgtcccggacgacgacctcgtggagctgctctggcacaacggaagcgtcgtggcgcagccccaggggcaccacaggccggcgccgccctccgaccgcgactgcccgggcaccagcggccttactgccgaggagaccgccgcgtggttcccggacaccctcgacgactcgctggagaaggacctgtacacgcagctctggtacagcacgatcgccgacgccgccccgcaacacgagggcatgttcccgggccctacctcgcagccttcgccgccgccgcccgttgcgagcagcggcgtcgagtcgagctgggccggcgacatctgctcgaccttctgcggcagcaaccaggtgcccaggacgccggcagggatcagggggaaggacgcggcattgcagccggaggtgccgagcggtgccggcgcgcacgacggcacatcgtcatccggtgggtccggaagcaactatgggggatccgggctgcccagtgacagcgtccatgtccacaagaggaaggggatgtgtagagacgagtcagatagtcggagtgagagaagaagggaccggatcaaagaaaagatgcgtgcgttgcaagagctgatcccacactgcaacaagactgacaaagcatctatactagacgagacgattgagtacctgaagtccctccaaatgcaagttcagatcatgtggatgacttctgggatggtgccaatggtgtttcctggtgctcaccaatacatgccaccaatggctctaggcatgaattcaggttgcatccctgcagcacaaggcctaagtcagatgcgaagattaccatacatgaaccaccccatgccaaatcatatccctctgaactcgtctccagctatgaatccaatgaatccactgaacactgtgaaccagttccaaaacggtcacctcagggaggtaccaagacctggaccccatgtttatggacaccaaatagcacaagccgaagaacacaacagaatactggaagtggcagctagtactgttataccaacttctaaggcagggcaaccacctacttttgatggagtttagagtggtcataaatcctgtaaggtgttgcactgataatctgacgatgcatagcgttggtaccttgagttgtatatctgtgcagtagtgtcagcagcatactctttgacatctaagcttggttctagagttattaataggagcctagtataggtaacaagattgcaagacaactacctgtctaccaccatattctctgtggaagaactggagctgcatactgctgtgcagtacagtgttcaagagagaatggaacagatgagtatttgaagcacaacctgaacaggaaatggtcttctttctggcaatcgctgaaaatactgacgtgatgaggagcagattgcatccctatggctgtattgtaatatatctacatcaacatggcaatacgtgtctggacttggatgctacagttacatgtaaatgcagagttgcaggtttggtcggcaggagcatacatcttcacacgacgtggacagtggactacgggccgagacagtggcccagacacgacacggctcttatatcaggctaggccagacactatttaatgtgtcatgcctcaggccggtccacgagacacggctgaccatctataccacatactctactcctccacggcaacagttcagcatcctcctggcaatggcaacggttcagcatcctccatggcaactgtgcggagccctagactagacctgctgcaagatggcagaccctcatcttcagagcggattgggtttggatcccctgtactcctccttgctcccctgttgctttcagttcgtctcacggttattgttcagacttcagatacatatgtcgttgtgcctggttggctgtatctggacatcagtttccgtgttgctactattttcccccctgtatttctttataacggacattcaccttataaatatacacacaaaacctctatttctatgaagactgtgccgacaaattctcaggattaacgtagtcaccacagtcgcctcactactgaaagtcacctctacatattatctagcttttcttagttgtaattgtttcatgggaacatatatcgtgtgattggttctcagtacaatcttatcctgaaccatcgcatgcgctaactacatgattggttggtgtactaagaagtaagaagcgtctggcgcgagccagcctggtcgagaagctctc

SEQ ID NO: 52299 - DNA, 2440 bp, Zea Mays
agagctgcctcataaaagctccctgcgtttgctcctgtttgcagcttgcacggaggcggggtagtagaggacggcctcgcaaggtagctctgctcgagcgaggcagcagcactactcccgttcaggagaggaggcgttctccaccgggtcataggaatcctgacgagatggacggcaatgctaggtcgacggcggcgagtcagaagaagtccatcgtcccggacgacgacctcgtggagctgctctggcacaacggaagcgtcgtggcgcagccccaggggcaccacaggccggcgccgccctccgaccgcgactgcccgggcaccagcggccttactgccgaggagaccgccgcgtggttcccggacaccctcgacgactcgctggagaaggacctgtacacgcagctctggtacagcacgatcgccgacgccgccccgcaacacgagggcatgttcccgggccctacctcgcagccttcgccgccgccgcccgttgcgagcagcggcgtcgagtcgagctgggccggcgacatctgctcgaccttctgcggcagcaaccaggtgcccaggacgccggcagggatcagggggaaggacgcggcattgcagccggaggtgccgagcggtgccggcgcgcacgacggcacatcgtcatccggtgggtccggaagcaactatgggggatccgggctgcccagtgacagcgtccatgtccacaagaggaaggggatgtgtagagacgagtcagatagtcggagtgagagaagaagggaccggatcaaagaaaagatgcgtgcgttgcaagagctgatcccacactgcaacaagacgagacgattgagtacctgaagtccctccaaatgcaagttcagatcatgtggatgacttctgggatggtgccaatggtgtttcctggtgctcaccaatacatgccaccaatggctctaggcatgaattcaggttgcatccctgcagcacaaggcctaagtcagatgcgaagattaccatacatgaaccaccccatgccaaatcatatccctctgaactcgtctccagctatgaatccaatgaatccactgaacactgtgaaccagttccaaaacggtcacctcagggaggtaccaagacctggaccccatgtttatggacaccaaatagcacaagccgaagaacacaacagaatactggaagtggcagctagtactgttataccaacttctaaggcagggcaaccacctacttttgatggagtttagagtggtcataaatcctgtaaggtgttgcactgataatctgacgatgcatagcgttggtaccttgagttgtatatctgtgcagtagtgtcagcagcatactctttgacatctaagcttggttctagagttattaataggagcctagtataggtaacaagattgcaagacaactacctgtctaccaccatattctctgtggaagaactggagctgcatactgctgtgcagtacagtgttcaagagagaatggaacagatgagtatttgaagcacaacctgaacaggaaatggtcttctttctggcaatcgctgaaaatactgacgtgatgaggagcagattgcatccctatggctgtattgtaatatatctacatcaacatggcaatacgtgtctggacttggatgctacagttacatgtaaatgcagagttgcaggtttggtcggcaggagcatacatcttcacacgacgtggacagtggactacgggccgagacagtggcccagacacgacacggctcttatatcaggctaggccagacactatttaatgtgtcatgcctcaggccggtccacgagacacggctgaccatctataccacatactctactcctccacggcaacagttcagcatcctcctggcaatggcaacggttcagcatcctccatggcaactgtgcggagccctagactagacctgctgcaagatggcagaccctcatcttcagagcggattgggtttggatcccctgtactcctccttgctcccctgttgctttcagttcgtctcacggttattgttcagacttcagatacatatgtcgttgtgcctggttggctgtatctggacatcagtttccgtgttgctactattttcccccctgtatttctttataacggacattcaccttataaatatacacacaaaacctctatttctatgaagactgtgccgacaaattctcaggattaacgtagtcaccacagtcgcctcactactgaaagtcacctctacatattatctagcttttcttagttgtaattgtttcatgggaacatatatcgtgtgattggttctcagtacaatcttatcctgaaccatcgcatgcgctaactacatgattggttggtgtactaagaagtaagaagcgtctggcgcgagccagcctggtcgagaagctctc

SEQ ID NO: 52300 - DNA, 2664 bp, Zea Mays
agagctgcctcataaaagctccctgcgtttgctcctgtttgcagcttgcacggaggcggggtagtagaggacggcctcgcaaggtagctctgctcgagcgaggcagcagcactactcccgttcaggagaggaggcgttctccaccgggtcataggaatcctgacgagatggacggcaatgctaggtcgacggcggcgagtcagaagaagtccatcgtcccggacgacgacctcgtggagctgctctggcacaacggaagcgtcgtggcgcagccccaggggcaccacaggccggcgccgccctccgaccgcgactgcccgggcaccagcggccttactgccgaggagaccgccgcgtggttcccggacaccctcgacgactcgctggagaaggacctgtacacgcagctctggtacagcacgatcgccgacgccgccccgcaacacgagggcatgttcccgggccctacctcgcagccttcgccgccgccgcccgttgcgagcagcggcgtcgagtcgagctgggccggcgacatctgctcgaccttctgcggcagcaaccaggtgcccaggacgccggcagggatcagggggaaggacgcggcattgcagccggaggtgccgagcggtgccggcgcgcacgacggcacatcgtcatccggtgggtccggaagcaactatgggggatccgggctgcccagtgacagcgtccatgtccacaagaggaaggggatgtgtagagacgagtcagatagtcggagtgaggtgtctacttttgttttatataacatgtatcctgaacgaactgctagaaaatagagtcgaaatagagatgcttgagtggaatagaattgatgaggaaattgcaggatgccgagtgtgaggaggcaaggagaccaaaccctggcggcggcatgggcggaaacgccggactcgtgcagctgaagtccataatctctcagagaggagaagaagggaccggatcaaagaaaagatgcgtgcgttgcaagagctgatcccacactgcaacaagactgacaaagcatctatactagacgagacgattgagtacctgaagtccctccaaatgcaagttcagatcatgtggatgacttctgggatggtgccaatggtgtttcctggtgctcaccaatacatgccaccaatggctctaggcatgaattcaggttgcatccctgcagcacaaggcctaagtcagatgcgaagattaccatacatgaaccaccccatgccaaatcatatccctctgaactcgtctccagctatgaatccaatgaatccactgaacactgtgaaccagttccaaaacggtcacctcagggaggtaccaagacctggaccccatgtttatggacaccaaatagcacaagccgaagaacacaacagaatactggaagtggcagctagtactgttataccaacttctaaggcagggcaaccacctacttttgatggagtttagagtggtcataaatcctgtaaggtgttgcactgataatctgacgatgcatagcgttggtaccttgagttgtatatctgtgcagtagtgtcagcagcatactctttgacatctaagcttggttctagagttattaataggagcctagtataggtaacaagattgcaagacaactacctgtctaccaccatattctctgtggaagaactggagctgcatactgctgtgcagtacagtgttcaagagagaatggaacagatgagtatttgaagcacaacctgaacaggaaatggtcttctttctggcaatcgctgaaaatactgacgtgatgaggagcagattgcatccctatggctgtattgtaatatatctacatcaacatggcaatacgtgtctggacttggatgctacagttacatgtaaatgcagagttgcaggtttggtcggcaggagcatacatcttcacacgacgtggacagtggactacgggccgagacagtggcccagacacgacacggctcttatatcaggctaggccagacactatttaatgtgtcatgcctcaggccggtccacgagacacggctgaccatctataccacatactctactcctccacggcaacagttcagcatcctcctggcaatggcaacggttcagcatcctccatggcaactgtgcggagccctagactagacctgctgcaagatggcagaccctcatcttcagagcggattgggtttggatcccctgtactcctccttgctcccctgttgctttcagttcgtctcacggttattgttcagacttcagatacatatgtcgttgtgcctggttggctgtatctggacatcagtttccgtgttgctactattttcccccctgtatttctttataacggacattcaccttataaatatacacacaaaacctctatttctatgaagactgtgccgacaaattctcaggattaacgtagtcaccacagtcgcctcactactgaaagtcacctctacatattatctagcttttcttagttgtaattgtttcatgggaacatatatcgtgtgattggttctcagtacaatcttatcctgaaccatcgcatgcgctaactacatgattggttggtgtactaagaagtaagaagcgtctggcgcgagccagcctggtcgagaagctctc

SEQ ID NO: 52301 - DNA, 2596 bp, Zea Mays
ctgcaagctacagagctgcctcataaaagctccctgcgtttgctcctgtttgcagcttgcacggaggcggggtagtagaggacggcctcgcaaggtagctctgctcgagcgaggcagcagcactactcccgttcaggagaggaggcgttctccaccgggtcataggaatcctgacgagatggacggcaatgctaggtcgacggcggcgagtcagaagaagtccatcgtcccggacgacgacctcgtggagctgctctggcacaacggaagcgtcgtggcgcagccccaggggcaccacaggccggcgccgccctccgaccgcgactgcccgggcaccagcggccttactgccgaggagaccgccgcgtggttcccggacaccctcgacgactcgctggagaaggacctgtacacgcagctctggtacagcacgatcgccgacgccgccccgcaacacgagggcatgttcccgggccctacctcgcagccttcgccgccgccgcccgttgcgagcagcggcgtcgagtcgagctgggccggcgacatctgctcgaccttctgcggcagcaaccaggtgcccaggacgccggcagggatcagggggaaggacgcggcattgcagccggaggtgccgagcggtgccggcgcgcacgacggcacatcgtcatccggtgggtccggaagcaactatgggggatccgggctgcccagtgacagcgtccatgtccacaagaggaaggggatgtgtagagacgagtcagatagtcggagtgaggatgccgagtgtgaggaggcaaggagaccaaaccctggcggcggcatgggcggaaacgccggactcgtgcagctgaagtccataatctctcagagagggcgttattggctgctgctgatgtagagaagaagggaccggatcaaagaaaagatgcgtgcgttgcaagagctgatcccacactgcaacaagactgacaaagcatctatactagacgagacgattgagtacctgaagtccctccaaatgcaagttcagatcatgtggatgacttctgggatggtgccaatggtgtttcctggtgctcaccaatacatgccaccaatggctctaggcatgaattcaggttgcatccctgcagcacaaggcctaagtcagatgcgaagattaccatacatgaaccaccccatgccaaatcatatccctctgaactcgtctccagctatgaatccaatgaatccactgaacactgtgaaccagttccaaaacggtcacctcagggaggtaccaagacctggaccccatgtttatggacaccaaatagcacaagccgaagaacacaacagaatactggaagtggcagctagtactgttataccaacttctaaggcagggcaaccacctacttttgatggagtttagagtggtcataaatcctgtaaggtgttgcactgataatctgacgatgcatagcgttggtaccttgagttgtatatctgtgcagtagtgtcagcagcatactctttgacatctaagcttggttctagagttattaataggagcctagtataggtaacaagattgcaagacaactacctgtctaccaccatattctctgtggaagaactggagctgcatactgctgtgcagtacagtgttcaagagagaatggaacagatgagtatttgaagcacaacctgaacaggaaatggtcttctttctggcaatcgctgaaaatactgacgtgatgaggagcagattgcatccctatggctgtattgtaatatatctacatcaacatggcaatacgtgtctggacttggatgctacagttacatgtaaatgcagagttgcaggtttggtcggcaggagcatacatcttcacacgacgtggacagtggactacgggccgagacagtggcccagacacgacacggctcttatatcaggctaggccagacactatttaatgtgtcatgcctcaggccggtccacgagacacggctgaccatctataccacatactctactcctccacggcaacagttcagcatcctcctggcaatggcaacggttcagcatcctccatggcaactgtgcggagccctagactagacctgctgcaagatggcagaccctcatcttcagagcggattgggtttggatcccctgtactcctccttgctcccctgttgctttcagttcgtctcacggttattgttcagacttcagatacatatgtcgttgtgcctggttggctgtatctggacatcagtttccgtgttgctactattttcccccctgtatttctttataacggacattcaccttataaatatacacacaaaacctctatttctatgaagactgtgccgacaaattctcaggattaacgtagtcaccacagtcgcctcactactgaaagtcacctctacatattatctagcttttcttagttgtaattgtttcatgggaacatatatcgtgtgattggttctcagtacaatcttatcctgaaccatcgcatgcgctaactacatgattggttggtgtactaagaagtaagaagcgtctggcgcgagccagcctggtcgagaagctctc

SEQ ID NO: 52302 - DNA, 2632 bp, Zea Mays
cttgtgtctgctcatgctgtgccgtggtggccgtgggctgcaagctacagagctgcctcataaaagctccctgcgtttgctcctgtttgcagcttgcacggaggcggggtagtagaggacggcctcgcaaggtagctctgctcgagcgaggcagcagcactactcccgttcaggagaggaggcgttctccaccgggtcataggaatcctgacgagatggacggcaatgctaggtcgacggcggcgagtcagaagaagtccatcgtcccggacgacgacctcgtggagctgctctggcacaacggaagcgtcgtggcgcagccccaggggcaccacaggccggcgccgccctccgaccgcgactgcccgggcaccagcggccttactgccgaggagaccgccgcgtggttcccggacaccctcgacgactcgctggagaaggacctgtacacgcagctctggtacagcacgatcgccgacgccgccccgcaacacgagggcatgttcccgggccctacctcgcagccttcgccgccgccgcccgttgcgagcagcggcgtcgagtcgagctgggccggcgacatctgctcgaccttctgcggcagcaaccaggtgcccaggacgccggcagggatcagggggaaggacgcggcattgcagccggaggtgccgagcggtgccggcgcgcacgacggcacatcgtcatccggtgggtccggaagcaactatgggggatccgggctgcccagtgacagcgtccatgtccacaagaggaaggggatgtgtagagacgagtcagatagtcggagtgaggatgccgagtgtgaggaggcaaggagaccaaaccctggcggcggcatgggcggaaacgccggactcgtgcagctgaagtccataatctctcagagaggcgttattggctgctgctgatgtagagaagaagggaccggatcaaagaaaagatgcgtgcgttgcaagagctgatcccacactgcaacaagactgacaaagcatctatactagacgagacgattgagtacctgaagtccctccaaatgcaagttcagatcatgtggatgacttctgggatggtgccaatggtgtttcctggtgctcaccaatacatgccaccaatggctctaggcatgaattcaggttgcatccctgcagcacaaggcctaagtcagatgcgaagattaccatacatgaaccaccccatgccaaatcatatccctctgaactcgtctccagctatgaatccaatgaatccactgaacactgtgaaccagttccaaaacggtcacctcagggaggtaccaagacctggaccccatgtttatggacaccaaatagcacaagccgaagaacacaacagaatactggaagtggcagctagtactgttataccaacttctaaggcagggcaaccacctacttttgatggagtttagagtggtcataaatcctgtaaggtgttgcactgataatctgacgatgcatagcgttggtaccttgagttgtatatctgtgcagtagtgtcagcagcatactctttgacatctaagcttggttctagagttattaataggagcctagtataggtaacaagattgcaagacaactacctgtctaccaccatattctctgtggaagaactggagctgcatactgctgtgcagtacagtgttcaagagagaatggaacagatgagtatttgaagcacaacctgaacaggaaatggtcttctttctggcaatcgctgaaaatactgacgtgatgaggagcagattgcatccctatggctgtattgtaatatatctacatcaacatggcaatacgtgtctggacttggatgctacagttacatgtaaatgcagagttgcaggtttggtcggcaggagcatacatcttcacacgacgtggacagtggactacgggccgagacagtggcccagacacgacacggctcttatatcaggctaggccagacactatttaatgtgtcatgcctcaggccggtccacgagacacggctgaccatctataccacatactctactcctccacggcaacagttcagcatcctcctggcaatggcaacggttcagcatcctccatggcaactgtgcggagccctagactagacctgctgcaagatggcagaccctcatcttcagagcggattgggtttggatcccctgtactcctccttgctcccctgttgctttcagttcgtctcacggttattgttcagacttcagatacatatgtcgttgtgcctggttggctgtatctggacatcagtttccgtgttgctactattttcccccctgtatttctttataacggacattcaccttataaatatacacacaaaacctctatttctatgaagactgtgccgacaaattctcaggattaacgtagtcaccacagtcgcctcactactgaaagtcacctctacatattatctagcttttcttagttgtaattgtttcatgggaacatatatcgtgtgattggttctcagtacaatcttatcctgaaccatcgcatgcgctaactacatgattggttggtgtactaagaagtaagaagcgtctggcgcgagccagcctggtcgagaagctctc

SEQ ID NO: 52303 - DNA, 2618 bp, Zea Mays
ccgattttaatgagcagccttgtgtctgctcatgctgtgccgtggtggccgtgggctgcaagctacagagctgcctcataaaagctccctgcgtttgctcctgtttgcagcttgcacggaggcggggtagtagaggacggcctcgcaaggtagctctgctcgagcgaggcagcagcactactcccgttcaggagaggaggcgttctccaccgggtcataggaatcctgacgagatggacggcaatgctaggtcgacggcggcgagtcagaagaagtccatcgtcccggacgacgacctcgtggagctgctctggcacaacggaagcgtcgtggcgcagccccaggggcaccacaggccggcgccgccctccgaccgcgactgcccgggcaccagcggccttactgccgaggagaccgccgcgtggttcccggacaccctcgacgactcgctggagaaggacctgtacacgcagctctggtacagcacgatcgccgacgccgccccgcaacacgagggcatgttcccgggccctacctcgcagccttcgccgccgccgcccgttgcgagcagcggcgtcgagtcgagctgggccggcgacatctgctcgaccttctgcggcagcaaccaggtgcccaggacgccggcagggatcagggggaaggacgcggcattgcagccggaggtgccgagcggtgccggcgcgcacgacggcacatcgtcatccggtgggtccggaagcaactatgggggatccgggctgcccagtgacagcgtccatgtccacaagaggaaggggatgtgtagagacgagtcagatagtcggagtgaggatgccgagtgtgaggaggcaaggagaccaaaccctggcggcggcatgggcggaaacgccggactcgtgcagctgaagtccataatctctcagagaggggaccggatcaaagaaaagatgcgtgcgttgcaagagctgatcccacactgcaacaagactgacaaagcatctatactagacgagacgattgagtacctgaagtccctccaaatgcaagttcagatcatgtggatgacttctgggatggtgccaatggtgtttcctggtgctcaccaatacatgccaccaatggctctaggcatgaattcaggttgcatccctgcagcacaaggcctaagtcagatgcgaagattaccatacatgaaccaccccatgccaaatcatatccctctgaactcgtctccagctatgaatccaatgaatccactgaacactgtgaaccagttccaaaacggtcacctcagggaggtaccaagacctggaccccatgtttatggacaccaaatagcacaagccgaagaacacaacagaatactggaagtggcagctagtactgttataccaacttctaaggcagggcaaccacctacttttgatggagtttagagtggtcataaatcctgtaaggtgttgcactgataatctgacgatgcatagcgttggtaccttgagttgtatatctgtgcagtagtgtcagcagcatactctttgacatctaagcttggttctagagttattaataggagcctagtataggtaacaagattgcaagacaactacctgtctaccaccatattctctgtggaagaactggagctgcatactgctgtgcagtacagtgttcaagagagaatggaacagatgagtatttgaagcacaacctgaacaggaaatggtcttctttctggcaatcgctgaaaatactgacgtgatgaggagcagattgcatccctatggctgtattgtaatatatctacatcaacatggcaatacgtgtctggacttggatgctacagttacatgtaaatgcagagttgcaggtttggtcggcaggagcatacatcttcacacgacgtggacagtggactacgggccgagacagtggcccagacacgacacggctcttatatcaggctaggccagacactatttaatgtgtcatgcctcaggccggtccacgagacacggctgaccatctataccacatactctactcctccacggcaacagttcagcatcctcctggcaatggcaacggttcagcatcctccatggcaactgtgcggagccctagactagacctgctgcaagatggcagaccctcatcttcagagcggattgggtttggatcccctgtactcctccttgctcccctgttgctttcagttcgtctcacggttattgttcagacttcagatacatatgtcgttgtgcctggttggctgtatctggacatcagtttccgtgttgctactattttcccccctgtatttctttataacggacattcaccttataaatatacacacaaaacctctatttctatgaagactgtgccgacaaattctcaggattaacgtagtcaccacagtcgcctcactactgaaagtcacctctacatattatctagcttttcttagttgtaattgtttcatgggaacatatatcgtgtgattggttctcagtacaatcttatcctgaaccatcgcatgcgctaactacatgattggttggtgtactaagaagtaagaagcgtctggcgcgagccagcctggtcgagaagctctc

SEQ ID NO: 52304 - DNA, 789 bp, Zea Mays
gcccgcacgtgatccacctcatccactcacttcaccacatgtggacacgccacatcttctccaagtaatgcagccaaccaaaactacgagtgtaaatttctcaaattcaatcacctaaagaacagaactgaatttgaatttcaaaatggcagggcgcatagagaacctgacaggagagcatagatgagcaggaaacaaagccaagagaacagtaggaaccaaaagatggggagagcagaactgaccaacgctgaagaaaggacatctaacatattcgagtgacaggaatatcaataaacttagagcatcatataattatcctcaaattacaatataaacccagtctcagaacatactagaattaatcaaaaaggacggtttacatcgcctacgtctacagcaaagcacgtctacaaagggagacaatcatcccaacgcgtcacagccatggtgcaggagaagctcgccatcctcggtcacaagatgcgcctacttagatctctgcctcattttccggcgcttcctcttgagcctccgcatcctcttcttcttccacttggcccgcatcgcgtcggcgcaggtggagcgcgcgctcgagctacctgcccccctgattgcggcggctgagtactagtgagttggagacggacctgattctgcggccacccctctcgcctctggttcatatatagatccaggggtcctagttgaaatcggaaaccctagccgtgatgctctcgtggacggctgagatctgccagtgcggggagttggagcggatgattaggg

SEQ ID NO: 52305 - DNA, 4252 bp, Zea Mays
atgcgcctcgctcgctcaggcctcaagctgccgccgcggccattctgctctaccaccttctccgctacggcggccgtcacggatgtctcctccgctgaccgcttgctggcggtcctgcgcggctgcgtctccgcgccgcacctcccgctgggcctccaaatccacgctcgcgccgtcgtgtccggcgctctctccgaccacaaccacctggcgctccacacccggctcctgggcatgtacgtcctcgcgcgccggttccgcgacgccgtcgcggtgttctccgcgctcccgcgcgccgccgccgcatcgtcgctgccgtggaactggctcatccgcgggtttaccgcggccgggcagcatcacctcgccgtcctcttctacgtcaagatgtggtcccaccccgccgcgccgagccccgacgcgcacaccctcccttacgtcgtcaagtcctgtgccgcgctcggagcgatgtccctgggccgtctagtccaccgcacagcgcgggcgatcgggctcgccaacgatgtctacgttgggagcgcgctcgtcaagatgtacgctgacgctggcctcctcgggaacgcccgcgacgcgttcgacggaataccagagagggattgcgttttgtggaacgtgatgatggacgggtgcataaaggcaggtgacgtggatggcgcggtgcgtttattccggaacatgagggcatctggttgtgagcccaatttcgcgactctggcgtgctttctgtctgtgtgtgccactgacgctgacttgctgtctggggcgcaacttcactctctggcggtgaaatgtggtttagagccggaggtggcagtggctaacacattgctggcgatgtatgccaagtgccagtgcttggatgatgcatggagattgtttgaactgatgccacaggatgacttggtaacctggaatggaatgatttcaggatgtgttcaaaatggccttttcgttgaagcttttggattgttctatgatatgcagaggagtggcgctcgaccagattcgattacgctagtgagtttgctgccggctttgaccgacttgaatggtctcaagcagggtaaggaggtacacggttatattgtcaggaattgtgtgaacatggatgtctttttggtgagtgctttggtagacatctatttcaagtgcagggatgtgaggatggcacagaatttatatgatgcggctagggctatcgatgtggttattggcagtacgatgatatcaggttatgttcttaatgggatgagtgaagaggcactgcaaatgttccgatatttgttagaacagtgcatcaaaccaaatgctgttactatagctagcgtcttgccagggtgtgctagcatggcggctttgcctcttggtcagcagatccatggttatgttctaagaaacgcatatgaaagaaaatgttatgtggagagtgcactgatggacatgtacgcaaagtgtggcagacttgacctgagccattatatcttcttaaaaatgtctcagaaggatgaggtgacatggaactcgatgatttcaagcttttcacagaatggaaaaccacaagaagctctagatcttttccgtcagatgtgtatggaaggaataaagtacaataatataaccatatctgctgccctatccgcatgcgcaagtttaccagctatatattatgggaaggagattcatggtgttaccataaagggtcctataaaggcagacatatttgctgagagcgctctgatagatatgtatgcgaaatgtgggaacttggagttggctcttcgtgtttttgaattcatgcctgataagaatgaagtatcatggaacagtataatttcagcctatggggctcatggtcttgttaaagagtcagtgagcttgttacatggtatgcaggaggaaggatataagccagatcatgtaacatttcttgctttgatatctgcttgtgctcatgctgggctggttgaagaaggtgtccaactttttcaatgcatgacgaagaaatatctgattgcaccacgaatggagcactttgcttgcatggtcgacctatacagtcgttctgggaagttagataaggctatacaatttattgctgatatgcctttcaagccagatgctggcatttggggtgctcttctccatgcttgccgtgtgcatcgcaatgttgaacttgcggacatcgcttcccaagaactgttcaagttggaccctgctaattctggttattatgtgctcatgtccaatatcaatgcagttgctgggcgatgggatggtgtatcaaaagttagaagattgatgaaggataataagatcctgaagatacctgggtacagctgggtagatgttaataacagcagccatttatttgttgcatcagataaaagccaccctgagtctgaagatatctacacgtccttgaagaccctgcttcaagaactaagagaggaaggctatgttcccagaccagatctatgtcaccccatgcacccagataacaacacacaggtggaatttaaaaagttctggcaatatgatttgtcctagtggcactgatatgcccttctgatggaaattcaaggaagaacacattgttatacagaccactgcttgttgaaaagcagtatgtgcaattgtgtatgcagtttgacatttgcatgagaaaaaggtggctgcgtaaagacacatggagaggggtggcggtgcagagtgagcgaagaagaccgaggctgagaagagggaaagggattagggaattgccatactctatttatgtttaagattcaaatggttacatgacccctatatttatggtttcaagaggacttgacctctaagcaatctggacttatcctccatgcaacctgtagggaggaggctgatggctcccctagggccgtcgttcacccacttgttgtgcgcgcgcccagggccgttctttgggcctagccaagggtccgtatttagtccggtgacaatagctttctgtggatatgcctatttctcaagcatgagaaacacacggaagaccaaaagaaaaatctgtgtaaagatattggcgtctatagggagcatgacatattcataagttttcctgtgaggctgcaattatggtgttgctgcttcatatgcaaagttacacgattgagcttgtaacattgaaacaaaggaatgtgctccctcgtcgccaaggacggctcgacgctaatgctcaaccggcgaggcaacggtttctgttgctccatgcaatcaaatcagttcccgtcagtcgcggcctccatggctatccacaagtcggctatggtgtcgagacggccgtcgttcttgagtaacctatacagatccccaattcgtgtgagtgaagaaattaagaaaacatcatgagctgagcagccctcaaggctacatccctccatcatgctcgactctttttagggtttcattcttgcttaatatagtatttgttggcatttcttcgcatgcccgatttgggtgtggtatgaggaattaggctgcaatttcttttttttatccatccatcctagtgcacggaatatcatcttctagctgttataaaaagatttgcccaccctgttagttttgttttttttcttttctgaacacacataagagttgtccatcattatgtcaagaagagaagtctagatgactcatataaccctgagggatgatttggtgaccaggaaaatggatgggatttatgaggacaaattctcttgctattcaaaatagctaagggggcaaacaccgcactagcttgccactcacactagtacgtgaccaacactaaggagggacatcatgaccataaattacggagcccctgttacttttgttcagagtgatttattaactgattcttctgttccagaatatcgatcgaaatgagtaatttattctgatatatgatactattcgaaacatacaccagtccaatgttcatgtactacaaaaggaagggtacctacttcgatctgtggtaactggtatgggagcaaaattatatcattatccgattcctattcactatgcgcaaagaggtcaactatatttcccccttgcagaatcagaaaacttatttgctgtaagctgctattgaagggcagaggagcatatcgccctcaataaaaaacataaataccttcaacaagctcaacaagaggtgacaaggtggacctaggcaaaccctaagccaccgtgctcaacgctg

SEQ ID NO: 52306 - DNA, 4245 bp, Zea Mays
atgcgcctcgctcgctcaggcctcaagctgccgccgcggccattctgctctaccaccttctccgctacggcggccgtcacggatgtctcctccgctgaccgcttgctggcggtcctgcgcggctgcgtctccgcgccgcacctcccgctgggcctccaaatccacgctcgcgccgtcgtgtccggcgctctctccgaccacaaccacctggcgctccacacccggctcctgggcatgtacgtcctcgcgcgccggttccgcgacgccgtcgcggtgttctccgcgctcccgcgcgccgccgccgcatcgtcgctgccgtggaactggctcatccgcgggtttaccgcggccgggcagcatcacctcgccgtcctcttctacgtcaagatgtggtcccaccccgccgcgccgagccccgacgcgcacaccctcccttacgtcgtcaagtcctgtgccgcgctcggagcgatgtccctgggccgtctagtccaccgcacagcgcgggcgatcgggctcgccaacgatgtctacgttgggagcgcgctcgtcaagatgtacgctgacgctggcctcctcgggaacgcccgcgacgcgttcgacggaataccagagagggattgcgttttgtggaacgtgatgatggacgggtgcataaaggcaggtgacgtggatggcgcggtgcgtttattccggaacatgagggcatctggttgtgagcccaatttcgcgactctggcgtgctttctgtctgtgtgtgccactgacgctgacttgctgtctggggcgcaacttcactctctggcggtgaaatgtggtttagagccggaggtggcagtggctaacacattgctggcgatgtatgccaagtgccagtgcttggatgatgcatggagattgtttgaactgatgccacaggatgacttggtaacctggaatggaatgatttcaggatgtgttcaaaatggccttttcgttgaagcttttggattgttctatgatatgcagaggagtggcgctcgaccagattcgattacgctagtgagtttgctgccggctttgaccgacttgaatggtctcaagcagggtaaggaggtacacggttatattgtcaggaattgtgtgaacatggatgtctttttggtgagtgctttggtagacatctatttcaagtgcagggatgtgaggatggcacagaatttatatgatgcggctagggctatcgatgtggttattggcagtacgatgatatcaggttatgttcttaatgggatgagtgaagaggcactgcaaatgttccgatatttgttagaacagtgcatcaaaccaaatgctgttactatagctagcgtcttgccagggtgtgctagcatggcggctttgcctcttggtcagcagatccatggttatgttctaagaaacgcatatgaaagaaaatgttatgtggagagtgcactgatggacatgtacgcaaagtgtggcagacttgacctgagccattatatcttcttaaaaatgtctcagaaggatgaggtgacatggaactcgatgatttcaagcttttcacagaatggaaaaccacaagaagctctagatcttttccgtcagatgtgtatggaaggaataaagtacaataatataaccatatctgctgccctatccgcatgcgcaagtttaccagctatatattatgggaaggagattcatggtgttaccataaagggtcctataaaggcagacatatttgctgagagcgctctgatagatatgtatgcgaaatgtgggaacttggagttggctcttcgtgtttttgaattcatgcctgataagaatgaagtatcatggaacagtataatttcagcctatggggctcatggtcttgttaaagagtcagtgagcttgttacatggtatgcaggaggaaggatataagccagatcatgtaacatttcttgctttgatatctgcttgtgctcatgctgggctggttgaagaaggtgtccaactttttcaatgcatgacgaagaaatatctgattgcaccacgaatggagcactttgcttgcatggtcgacctatacagtcgttctgggaagttagataaggctatacaatttattgctgatatgcctttcaagccagatgctggcatttggggtgctcttctccatgcttgccgtgtgcatcgcaatgttgaacttgcggacatcgcttcccaagaactgttcaagttggaccctgctaattctggttattatgtgctcatgtccaatatcaatgcagttgctgggcgatgggatggtgtatcaaaagttagaagattgatgaaggataataagatcctgaagatacctgggtacagctgggtagatgttaataacagcagccatttatttgttgcatcagataaaagccaccctgagtctgaagatatctacacgtccttgaagaccctgcttcaagaactaagagaggaaggctatgttcccagaccagatctatgtcaccccatgcacccagataacaacacacaggtggaatttaaaaagttctggcaatatgatttgtcctagtggcactgatatgcccttctgatggaaattcaaggaagaacacattgttatacagaccactgcttgttgaaaagcagtatgtgcaattgtgtatgcagtttgacatttgcatgagaaaaaggctgcgtaaagacacatggagaggggtggcggtgcagagtgagcgaagaagaccgaggctgagaagagggaaagggattagggaattgccatactctatttatgtttaagattcaaatggttacatgacccctatatttatggtttcaagaggacttgacctctaagcaatctggacttatcctccatgcaacctggaggaggctgatggctcccctagggccgtcgttcacccacttgttgtgcgcgcgcccagggccgttctttgggcctagccaagggtccgtatttagtccggtgacaatagctttctgtggatatgcctatttctcaagcatgagaaacacacggaagaccaaaagaaaaatctgtgtaaagatattggcgtctatagggagcatgacatattcataagttttcctgtgaggctgcaattatggtgttgctgcttcatatgcaaagttacacgattgagcttgtaacattgaaacaaaggaatgtgctccctcgtcgccaaggacggctcgacgctaatgctcaaccggcgaggcaacggtttctgttgctccatgcaatcaaatcagttcccgtcagtcgcggcctccatggctatccacaagtcggctatggtgtcgagacggccgtcgttcttgagtaacctatacagatccccaattcgtgtgagtgaagaaattaagaaaacatcatgagctgagcagccctcaaggctacatccctccatcatgctcgactctttttagggtttcattcttgcttaatatagtatttgttggcatttcttcgcatgcccgatttgggtgtggtatgaggaattaggctgcaatttcttttttttatccatccatcctagtgcacggaatatcatcttctagctgttataaaaagatttgcccaccctgttagttttgttttttttcttttctgaacacacataagagttgtccatcattatgtcaagaagagaagtctagatgactcatataaccctgagggatgatttggtgaccaggaaaatggatgggatttatgaggacaaattctcttgctattcaaaatagctaagggggcaaacaccgcactagcttgccactcacactagtacgtgaccaacactaaggagggacatcatgaccataaattacggagcccctgttacttttgttcagagtgatttattaactgattcttctgttccagaatatcgatcgaaatgagtaatttattctgatatatgatactattcgaaacatacaccagtccaatgttcatgtactacaaaaggaagggtacctacttcgatctgtggtaactggtatgggagcaaaattatatcattatccgattcctattcactatgcgcaaagaggtcaactatatttcccccttgcagaatcagaaaacttatttgctgtaagctgctattgaagggcagaggagcatatcgccctcaataaaaaacataaataccttcaacaagctcaacaagaggtgacaaggtggacctaggcaaaccctaagccaccgtgctcaacgctg

SEQ ID NO: 52307 - DNA, 4300 bp, Zea Mays
gtcggccgcctcggcttctcttcttgacgacgacgacggcctcgttgcggtcggtcaccgattcgccatgcgcctcgctcgctcaggcctcaagctgccgccgcggccattctgctctaccaccttctccgctacggcggccgtcacggatgtctcctccgctgaccgcttgctggcggtcctgcgcggctgcgtctccgcgccgcacctcccgctgggcctccaaatccacgctcgcgccgtcgtgtccggcgctctctccgaccacaaccacctggcgctccacacccggctcctgggcatgtacgtcctcgcgcgccggttccgcgacgccgtcgcggtgttctccgcgctcccgcgcgccgccgccgcatcgtcgctgccgtggaactggctcatccgcgggtttaccgcggccgggcagcatcacctcgccgtcctcttctacgtcaagatgtggtcccaccccgccgcgccgagccccgacgcgcacaccctcccttacgtcgtcaagtcctgtgccgcgctcggagcgatgtccctgggccgtctagtccaccgcacagcgcgggcgatcgggctcgccaacgatgtctacgttgggagcgcgctcgtcaagatgtacgctgacgctggcctcctcgggaacgcccgcgacgcgttcgacggaataccagagagggattgcgttttgtggaacgtgatgatggacgggtgcataaaggcaggtgacgtggatggcgcggtgcgtttattccggaacatgagggcatctggttgtgagcccaatttcgcgactctggcgtgctttctgtctgtgtgtgccactgacgctgacttgctgtctggggcgcaacttcactctctggcggtgaaatgtggtttagagccggaggtggcagtggctaacacattgctggcgatgtatgccaagtgccagtgcttggatgatgcatggagattgtttgaactgatgccacaggatgacttggtaacctggaatggaatgatttcaggatgtgttcaaaatggccttttcgttgaagcttttggattgttctatgatatgcagaggagtggcgctcgaccagattcgattacgctagtgagtttgctgccggctttgaccgacttgaatggtctcaagcagggtaaggaggtacacggttatattgtcaggaattgtgtgaacatggatgtctttttggtgagtgctttggtagacatctatttcaagtgcagggatgtgaggatggcacagaatttatatgatgcggctagggctatcgatgtggttattggcagtacgatgatatcaggttatgttcttaatgggatgagtgaagaggcactgcaaatgttccgatatttgttagaacagtgcatcaaaccaaatgctgttactatagctagcgtcttgccagggtgtgctagcatggcggctttgcctcttggtcagcagatccatggttatgttctaagaaacgcatatgaaagaaaatgttatgtggagagtgcactgatggacatgtacgcaaagtgtggcagacttgacctgagccattatatcttcttaaaaatgtctcagaaggatgaggtgacatggaactcgatgatttcaagcttttcacagaatggaaaaccacaagaagctctagatcttttccgtcagatgtgtatggaaggaataaagtacaataatataaccatatctgctgccctatccgcatgcgcaagtttaccagctatatattatgggaaggagattcatggtgttaccataaagggtcctataaaggcagacatatttgctgagagcgctctgatagatatgtatgcgaaatgtgggaacttggagttggctcttcgtgtttttgaattcatgcctgataagaatgaagtatcatggaacagtataatttcagcctatggggctcatggtcttgttaaagagtcagtgagcttgttacatggtatgcaggaggaaggatataagccagatcatgtaacatttcttgctttgatatctgcttgtgctcatgctgggctggttgaagaaggtgtccaactttttcaatgcatgacgaagaaatatctgattgcaccacgaatggagcactttgcttgcatggtcgacctatacagtcgttctgggaagttagataaggctatacaatttattgctgatatgcctttcaagccagatgctggcatttggggtgctcttctccatgcttgccgtgtgcatcgcaatgttgaacttgcggacatcgcttcccaagaactgttcaagttggaccctgctaattctggttattatgtgctcatgtccaatatcaatgcagttgctgggcgatgggatggtgtatcaaaagttagaagattgatgaaggataataagatcctgaagatacctgggtacagctgggtagatgttaataacagcagccatttatttgttgcatcagataaaagccaccctgagtctgaagatatctacacgtccttgaagaccctgcttcaagaactaagagaggaaggctatgttcccagaccagatctatgtcaccccatgcacccagataacaacacacaggttctggcaatatgatttgtcctagtggcactgatatgcccttctgatggaaattcaaggaagaacacattgttatacagaccactgcttgttgaaaagcagtatgtgcaattgtgtatgcagtttgacatttgcatgagaaaaaggtgctgcgtaaagacacatggagaggggtggcggtgcagagtgagcgaagaagaccgaggctgagaagagggaaagggattagggaattgccatactctatttatgtttaagattcaaatggttacatgacccctatatttatggtttcaagaggacttgacctctaagcaatctggacttatcctccatgcaacctggaggaggctgatggctcccctagggccgtcgttcacccacttgttgtgcgcgcgcccagggccgttctttgggcctagccaagggtccgtatttagtccggtgacaatagctttctgtggatatgcctatttctcaagcatgagaaacacacggaagaccaaaagaaaaatctgtgtaaagatattggcgtctatagggagcatgacatattcataagttttcctgtgaggctgcaattatggtgttgctgcttcatatgcaaagttacacgattgagcttgtaacattgaaacaaaggaatgtgctccctcgtcgccaaggacggctcgacgctaatgctcaaccggcgaggcaacggtttctgttgctccatgcaatcaaatcagttcccgtcagtcgcggcctccatggctatccacaagtcggctatggtgtcgagacggccgtcgttcttgagtaacctatacagatccccaattcgtgtgagtgaagaaattaagaaaacatcatgagctgagcagccctcaaggctacatccctccatcatgctcgactctttttagggtttcattcttgcttaatatagtatttgttggcatttcttcgcatgcccgatttgggtgtggtatgaggaattaggctgcaatttcttttttttatccatccatcctagtgcacggaatatcatcttctagctgttataaaaagatttgcccaccctgttagttttgttttttttcttttctgaacacacataagagttgtccatcattatgtcaagaagagaagtctagatgactcatataaccctgagggatgatttggtgaccaggaaaatggatgggatttatgaggacaaattctcttgctattcaaaatagctaagggggcaaacaccgcactagcttgccactcacactagtacgtgaccaacactaaggagggacatcatgaccataaattacggagcccctgttacttttgttcagagtgatttattaactgattcttctgttccagaatatcgatcgaaatgagtaatttattctgatatatgatactattcgaaacatacaccagtccaatgttcatgtactacaaaaggaagggtacctacttcgatctgtggtaactggtatgggagcaaaattatatcattatccgattcctattcactatgcgcaaagaggtcaactatatttcccccttgcagaatcagaaaacttatttgctgtaagctgctattgaagggcagaggagcatatcgccctcaataaaaaacataaataccttcaacaagctcaacaagaggtgacaaggtggacctaggcaaaccctaagccaccgtgctcaacgctg

SEQ ID NO: 52308 - DNA, 4314 bp, Zea Mays
gtcgtgtttcataataccaaatttctccgcccacgcttgggcagtcggccgcctcggcttctcttcttgacgacgacgacggcctcgttgcggtcggtcaccgattcgccatgcgcctcgctcgctcaggcctcaagctgccgccgcggccattctgctctaccaccttctccgctacggcggccgtcacggatgtctcctccgctgaccgcttgctggcggtcctgcgcggctgcgtctccgcgccgcacctcccgctgggcctccaaatccacgctcgcgccgtcgtgtccggcgctctctccgaccacaaccacctggcgctccacacccggctcctgggcatgtacgtcctcgcgcgccggttccgcgacgccgtcgcggtgttctccgcgctcccgcgcgccgccgccgcatcgtcgctgccgtggaactggctcatccgcgggtttaccgcggccgggcagcatcacctcgccgtcctcttctacgtcaagatgtggtcccaccccgccgcgccgagccccgacgcgcacaccctcccttacgtcgtcaagtcctgtgccgcgctcggagcgatgtccctgggccgtctagtccaccgcacagcgcgggcgatcgggctcgccaacgatgtctacgttgggagcgcgctcgtcaagatgtacgctgacgctggcctcctcgggaacgcccgcgacgcgttcgacggaataccagagagggattgcgttttgtggaacgtgatgatggacgggtgcataaaggcaggtgacgtggatggcgcggtgcgtttattccggaacatgagggcatctggttgtgagcccaatttcgcgactctggcgtgctttctgtctgtgtgtgccactgacgctgacttgctgtctggggcgcaacttcactctctggcggtgaaatgtggtttagagccggaggtggcagtggctaacacattgctggcgatgtatgccaagtgccagtgcttggatgatgcatggagattgtttgaactgatgccacaggatgacttggtaacctggaatggaatgatttcaggatgtgttcaaaatggccttttcgttgaagcttttggattgttctatgatatgcagaggagtggcgctcgaccagattcgattacgctagtgagtttgctgccggctttgaccgacttgaatggtctcaagcagggtaaggaggtacacggttatattgtcaggaattgtgtgaacatggatgtctttttggtgagtgctttggtagacatctatttcaagtgcagggatgtgaggatggcacagaatttatatgatgcggctagggctatcgatgtggttattggcagtacgatgatatcaggttatgttcttaatgggatgagtgaagaggcactgcaaatgttccgatatttgttagaacagtgcatcaaaccaaatgctgttactatagctagcgtcttgccagggtgtgctagcatggcggctttgcctcttggtcagcagatccatggttatgttctaagaaacgcatatgaaagaaaatgttatgtggagagtgcactgatggacatgtacgcaaagtgtggcagacttgacctgagccattatatcttcttaaaaatgtctcagaaggatgaggtgacatggaactcgatgatttcaagcttttcacagaatggaaaaccacaagaagctctagatcttttccgtcagatgtgtatggaaggaataaagtacaataatataaccatatctgctgccctatccgcatgcgcaagtttaccagctatatattatgggaaggagattcatggtgttaccataaagggtcctataaaggcagacatatttgctgagagcgctctgatagatatgtatgcgaaatgtgggaacttggagttggctcttcgtgtttttgaattcatgcctgataagaatgaagtatcatggaacagtataatttcagcctatggggctcatggtcttgttaaagagtcagtgagcttgttacatggtatgcaggaggaaggatataagccagatcatgtaacatttcttgctttgatatctgcttgtgctcatgctgggctggttgaagaaggtgtccaactttttcaatgcatgacgaagaaatatctgattgcaccacgaatggagcactttgcttgcatggtcgacctatacagtcgttctgggaagttagataaggctatacaatttattgctgatatgcctttcaagccagatgctggcatttggggtgctcttctccatgcttgccgtgtgcatcgcaatgttgaacttgcggacatcgcttcccaagaactgttcaagttggaccctgctaattctggttattatgtgctcatgtccaatatcaatgcagttgctgggcgatgggatggtgtatcaaaagttagaagattgatgaaggataataagatcctgaagatacctgggtacagctgggtagatgttaataacagcagccatttatttgttgcatcagataaaagccaccctgagtctgaagatatctacacgtccttgaagaccctgcttcaagaactaagagaggaaggctatgttcccagaccagatctatgtcaccccatgcacccagataacaacacacaggttctggcaatatgatttgtcctagtggcactgatatgcccttctgatggaaattcaaggaagaacacattgttatacagaccactgcttgttgaaaagcagtatgtgcaattgtgtatgcagtttgacatttgcatgagaaaaaggtggctgcgtaaagacacatggagaggggtggcggtgcagagtgagcgaagaagaccgaggctgagaagagggaaagggattagggaattgccatactctatttatgtttaagattcaaatggttacatgacccctatatttatggtttcaagaggacttgacctctaagcaatctggacttatcctccatgcaacctgtagggaggaggctgatggctcccctagggccgtcgttcacccacttgttgtgcgcgcgcccagggccgttctttgggcctagccaaggggatatgcctatttctcaagcatgagaaacacacggaagaccaaaagaaaaatctgtgtaaagatattggcgtctatagggagcatgacatattcataagttttcctgtgaggctgcaattatggtgttgctgcttcatatgcaaagttacacgattgagcttgtaacattgaaacaaaggaatgtgctccctcgtcgccaaggacggctcgacgctaatgctcaaccggcgaggcaacggtttctgttgctccatgcaatcaaatcagttcccgtcagtcgcggcctccatggctatccacaagtcggctatggtgtcgagacggccgtcgttcttgagtaacctatacagatccccaattcgtgtgagtgaagaaattaagaaaacatcatgagctgagcagccctcaaggctacatccctccatcatgctcgactctttttagggtttcattcttgcttaatatagtatttgttggcatttcttcgcatgcccgatttgggtgtggtatgaggaattaggctgcaatttcttttttttatccatccatcctagtgcacggaatatcatcttctagctgttataaaaagatttgcccaccctgttagttttgttttttttcttttctgaacacacataagagttgtccatcattatgtcaagaagagaagtctagatgactcatataaccctgagggatgatttggtgaccaggaaaatggatgggatttatgaggacaaattctcttgctattcaaaatagctaagggggcaaacaccgcactagcttgccactcacactagtacgtgaccaacactaaggagggacatcatgaccataaattacggagcccctgttacttttgttcagagtgatttattaactgattcttctgttccagaatatcgatcgaaatgagtaatttattctgatatatgatactattcgaaacatacaccagtccaatgttcatgtactacaaaaggaagggtacctacttcgatctgtggtaactggtatgggagcaaaattatatcattatccgattcctattcactatgcgcaaagaggtcaactatatttcccccttgcagaatcagaaaacttatttgctgtaagctgctattgaagggcagaggagcatatcgccctcaataaaaaacataaataccttcaacaagctcaacaagaggtgacaaggtggacctaggcaaaccctaagccaccgtgctcaacgctg

SEQ ID NO: 52309 - DNA, 4348 bp, Zea Mays
gtcgtgtttcataataccaaatttctccgcccacgcttgggcagtcggccgcctcggcttctcttcttgacgacgacgacggcctcgttgcggtcggtcaccgattcgccatgcgcctcgctcgctcaggcctcaagctgccgccgcggccattctgctctaccaccttctccgctacggcggccgtcacggatgtctcctccgctgaccgcttgctggcggtcctgcgcggctgcgtctccgcgccgcacctcccgctgggcctccaaatccacgctcgcgccgtcgtgtccggcgctctctccgaccacaaccacctggcgctccacacccggctcctgggcatgtacgtcctcgcgcgccggttccgcgacgccgtcgcggtgttctccgcgctcccgcgcgccgccgccgcatcgtcgctgccgtggaactggctcatccgcgggtttaccgcggccgggcagcatcacctcgccgtcctcttctacgtcaagatgtggtcccaccccgccgcgccgagccccgacgcgcacaccctcccttacgtcgtcaagtcctgtgccgcgctcggagcgatgtccctgggccgtctagtccaccgcacagcgcgggcgatcgggctcgccaacgatgtctacgttgggagcgcgctcgtcaagatgtacgctgacgctggcctcctcgggaacgcccgcgacgcgttcgacggaataccagagagggattgcgttttgtggaacgtgatgatggacgggtgcataaaggcaggtgacgtggatggcgcggtgcgtttattccggaacatgagggcatctggttgtgagcccaatttcgcgactctggcgtgctttctgtctgtgtgtgccactgacgctgacttgctgtctggggcgcaacttcactctctggcggtgaaatgtggtttagagccggaggtggcagtggctaacacattgctggcgatgtatgccaagtgccagtgcttggatgatgcatggagattgtttgaactgatgccacaggatgacttggtaacctggaatggaatgatttcaggatgtgttcaaaatggccttttcgttgaagcttttggattgttctatgatatgcagaggagtggcgctcgaccagattcgattacgctagtgagtttgctgccggctttgaccgacttgaatggtctcaagcagggtaaggaggtacacggttatattgtcaggaattgtgtgaacatggatgtctttttggtgagtgctttggtagacatctatttcaagtgcagggatgtgaggatggcacagaatttatatgatgcggctagggctatcgatgtggttattggcagtacgatgatatcaggttatgttcttaatgggatgagtgaagaggcactgcaaatgttccgatatttgttagaacagtgcatcaaaccaaatgctgttactatagctagcgtcttgccagggtgtgctagcatggcggctttgcctcttggtcagcagatccatggttatgttctaagaaacgcatatgaaagaaaatgttatgtggagagtgcactgatggacatgtacgcaaagtgtggcagacttgacctgagccattatatcttcttaaaaatgtctcagaaggatgaggtgacatggaactcgatgatttcaagcttttcacagaatggaaaaccacaagaagctctagatcttttccgtcagatgtgtatggaaggaataaagtacaataatataaccatatctgctgccctatccgcatgcgcaagtttaccagctatatattatgggaaggagattcatggtgttaccataaagggtcctataaaggcagacatatttgctgagagcgctctgatagatatgtatgcgaaatgtgggaacttggagttggctcttcgtgtttttgaattcatgcctgataagaatgaagtatcatggaacagtataatttcagcctatggggctcatggtcttgttaaagagtcagtgagcttgttacatggtatgcaggaggaaggatataagccagatcatgtaacatttcttgctttgatatctgcttgtgctcatgctgggctggttgaagaaggtgtccaactttttcaatgcatgacgaagaaatatctgattgcaccacgaatggagcactttgcttgcatggtcgacctatacagtcgttctgggaagttagataaggctatacaatttattgctgatatgcctttcaagccagatgctggcatttggggtgctcttctccatgcttgccgtgtgcatcgcaatgttgaacttgcggacatcgcttcccaagaactgttcaagttggaccctgctaattctggttattatgtgctcatgtccaatatcaatgcagttgctgggcgatgggatggtgtatcaaaagttagaagattgatgaaggataataagatcctgaagatacctgggtacagctgggtagatgttaataacagcagccatttatttgttgcatcagataaaagccaccctgagtctgaagatatctacacgtccttgaagaccctgcttcaagaactaagagaggaaggctatgttcccagaccagatctatgtcaccccatgcacccagataacaacacacaggttctggcaatatgatttgtcctagtggcactgatatgcccttctgatggaaattcaaggaagaacacattgttatacagaccactgcttgttgaaaagcagtatgtgcaattgtgtatgcagtttgacatttgcatgagaaaaaggtggctgcgtaaagacacatggagaggggtggcggtgcagagtgagcgaagaagaccgaggctgagaagagggaaagggattagggaattgccatactctatttatgtttaagattcaaatggttacatgacccctatatttatggtttcaagaggacttgacctctaagcaatctggacttatcctccatgcaacctgtagggaggaggctgatggctcccctagggccgtcgttcacccacttgttgtgcgcgcgcccagggccgttctttgggcctagccaagggtccgtatttagtccggtgacaatagctttctgtggatatgcctatttctcaagcatgagaaacacacggaagaccaaaagaaaaatctgtgtaaagatattggcgtctatagggagcatgacatattcataagttttcctgtgaggctgcaattatggtgttgctgcttcatatgcaaagttacacgattgagcttgtaacattgaaacaaaggaatgtgctccctcgtcgccaaggacggctcgacgctaatgctcaaccggcgaggcaacggtttctgttgctccatgcaatcaaatcagttcccgtcagtcgcggcctccatggctatccacaagtcggctatggtgtcgagacggccgtcgttcttgagtaacctatacagatccccaattcgtgtgagtgaagaaattaagaaaacatcatgagctgagcagccctcaaggctacatccctccatcatgctcgactctttttagggtttcattcttgcttaatatagtatttgttggcatttcttcgcatgcccgatttgggtgtggtatgaggaattaggctgcaatttcttttttttatccatccatcctagtgcacggaatatcatcttctagctgttataaaaagatttgcccaccctgttagttttgttttttttcttttctgaacacacataagagttgtccatcattatgtcaagaagagaagtctagatgactcatataaccctgagggatgatttggtgaccaggaaaatggatgggatttatgaggacaaattctcttgctattcaaaatagctaagggggcaaacaccgcactagcttgccactcacactagtacgtgaccaacactaaggagggacatcatgaccataaattacggagcccctgttacttttgttcagagtgatttattaactgattcttctgttccagaatatcgatcgaaatgagtaatttattctgatatatgatactattcgaaacatacaccagtccaatgttcatgtactacaaaaggaagggtacctacttcgatctgtggtaactggtatgggagcaaaattatatcattatccgattcctattcactatgcgcaaagaggtcaactatatttcccccttgcagaatcagaaaacttatttgctgtaagctgctattgaagggcagaggagcatatcgccctcaataaaaaacataaataccttcaacaagctcaacaagaggtgacaaggtggacctaggcaaaccctaagccaccgtgctcaacgctg

SEQ ID NO: 52310 - DNA, 4346 bp, Zea Mays
ccgtcgtgtttcataataccaaatttctccgcccacgcttgggcagtcggccgcctcggcttctcttcttgacgacgacgacggcctcgttgcggtcggtcaccgattcgccatgcgcctcgctcgctcaggcctcaagctgccgccgcggccattctgctctaccaccttctccgctacggcggccgtcacggatgtctcctccgctgaccgcttgctggcggtcctgcgcggctgcgtctccgcgccgcacctcccgctgggcctccaaatccacgctcgcgccgtcgtgtccggcgctctctccgaccacaaccacctggcgctccacacccggctcctgggcatgtacgtcctcgcgcgccggttccgcgacgccgtcgcggtgttctccgcgctcccgcgcgccgccgccgcatcgtcgctgccgtggaactggctcatccgcgggtttaccgcggccgggcagcatcacctcgccgtcctcttctacgtcaagatgtggtcccaccccgccgcgccgagccccgacgcgcacaccctcccttacgtcgtcaagtcctgtgccgcgctcggagcgatgtccctgggccgtctagtccaccgcacagcgcgggcgatcgggctcgccaacgatgtctacgttgggagcgcgctcgtcaagatgtacgctgacgctggcctcctcgggaacgcccgcgacgcgttcgacggaataccagagagggattgcgttttgtggaacgtgatgatggacgggtgcataaaggcaggtgacgtggatggcgcggtgcgtttattccggaacatgagggcatctggttgtgagcccaatttcgcgactctggcgtgctttctgtctgtgtgtgccactgacgctgacttgctgtctggggcgcaacttcactctctggcggtgaaatgtggtttagagccggaggtggcagtggctaacacattgctggcgatgtatgccaagtgccagtgcttggatgatgcatggagattgtttgaactgatgccacaggatgacttggtaacctggaatggaatgatttcaggatgtgttcaaaatggccttttcgttgaagcttttggattgttctatgatatgcagaggagtggcgctcgaccagattcgattacgctagtgagtttgctgccggctttgaccgacttgaatggtctcaagcagggtaaggaggtacacggttatattgtcaggaattgtgtgaacatggatgtctttttggtgagtgctttggtagacatctatttcaagtgcagggatgtgaggatggcacagaatttatatgatgcggctagggctatcgatgtggttattggcagtacgatgatatcaggttatgttcttaatgggatgagtgaagaggcactgcaaatgttccgatatttgttagaacagtgcatcaaaccaaatgctgttactatagctagcgtcttgccagggtgtgctagcatggcggctttgcctcttggtcagcagatccatggttatgttctaagaaacgcatatgaaagaaaatgttatgtggagagtgcactgatggacatgtacgcaaagtgtggcagacttgacctgagccattatatcttcttaaaaatgtctcagaaggatgaggtgacatggaactcgatgatttcaagcttttcacagaatggaaaaccacaagaagctctagatcttttccgtcagatgtgtatggaaggaataaagtacaataatataaccatatctgctgccctatccgcatgcgcaagtttaccagctatatattatgggaaggagattcatggtgttaccataaagggtcctataaaggcagacatatttgctgagagcgctctgatagatatgtatgcgaaatgtgggaacttggagttggctcttcgtgtttttgaattcatgcctgataagaatgaagtatcatggaacagtataatttcagcctatggggctcatggtcttgttaaagagtcagtgagcttgttacatggtatgcaggaggaaggatataagccagatcatgtaacatttcttgctttgatatctgcttgtgctcatgctgggctggttgaagaaggtgtccaactttttcaatgcatgacgaagaaatatctgattgcaccacgaatggagcactttgcttgcatggtcgacctatacagtcgttctgggaagttagataaggctatacaatttattgctgatatgcctttcaagccagatgctggcatttggggtgctcttctccatgcttgccgtgtgcatcgcaatgttgaacttgcggacatcgcttcccaagaactgttcaagttggaccctgctaattctggttattatgtgctcatgtccaatatcaatgcagttgctgggcgatgggatggtgtatcaaaagttagaagattgatgaaggataataagatcctgaagatacctgggtacagctgggtagatgttaataacagcagccatttatttgttgcatcagataaaagccaccctgagtctgaagatatctacacgtccttgaagaccctgcttcaagaactaagagaggaaggctatgttcccagaccagatctatgtcaccccatgcacccagataacaacacacaggttctggcaatatgatttgtcctagtggcactgatatgcccttctgatggaaattcaaggaagaacacattgttatacagaccactgcttgttgaaaagcagtatgtgcaattgtgtatgcagtttgacatttgcatgagaaaaaggtggctgcgtaaagacacatggagaggggtggcggtgcagagtgagcgaagaagaccgaggctgagaagagggaaagggattagggaattgccatactctatttatgtttaagattcaaatggttacatgacccctatatttatggtttcaagaggacttgacctctaagcaatctggacttatcctccatgcaacctggaggaggctgatggctcccctagggccgtcgttcacccacttgttgtgcgcgcgcccagggccgttctttgggcctagccaagggtccgtatttagtccggtgacaatagctttctgtggatatgcctatttctcaagcatgagaaacacacggaagaccaaaagaaaaatctgtgtaaagatattggcgtctatagggagcatgacatattcataagttttcctgtgaggctgcaattatggtgttgctgcttcatatgcaaagttacacgattgagcttgtaacattgaaacaaaggaatgtgctccctcgtcgccaaggacggctcgacgctaatgctcaaccggcgaggcaacggtttctgttgctccatgcaatcaaatcagttcccgtcagtcgcggcctccatggctatccacaagtcggctatggtgtcgagacggccgtcgttcttgagtaacctatacagatccccaattcgtgtgagtgaagaaattaagaaaacatcatgagctgagcagccctcaaggctacatccctccatcatgctcgactctttttagggtttcattcttgcttaatatagtatttgttggcatttcttcgcatgcccgatttgggtgtggtatgaggaattaggctgcaatttcttttttttatccatccatcctagtgcacggaatatcatcttctagctgttataaaaagatttgcccaccctgttagttttgttttttttcttttctgaacacacataagagttgtccatcattatgtcaagaagagaagtctagatgactcatataaccctgagggatgatttggtgaccaggaaaatggatgggatttatgaggacaaattctcttgctattcaaaatagctaagggggcaaacaccgcactagcttgccactcacactagtacgtgaccaacactaaggagggacatcatgaccataaattacggagcccctgttacttttgttcagagtgatttattaactgattcttctgttccagaatatcgatcgaaatgagtaatttattctgatatatgatactattcgaaacatacaccagtccaatgttcatgtactacaaaaggaagggtacctacttcgatctgtggtaactggtatgggagcaaaattatatcattatccgattcctattcactatgcgcaaagaggtcaactatatttcccccttgcagaatcagaaaacttatttgctgtaagctgctattgaagggcagaggagcatatcgccctcaataaaaaacataaataccttcaacaagctcaacaagaggtgacaaggtggacctaggcaaaccctaagccaccgtgctcaacgctg

SEQ ID NO: 52311 - DNA, 1262 bp, Zea Mays
cgattgctcactatcctaccaggttttcaagtttgccattccttgggaggaggcactggatctggcatgggcacccttcttatttccaagatcagggaggagtacccagacagaatgatgttgacgttctctgtattcccatcaccaaaggtctcagatactgttgtggagccttacaatgctacactttctgttcaccaactcgttgagaatgctgatgaatgtatggtgcttgacaacgaggctctgtatgacatatgcttccgcacactaaagctctccaccccgagctttggtgacctgaaccatcttatctctgctaccatgagtggcgtgacatgctgtctgaggttcccgggtcagctcaactctgatctgcgcaagcttgccgtgaacctcatcccattccctcgtctgcacttcttcatggtcggctttgctccgctgacctctcgtgggtcgcagcagtaccgtgccctcacggtccctgagctgacccagcagatgtgggatgccaagaacatgatgtgcgcggccgacccccgccacggccgctacctgacggcctcggccatgttccgcgggaagatgagcaccaaggaggtggacgagcagatgctcaacgtccagaacaagaactcgtcctacttcgtggagtggatccccaacaacgtcaagtcgagcgtgtgcgacatcccgcccaggggcctgaagatggcggggaccttcgtggggaactccacctccatccaggagatgttccgcagggtgagcgagcagttcaccgccatgttcaggcgcaaggccttcctgcactggtacaccggcgaggggatggatgagatggagttcactgaggccgagagcaacatgaacgatctggtcgccgagtaccagcagtaccaggacgccaccgccgacgaggagtacgaggacgaagaggaagaggagaacgtggcagaatagccatgacctccggtgccctttttcagggccaccgcatccgacaggttgtgtctctgtgaatgagtttgtttgtttcttttctctgcttctcgtggcttgcgtcatggattggtaattggttaagcttccgctggggttgcgcctgtgcttcgactgcgggcactgtaatgtaactactgtaatgggtcaaagtaggcttcacactggtggtgctggtctcctgtaattcctgacgagtatttgtagggagtgattttatcttcttcttttgtgtgaaagcctgtgtcagtctgcat

SEQ ID NO: 52312 - DNA, 1132 bp, Zea Mays
atggacaccgtctctgaggccgccatggccgcggccatggcctccctcggcgccgccgccgtcgtgcaccgcaacactgagccccacgcccaggccgccatcgtccgcgccgccaagtcccgccgcctccccttcgtatcctccgtgcccttcttctccccgtcctccgcgccgacgctcaacgggttcgctggcagcgattacgccctcgtcaccgagcgcggagattcgctctccaggctcgtcggtgtcgctgtcgcagctgatgctgtctcccgtgacgttgtcgatctcatcaccgtcaaggatgtggagcgcatcaggagctatcccaagttaggcaagccatcgcttggagtggacgggaagtttgtagttgcggcctccatcgggacccgtgaggatggcaagggaaggctagagcggctagttaaggcgggggcaaatgctatcgtgattgatagttcacaggggaactccatctaccagcttgatatgataaagtttgccaagaagatgtatccggaggtggattttattgggggtaatgcagtgacaattgcgcaggcccagaatttgattcaagctggtgcagatggattgcgtgttggaatgggttctggctcaatttgtaccacccaagaggtttgtgctgttggaagaggacaggcaacatcagtgtataaggtttcatcttatgccaatgatcacaatgtaccagttattgctgatggtggaatttcaaactctggacatatcgtgaaagctttgtcgctgggggcatccactgttatgatgggcagctttttagctggcagttatgaagctcctggtacttatgaatacaaggacggccgacgagttaaaaaatacagagacatgggctctctcgaagccatgacaaaagggagtgatgtaaagtaccttggtgatactttcaagctcaaagtcgcacatggcgtcgttggtgcagtagctgacaaaggctccgtactgaggttcattccttacactatgcaagcagttgggcaaggattggcgcagattctctgcggtcagctcatgatcttttgagatcagagacactcagattagaggtgagaaccggtgctgcccaggttgaaggaggaat

SEQ ID NO: 52313 - DNA, 3637 bp, Zea Mays
gtcaaatgcgatcactcaccaccccactactccactaccaccacctacctaaccaaaagctacaagccttgagagaatccaaacgcaaatgccatgtctgcgttcccggctttgcttgcgaatggggcgaaatgagctggggggcgcagcgcagccgcaacgcggtgcaagtgcaaccagaggcaggcggccatgtcatgtcaccatggacgtgtgacttccaaggcaatcctcctcccactcctcatcagtcctcccccgccaacaacaacatctgaaagcgtctactactagcgcaagcgaggttgacatgtcttctcgccctctgtccctgccccgccgcacggctcggtgacggtgaggcacacagcacagcaagcgaggaggttgacgacaacgagagccccggaacgctgacgcgcaccaacccgggggaggagacgccgcgctctttcaccctcgcgcacctaactgacaagccgacgcctggcctgaccgcgaggagagaggttcatggtgcagtggagcagcgggcggcagcggagcctcgacccctcctcctcctcctcccccgcgagacgggcgccgagagatggccaaggtgcccgatctcggctccgacttcgcccagaagctgctcagggacctccgccgccgccgggagcggctcggcttcgactccaccgccgccgcgcctcgggctcgggatgcttattcgaatgctcagaaaccacctcaagttcagaagccacaacaacaagcagctcctcggcctcgggtggcgacaagatcagaagcacaaacgagcgtacgacaaggcagcagcagcagctccattgccagaccagggacgccgcgccgccatgacgcgccggccatcgccgattcgcacgccaccgtgccgttacaaggaggacgaggaggcaagcagacggcgcccgcggcgaacgccggcggcgtggacgtgcagatggcgctggccctcgcgctcagcaacagcggcaagctccagaacgtgcatctcgtggcgcgccagggcggcagcggcggctccgcgttcttcggcgagccgtgcaggatggcgtcgcaggcgcggcgcctcctggctcctggcgcgcacgtcggcaaggtggcgatcggcgtccagaatctcaacgacattctcgtggcgtactcctccggcggtgctgccggcgcgaggaggggctcggttgagatcgggaagcagctgctcagaggtgccatggacctcgaggagtcgctcaacatgctcatgatgctccaggacgctacagactacatggaaatggggagctcagggaacgacggcaaggtgctgctgctggagggcactgagagctggaagaggtccgcgccgcgttcgacgagctctgcctctgcaaggctggtagagatcgtcgacgatgattcagggaccgagcaggccgacgatgcgaagagctcgtcagatacgttcatgcagatcgttcctcacggcatgtctcagagttacagacggaaccacatctcgccctcgcagctcgccggtgctgcaaccaattgcaagagcaatgcttcgagtggcgagaaggatggttcaaaggtgaggatgcccggtctgattgccaagttgatggggctggaaaaccttccgtcagcgaagacggctgcagagcgcaaggagacagagaggtttgtgaaacctgaggcggtgccaagaaaatcaacggcggcaactgtgatggctggcacattaccgatacgaattatagcttcggaacggatgccatccagagggcagctcaagaattttcagacaagagagtggaatattagcctgacaaagtctgaagaacctgtactgtcaagtagattttcacatctcaaagttgacaagcaaacaaggcagaccatgaggcagatgttaagcaaacaggaaggtacggagagaagagctagtgtaaaccaagtagctgatgagaaaatcgttcatcaggatacgaagctggctgaagacagcaaccagcaaaagacaacagtcagtgcaggaagaaagatgagtttccttcagaggtttaggaagactggaaagaacaaaccagccacagaagagaaagtcactgttgaagaaaataaacagaagctcgggaagaagcaaaccacaagcacaaaacagagagacagtgaggtgaagccgaggaagacgagagagaagtttaacaaggagaaccttgccaatcctggaaacaagactctaggaaataatggcaaaactgccaagactgatcaaacgagaaggcaagcacaaagtaaaccttcagataagcaagtcatggaaaagaaggtgcagagttaccgtcgaatgcagagtgaaacagccattcagaacctagaacagaagaggccactgaaaccagaaccagcgcattcgaacacgaaggagaagcttcagtctgttacaccgacagaaccacagaatggagaaggcacaaaagtagatgataccagaagccagaaaccatcagacaacacgcccggtgatgatggtgtatgcgaacaatctgcagcggagatggaagatagcggcacaaaagctttgccgtaccaatcggaaaaggaattgactgaagaaaccattgatccgatcaccgcagcacaggctacacctgaatcaattgctgagacaaatgatgacagcacagtcagtgaggctatacagacaccggaaacatttcctgaggaagaacagcagcaacaaatgaaagaagtgaacgatgaatcaacgaatggactggatcatctcatgaaccccagtaacccgaatgatttgagaaaccacaatatggatgttgtctcatgcgattccttcacagagaaccagctcctgcttgcagagatgttgctgaaggatccctacctactcgaaaccacgaaggcgatcaccgggttccacgtcccagccagcgcagctcaggttaacacggggaaatggctagacgaaggcaacagggttctttcagacatcgggcgcgaagtgatcagaaggaaaggcaagcgaatggaggcgatggtggatgtcagcgcgacacgtgccgctaacctgaagctgcggactctggacgatctggtcagggaactggacagcgacatccagtctctccacgtcccgaggaaaattcagcaacggggggatgaccacagcacagctgagaacctgaggatggtcctccgctacgacatggagagcacgcactcggacgctaactcggtgtgggactttggttggaaccgcgcgtgggacctgccggtcgagaagaacgaagtcgtcagggatttggagaagaacatattgggtggtatcatcactgatgtagcaagggagcttatcgatgtatccatgcgccagcgccatggcccatgggtgctgtgcctgtgagtcttgatcttgactgacttggatatatatatgtgggtattttcaatctgggtatgtacgaaggttttccagtagaaacattcatatgatttttgtgtgtatatataaaaggaggaacgtgtgcataaaagaaagggcaaatcttctgagtttatgtgttctttggtgatacagtttttttttaagaaaaaaagaaagggc

SEQ ID NO: 52314 - DNA, 3680 bp, Zea Mays
gtcacagcaaaatcctttacgttttgcacaaatccacatcatggtcaaatgcgatcactcaccaccccactactccactaccaccacctacctaaccaaaagctacaagccttgagagaatccaaacgcaaatgccatgtctgcgttcccggctttgcttgcgaatggggcgaaatgagctggggggcgcagcgcagccgcaacgcggtgcaagtgcaaccagaggcaggcggccatgtcatgtcaccatggacgtgtgacttccaaggcaatcctcctcccactcctcatcagtcctcccccgccaacaacaacatctgaaagcgtctactactagcgcaagcgaggttgacatgtcttctcgccctctgtccctgccccgccgcacggctcggtgacggtgaggcacacagcacagcaagcgaggaggttgacgacaacgagagccccggaacgctgacgcgcaccaacccgggggaggagacgccgcgctctttcaccctcgcgcacctaactgacaagccgacgcctggcctgaccgcgaggagagaggttcatggtgcagtggagcagcgggcggcagcggagcctcgacccctcctcctcctcctcccccgcgagacgggcgccgagagatggccaaggtgcccgatctcggctccgacttcgcccagaagctgctcagggacctccgccgccgccgggagcggctcggcttcgactccaccgccgccgcgcctcgggctcgggatgcttattcgaatgctcagaaaccacctcaagttcagaagccacaacaacaagcagctcctcggcctcgggtggcgacaagatcagaagcacaaacgagccaccgacaaggcagcagcagcagctccattgccagaccagggacgccgcgccgccatgacgcgccggccatcgccgattcgcacgccaccgtgccgttacaaggaggacgaggaggcaagcagacggcgcccgcggcgaacgccggcggcgtggacgtgcagatggcgctggccctcgcgctcagcaacagcggcaagctccagaacgtgcatctcgtggcgcgccagggcggcagcggcggctccgcgttcttcggcgagccgtgcaggatggcgtcgcaggcgcggcgcctcctggctcctggcgcgcacgtcggcaaggtggcgatcggcgtccagaatctcaacgacattctcgtggcgtactcctccggcggtgctgccggcgcgaggaggggctcggttgagatcgggaagcagctgctcagaggtgccatggacctcgaggagtcgctcaacatgctcatgatgctccaggacgctacagactacatggaaatggggagctcagggaacgacggcaaggtgctgctgctggagggcactgagagctggaagaggtccgcgccgcgttcgacgagctctgcctctgcaaggctggtagagatcgtcgacgatgattcagggaccgagcaggccgacgatgcgaagagctcgtcagatacgttcatgcagatcgttcctcacggcatgtctcagagttacagacggaaccacatctcgccctcgcagctcgccggtgctgcaaccaattgcaagagcaatgcttcgagtggcgagaaggatggttcaaaggtgaggatgcccggtctgattgccaagttgatggggctggaaaaccttccgtcagcgaagacggctgcagagcgcaaggagacagagaggtttgtgaaacctgaggcggtgccaagaaaatcaacggcggcaactgtgatggctggcacattaccgatacgaattatagcttcggaacggatgccatccagagggcagctcaagaattttcagacaagagagtggaatattagcctgacaaagtctgaagaacctgtactgtcaagtagattttcacatctcaaagttgacaagcaaacaaggcagaccatgaggcagatgttaagcaaacaggaaggtacggagagaagagctagtgtaaaccaagtagctgatgagaaaatcgttcatcaggatacgaagctggctgaagacagcaaccagcaaaagacaacagtcagtgcaggaagaaagatgagtttccttcagaggtttaggaagactggaaagaacaaaccagccacagaagagaaagtcactgttgaagaaaataaacagaagctcgggaagaagcaaaccacaagcacaaaacagagagacagtgaggtgaagccgaggaagacgagagagaagtttaacaaggagaaccttgccaatcctggaaacaagactctaggaaataatggcaaaactgccaagactgatcaaacgagaaggcaagcacaaagtaaaccttcagataagcaagtcatggaaaagaaggtgcagagttaccgtcgaatgcagagtgaaacagccattcagaacctagaacagaagaggccactgaaaccagaaccagcgcattcgaacacgaaggagaagcttcagtctgttacaccgacagaaccacagaatggagaaggcacaaaagtagatgataccagaagccagaaaccatcagacaacacgcccggtgatgatggtgtatgcgaacaatctgcagcggagatggaagatagcggcacaaaagctttgccgtaccaatcggaaaaggaattgactgaagaaaccattgatccgatcaccgcagcacaggctacacctgaatcaattgctgagacaaatgatgacagcacagtcagtgaggctatacagacaccggaaacatttcctgaggaagaacagcagcaacaaatgaaagaagtgaacgatgaatcaacgaatggactggatcatctcatgaaccccagtaacccgaatgatttgagaaaccacaatatggatgttgtctcatgcgattccttcacagagaaccagctcctgcttgcagagatgttgctgaaggatccctacctactcgaaaccacgaaggcgatcaccgggttccacgtcccagccagcgcagctcaggttaacacggggaaatggctagacgaaggcaacagggttctttcagacatcgggcgcgaagtgatcagaaggaaaggcaagcgaatggaggcgatggtggatgtcagcgcgacacgtgccgctaacctgaagctgcggactctggacgatctggtcagggaactggacagcgacatccagtctctccacgtcccgaggaaaattcagcaacggggggatgaccacagcacagctgagaacctgaggatggtcctccgctacgacatggagagcacgcactcggacgctaactcggtgtgggactttggttggaaccgcgcgtgggacctgccggtcgagaagaacgaagtcgtcagggatttggagaagaacatattgggtggtatcatcactgatgtagcaagggagcttatcgatgtatccatgcgccagcgccatggcccatgggtgctgtgcctgtgagtcttgatcttgactgacttggatatatatatgtgggtattttcaatctgggtatgtacgaaggttttccagtagaaacattcatatgatttttgtgtgtatatataaaaggaggaacgtgtgcataaaagaaagggcaaatcttctgagtttatgtgttctttggtgatacagtttttttttaagaaaaaaagaaagggc

SEQ ID NO: 52315 - DNA, 3621 bp, Zea Mays
aaagtcacagcaaaatcctttacgttttgcacaaatccacatcatggtcaaatgcgatcactcaccaccccactactccactaccaccacctacctaaccaaaagctacaagccttgagagaatccaaacgcaaatgccatgtctgcgttcccggctttgcttgcgaatggggcgaaatgagctggggggcgcagcgcagccgcaacgcggtgcaagtgcaaccagaggcaggcggccatgtcatgtcaccatggacgtgtgacttccaaggcaatcctcctcccactcctcatcagtcctcccccgccaacaacaacatctgaaagcgtctactactagcgcaagcgaggttgacatgtcttctcgccctctgtccctgccccgccgcacggctcggtgacggtgaggcacacagcacagcaagcgaggaggttgacgacaacgagagccccggaacgctgacgcgcaccaacccgggggaggagacgccgcgctctttcaccctcgcgcacctaactgacaagccgacgcctggcctgaccgcgaggagagaggttcatggtgcagtggagcagcgggcggcagcggagcctcgacccctcctcctcctcctcccccgcgagacgggcgccgagagatggccaaggtgcccgatctcggctccgacttcgcccagaagctgctcagggacctccgccgccgccgggagcggctcggcttcgactccaccgccgccgcgcctcgggctcgggatgcttattcgaatgctcagaaaccacctcaagttcagaagccacaacaacaagcagctcctcggcctcgggtggcgacaagatcagaagcacaaacgagcgtaatacaccgacaaggcagcagcagcagctccattgccagaccagggacgccgcgccgccatgacgcgccggccatcgccgattcgcacgccaccgtgccgttacaaggaggacgaggaggcaagcagacggcgcccgcggcgaacgccggcggcgtggacgtgcagatggcgctggccctcgcgctcagcaacagcggcaagctccagaacgtgcatctcgtggcgcgccagggcggcagcggcggctccgcgttcttcggcgagccgtgcaggatggcgtcgcaggcgcggcgcctcctggctcctggcgcgcacgtcggcaaggtggcgatcggcgtccagaatctcaacgacattctcgtggcgtactcctccggcggtgctgccggcgcgaggaggggctcggttgagatcgggaagcagctgctcagaggtgccatggacctcgaggagtcgctcaacatgctcatgatgctccaggacgctacagactacatggaaatggggagctcagggaacgacggcaaggtgctgctgctggagggcactgagagctggaagaggtccgcgccgcgttcgacgagctctgcctctgcaaggctggtagagatcgtcgacgatgattcagggaccgagcaggccgacgatgcgaagagctcgtcagatacgttcatgcagatcgttcctcacggcatgtctcagagttacagacggaaccacatctcgccctcgcagctcgccggtgctgcaaccaattgcaagagcaatgcttcgagtggcgagaaggatggttcaaaggtgaggatgcccggtctgattgccaagttgatggggctggaaaaccttccgtcagcgaagacggctgcagagcgcaaggagacagagaggtttgtgaaacctgaggcggtgccaagaaaatcaacggcggcaactgtgatggctggcacattaccgatacgaattatagcttcggaacggatgccatccagagggcagctcaagaattttcagacaagagagtggaatattagcctgacaaagtctgaagaacctgtactgtcaagtagattttcacatctcaaagttgacaagcaaacaaggcagaccatgaggcagatgttaagcaaacaggaaggtacggagagaagagctagtgtaaaccaagtagctgatgagaaaatcgttcatcaggatacgaagctggctgaagacagcaaccagcaaaagacaacagtcagtgcaggaagaaagatgagtttccttcagaggtttaggaagactggaaagaacaaaccagccacagaagagaaagtcactgttgaagaaaataaacagaagctcgggaagaagcaaaccacaagcacaaaacagagagacagtgaggtgaagccgaggaagacgagagagaagtttaacaaggagaaccttgccaatcctggaaacaagactctaggaaataatggcaaaactgccaagactgatcaaacgagaaggcaagcacaaagtaaaccttcagataagcaagtcatggaaaagaaggtgcagagttaccgtcgaatgcagagtgaaacagccattcagaacctagaacagaagaggccactgaaaccagaaccagcgcattcgaacacgaaggagaagcttcagtctgttacaccgacagaaccacagaatggagaaggcacaaaagtagatgataccagaagccagaaaccatcagacaacacgcccggtgatgatggtgtatgcgaacaatctgcagcggagatggaagatagcggcacaaaagctttgccgtaccaatcggaaaaggaattgactgaagaaaccattgatccgatcaccgcagcacaggctacacctgaatcaattgctgagacaaatgatgacagcacagtcagtgaggctatacagacaccggaaacatttcctgaggaagaacagcagcaacaaatgaaagaagtgaacgatgaatcaacgaatggactggatcatctcatgaaccccagtaacccgaatgatttgagaaaccacaatatggatgttgtctcatgcgattccttcacagagaaccagctcctgcttgcagagatgttgctgaaggatccctacctactcgaaaccacgaaggcgatcaccgggttccacgtcccagccagcgcagctcagaaggaaaggcaagcgaatggaggcgatggtggatgtcagcgcgacacgtgccgctaacctgaagctgcggactctggacgatctggtcagggaactggacagcgacatccagtctctccacgtcccgaggaaaattcagcaacggggggatgaccacagcacagctgagaacctgaggatggtcctccgctacgacatggagagcacgcactcggacgctaactcggtgtgggactttggttggaaccgcgcgtgggacctgccggtcgagaagaacgaagtcgtcagggatttggagaagaacatattgggtggtatcatcactgatgtagcaagggagcttatcgatgtatccatgcgccagcgccatggcccatgggtgctgtgcctgtgagtcttgatcttgactgacttggatatatatatgtgggtattttcaatctgggtatgtacgaaggttttccagtagaaacattcatatgatttttgtgtgtatatataaaaggaggaacgtgtgcataaaagaaagggcaaatcttctgagtttatgtgttctttggtgatacagtttttttttaagaaaaaaagaaagggc

SEQ ID NO: 52316 - DNA, 507 bp, Zea Mays
caacaagctaatcagttcaaaccttgttttgttttaaaacggagtcggaaacaagcatgtgaacattcaccaaatcactgtgccatgaacacagcgttctgtttcattgtatacaaaataaggtgactgaaaacagctcagtgctacaaaaggaattttcccatcaaagaacatctggtgccacctttagcaaggcaatgaacaaaacacacagatggtgccaaggtacaaaaacatcgtacctaagttatgatacatcgtttgcttattcatcagctagttgagcaaaatatggaaaatggaagaacccagtttatcaaccataatggaagacagattcagcgatagaggctctcagatctcaagttctcagcaatctcagtctcccagcgatcaccattctcaagcaatttctccttgtcgtacagtagttcctgcatcgttgcatgccaaaacttagcagcaagacatgaaaaaacttgagataaaacctgcagtggaatgaag

SEQ ID NO: 52317 - DNA, 1468 bp, Zea Mays
ccttcagcaccttcttcagccagactggtgctgggaagcacgttccccgtgcaatcttcgttgatctagaacccactgtgatcgatgaggtgcgcactggcacgtaccgccagctcttccaccctgagcagctcatcagtggcaaggaggatgccgctaacaatttcgcccgtggccactacacaattggcaaggagattgttgatctgtgccttgaccgtatccgcaagcttgctgacaactgcaccggcctccagggcttcctggtcttcaatgccgttggtggtggcactggctctggccttggttctctcctccttgagcgcctgtctgtggagtacggcaagaaatccaagctgggcttcactgtgtacccatctccccaggtgtcaacctctgttgtggagccttacaacagcgtgctctccactcactcactcctggagcacactgatgtctccatcctgctcgacaacgaggccatctatgacatctgcaggcgctccctcgacattgagaggcccaactactccaacttgaatcgccttgtgtctcaggtgatctcatcgctgactgcttctctgaggttcgatggtgccctcaatgtggatgtgaacgagttccagaccaacctggttccttacccgaggatccacttcatgctctcctcctacgcaccggtgatctcttctgcgaaggccttccacgagcagctgtctgtggcggagatcaccagcagcgcgttcgagccggcttccatgatggtcaagtgcgacccacggcacggcaagtacatggcttgctgcctgatgtaccgcggcgacgtggtgcccaaggacgtgaacgccgcggtggccaccatcaagacgaagcgcaccatccagttcgtggactggtgcccgacggggttcaagtgcggcatcaactaccaggcgccgacagtggtgccgggtgccgacctcgccaaggtgcagcgcgcggtgtgcatgatctccaactccaccagcgtcgtcgaggtgttctcccgcatcaacagcaagttcgacctcatgtacgccaagcgcgcgttcgtgcactggtacgtcggcgagggcatggaggagggggagttctccgaggcacgcgaggacctggccgccctggagaaggactacgaggaggtcgccgcagagggcggcagtgatgacggtgacgaggaggaggaatactgatctgcttgcatgaatctgtttggctgtcgagccaggttgtggtgttgaaaaacctttgtttgtgtcctggcccccctgggtaatgtttgggtgtttccttccatcatcacttgctgaactgctctagtatttgcatttgtaattgaagtctgtcgctttaagcactcttggttctaaagatctctgtgcttttggggggtgtttttgcattgccccagattccaataaactcaccaaattcgggtcgtgcgtagtaa

SEQ ID NO: 52318 - DNA, 1766 bp, Zea Mays
ccatcacgggccggccgcggccgcctctcccacgctgcctataaaagccgccgcgaggctgagcagcattatcgcttcagctcggcgtcttcacaaacgccggcgcaaactctcgcccgagcccgacagatcttcaattccccattccgcccaccgatcgaccttcacgccagtctcggtctcttccgaaggcgtcgcgcgcggttgtttgagaggagaggaggaagatgagggagtgcatctccgtccacatcgggcaggccggcatccaagtcggcaacgcgtgctgggaactttactgcctcgagcacggcatccagcctgatggccaagtgcctggagataagaccgcgggacatcacgatgatgccttcagcaccttcttcagccagactggtgctgggaagcacgttccccgtgcaatcttcgttgatctagaacccactgtgatcgatgaggtgcgcactggcacgtaccgccagctcttccaccctgagcagctcatcagtggcaaggaggatgccgctaacaatttcgcccgtggccactacacaaggcttcctggtcttcaatgccgttggtggtggcactggctctggccttggttctctcctccttgagcgcctgtctgtggagtacggcaagaaatccaagctgggcttcactgtgtacccatctccccaggtgtcaacctctgttgtggagccttacaacagcgtgctctccactcactcactcctggagcacactgatgtctccatcctgctcgacaacgaggccatctatgacatctgcaggcgctccctcgacattgagaggcccaactactccaacttgaatcgccttgtgtctcaggtgatctcatcgctgactgcttctctgaggttcgatggtgccctcaatgtggatgtgaacgagttccagaccaacctggttccttacccgaggatccacttcatgctctcctcctacgcaccggtgatctcttctgcgaaggccttccacgagcagctgtctgtggcggagatcaccagcagcgcgttcgagccggcttccatgatggtcaagtgcgacccacggcacggcaagtacatggcttgctgcctgatgtaccgcggcgacgtggtgcccaaggacgtgaacgccgcggtggccaccatcaagacgaagcgcaccatccagttcgtggactggtgcccgacggggttcaagtgcggcatcaactaccaggcgccgacagtggtgccgggtgccgacctcgccaaggtgcagcgcgcggtgtgcatgatctccaactccaccagcgtcgtcgaggtgttctcccgcatcaacagcaagttcgacctcatgtacgccaagcgcgcgttcgtgcactggtacgtcggcgagggcatggaggagggggagttctccgaggcacgcgaggacctggccgccctggagaaggactacgaggaggtcgccgcagagggcggcagtgatgacggtgacgaggaggaggaatactgatctgcttgcatgaatctgtttggctgtcgagccaggttgtggtgttgaaaaacctttgtttgtgtcctggcccccctgggtaatgtttgggtgtttccttccatcatcacttgctgaactgctctagtatttgcatttgtaattgaagtctgtcgctttaagcactcttggttctaaagatctctgtgcttttggggggtgtttttgcattgccccagattccaataaactcaccaaattcgggtcgtgcgtagtaa

SEQ ID NO: 52319 - DNA, 1751 bp, Zea Mays
cgccgcgccatcacgggccggccgcggccgcctctcccacgctgcctataaaagccgccgcgaggctgagcagcattatcgcttcagctcggcgtcttcacaaacgccggcgcaaactctcgcccgagcccgacagatcttcaattccccattccgcccaccgatcgaccttcacgccagtctcggtctcttccgaaggcgtcgcgcgcggttgtttgagaggagaggaggaagatgagggagtgcatctccgtccacatcgggcaggccggcatccaagtcggcaacgcgtgctgggaactttactgcctcgagcacggcatccagcctgatggccaagtgcctggagataagaccgcgggacatcacgatgatgccttcagcaccttcttcagccagactggtgctgggaagcacgttccccgtgcaatcttcgttgatctagaacccactgtgatcgatgaggtgcgcactggcacgtaccgccagctcttccaccctgagcagctcatcagtggcaaggaggatgccgctaacaatttcgcccgtggccactacacaattggcaaggagattgttgatctgtgccttgaccgtatccgcaagcttgctgacaactgcaccggcctccagggcttcctggtcttcaatgccgttggtggtggcactggctctggccttggttctctcctccttgagcgcctgtctgtggagtacggcaagaaatccaagctgggcttcactgtgtacccatctccccaggtgtcaacctctgttgtggagccttacaacagcgtgctctccactcactcactcctggagcacactgatgtctccatcctgctcgacaacgaggccatctatgacatctgcaggcgctccctcgacattgagaggcccaactactccaacttgaatcgccttgtgtctcaggtgatctcatcgctgactgcttctctgaggttcgatggtgccctcaatgtggatgtgaacgagttccagaccaacctggttccttacccgaggatccacttcatgctctcctcctacgcaccggtgatctcttctgcgaaggccttccacgagcagctgtctgtggcggagatcaccagcagcgcgttcgagccggcttccatgatggtcaagtgcgacccacggcacggcaagtacatggcttgctgcctgatgtaccgcggcgacgtggtgcccaaggacgtgaacgccgcggtggccaccatcaagacgaagcgcaccatccagttcgtggactggtgcccgacggggttcaagtgcggcatcaactaccaggcgccgacagtggtgccgggtgccgacctcgccaagcgcgcgttcgtgcactggtacgtcggcgagggcatggaggagggggagttctccgaggcacgcgaggacctggccgccctggagaaggactacgaggaggtcgccgcagagggcggcagtgatgacggtgacgaggaggaggaatactgatctgcttgcatgaatctgtttggctgtcgagccaggttgtggtgttgaaaaacctttgtttgtgtcctggcccccctgggtaatgtttgggtgtttccttccatcatcacttgctgaactgctctagtatttgcatttgtaattgaagtctgtcgctttaagcactcttggttctaaagatctctgtgcttttggggggtgtttttgcattgccccagattccaataaactcaccaaattcgggtcgtgcgtagtaa

SEQ ID NO: 52320 - DNA, 681 bp, Zea Mays
gtcgtcgtcgtcctccggagacgagatctcggagatcgaccagttggggttctccatcttgaccaccaccggcgtgccccggtaggcgtcgccgccggccttgccgccccacaagccgctgcacggcgccatcaatggccggtccaagaaagccgccgcgtccgccggcctaggccacgcctctccttctctctcccttctcacgaaatagccactctatccgccaaacgctaatcctgggcttcccttcctttttggctccgctaactgcactccaatgccagtctctcttctcacaggaaaatccccaaggttacttactagtgctagtggtactctgcagaagctccgctccacttctgtttgtgagtgggcttatgaacaagagaagaggatggggggagctgcgctggtgagtctgagcggagggaaggtgacgaaggactgggaaacagctcaacacgtcttgggagagagagagtcgagagctcggtcggacgggaagcccacaatactttcgatgttcgcttgtccttccgcgtgtctgtggtttttcgcagcgactagttttggttgagtattccttcttccggccttggtttggtaaggcttttaagtagggcgttaattacgcggcttctgtgggttagacatggcatggcaggtggtggagggcaaaag

SEQ ID NO: 52321 - DNA, 1939 bp, Zea Mays
gataaaggcaggtacacgactcagcaagggtcaagcttttgccgcttgtacgagcccatgacccggataaagttcatgtacaaaattgttgctcgcaactgaagacaaacgttccattttatcctagattcctagtccggacttgggacacacatttcattaccaggagataatttctatcacactacagagccggtaaaacgttagttgcagagagagaaaaaaaggttacatatcccgacagaactaaccagttcgatgagacaagctactcctggaaccttgatgcacaatgatcatcggcatatgcaggagacacagatcttcgtcttccccagtcatgtgacacaccgcgctcgacaactgccagctttccccggcgtcgagcggggagagccggagagacaggctacaacaaacacacgtggacaaacaagcccacgatctggatctactctctcagcttcacaagtggagcaagatgccagcgtcgtctggcaccaggacgcctcctaacccagtggcgctcctgttttcctccaccaatcgcaaaggcgaacaaaattctgttacagatgaatgcaggagcccactacgcaaattttacctgcacggctgcacctgcacctccgaggcggaggcggaggttctctcttcatagtcaggacggatcggatcagagaaggcacacagctccacaaccgcatctttcgaacctcagccacgagcctgccgccgtgcccatggcagcgagacatccctccctccctccctcccacccggcactcccatggcgactgaccgaccccactcaccgtttccacacctacaacctcctgcttgcttacacgattcactcgacctgctcccctatgaggtcaagcccgaccaacaagaacgacacgccctggaacaggaggaagtagaagtggataccctgcttcgacagcaagctgcgggcggccgcggtcaggagcagcatcgacagcgcgagctccttcttgtatatccggttgtgcttcttcttcttcttcttcttcgccgtcggggcggcggcggccagcgagacgaggtcgccggcgacctcggacgagcgggggcccgagcccgacttcttggtcactacccactccaggtacgggatgacgaaggggaaggacctcggcgacggcagcacgttcagcagggacatgagggccgggacgtagcacaccacccagtccgggagctccgcctccggcacgaacatcgccgtcgggaggatgatgcagaagagcgtgaaggagtacaagggcagtatgagcttccggagcaggaagaagaggaggatcaggttgcctttcttccagaacgccatctgcagccaagtcagataaaagcgaaccgtaaactattattacaagtatgcaaggtaagttatgttcataacaatggcaaaaaatataaccgaggaagttgatagagtatcataatatagtcttcaagtcaagtaggctagaaaaaaaatagaggtataatttatattgcactgtgtggaggccaaaagatgaccgcatcttaaaagtgcatcaacctaagtagcagtgaggaattgtaaataatgtagagcattaggttctaaccaatgaattggatggatccatacatttattttagacaaaaagcatcacacacaaaacataaacaacacttgcggtgacgactattgttaacagcataacttgggttattaagcaatgcataagggttaaggtacagccacaaagagtattgcagcaataccttgcatttgatgatgtccggtaaacacagcctgaatagctgcattggaccggaatgccaccgatgctgctgcttcctgtaagcctcataggactcgggcagttcgcactggcactggccacgatatgacaaaaaacagctcaattgaggaagacag

SEQ ID NO: 52322 - DNA, 903 bp, Zea Mays
atggcggcgaccatggacggcgcggccgacggctccagcggcgtcccggtgcagcagcagcaccacggaggcctcttctaccctcccgtcatcagctcctcgctcgcgcccttctgctacgctctcggcggcgggcaaggcggtctcgccacgtcggccgccgacggtggcgaggagttctacgccgggctctcgtctatgccgctcaagtccgacggctccctatgcatcatggaggccctccgtaggagcgagcaagaacgtcacggggtggcggtgtcctcggtatcgccgaagctggaggatttcttgggcgcgagcgcgagcaccgcaatggcgctgagcttggacagccccagcttctactacggcggcgcccacggccacggcgggtacctgcagccgctgcagtgctcgatggtacccgtctcgttgggggacgacgtttacggcggctgccacgcgcagatggtggacgagcagtccgccgcggcaatggcagcgagctggttctcagcccgcggcggtggcggttgctacgacgtcaacggcgccggcgccatcgagccgtcgcagggccacccgcacgcgcttgacctttccatgagctccgggacgggttcccagtccagcagcgtcaccgtcaagaagcgcggtggtggtggcggcggcggcggcggcgggcagaagcggcccaccgtccaccgcaagtctatcgacacgttcggccagcgcacgtcgcagtaccgcggcgtcaccagtatttcccgcaggcatcaccagcacgggcggtggcaggcgcgcatcggccgcgtctcgggcaacaaggacctctacctgggaacattcagggcccctttggcacgcaggaggaggcggcggaggcgtacgacgtggcggcca

SEQ ID NO: 52323 - DNA, 1272 bp, Zea Mays
atggcggcgaccatggacggcgcggccgacggctccagcggcgtcccggtgcagcagcagcaccacggaggcctcttctaccctcccgtcatcagctcctcgctcgcgcccttctgctacgctctcggcggcgggcaaggcggtctcgccacgtcggccgccgacggtggcgaggagttctacgccgggctctcgtctatgccgctcaagtccgacggctccctatgcatcatggaggccctccgtaggagcgagcaagaacgtcacggggtggcggtgtcctcggtatcgccgaagctggaggatttcttgggcgcgagcgcgagcaccgcaatggcgctgagcttggacagccccagcttctactacggcggcgcccacggccacggcgggtacctgcagccgctgcagtgctcgatggtacccgtctcgttgggggacgacgtttacggcggctgccacgcgcagatggtggacgagcagtccgccgcggcaatggcagcgagctggttctcagcccgcggcggtggcggttgctacgacgtcaacggcgccggcgccatcgagccgtcgcagggccacccgcacgcgcttgacctttccatgagctccgggacgggttcccagtccagcagcgtcaccgtcaagaagcgcggtggtggtggcggcggcggcggcggcgggcagaagcggcccaccgtccaccgcaagtctatcgacacgttcggccagcgcacgtcgcagtaccgcggcgtcaccaggtatccctcgtattctccccgttcccggaccggccgtacgccgcggccgtcgctgtcccgcacgagtcgctcactggccgcgtgcgtggtttccaccgtgctaaaagcaggcataggtggacggggaggtatgaggcgcacctctgggacaacagctgcaggaaggaaggccagacccggaaaggccggcaaggtcgaggactacagggagcagctggaggagatgaagaacatgaccaggcaggagtacgtcgctcacctgagaaggaaaagcagcggcttctcgcgcggcgcttccatctaccggggagtgaccaggcatcaccagcacgggcggtggcaggcgcgcatcggccgcgtctcgggcaacaaggacctctacctgggaacattcagggcccctttggtagggcttatttttcagcttcggttctggctaatgcaaaagttgtgtcaaacacctctttttcaaatgacttcaccagtgaagtgcttttccaaaatgaactag

SEQ ID NO: 52324 - DNA, 546 bp, Zea Mays
ttttttttatttttactgttcttgtaaaatttctatgtttaaacctttgtttggttgttttattatttcattttattatctctatctcagcactactagcaataacgccaagatggttagatgtcacagatcacggcatcgagcttgacatcataggtagtcacgacatctagcttgacgtcgagctacctgcgctatgttctgttgtctcctctattctcttcttctctttactgacggtagctcaaataaaaaaaaactaaaccactcaatagatataaatttaaagatttttctttcaaaataatttttttttgttaaaaaaaaatcgatttggctggagaagcagcgcctcggctacgtccgcggcgagatcacgccctcctgctccggtttgactcatctgaccacgcgctctttcgcaccgcggctccaatggctgacttgaccgcgcggtcagcgttccaccgggatcacgccctccttttgcctgccctcccgagtctccgtcgcacgacttttgcctgtaaattaatgctgtataat

SEQ ID NO: 52325 - DNA, 1220 bp, Zea Mays
atgccttctcagcaaggatccgatcaccaacatcaaatgttgggaacattgacctggatgggatggacctcggctcagctagggatgatttatagagcagtggcacggtcacagcggcaaagacggtcttcgcatcatctgagcatgagctcacccaccttgagagccaaccggtcttccttcccacccctgcaccaacaggaagactagcaccactcttcttcaccattccagctgcaccagaggcaatgacccctcttccaatcccagctgaacctgaggcgatgctagcactatcaaccaatgcttgtatgccgaccttggaaggagcagcaacagcaggtgacggcactggacggggcgatggagcggctgcgcgtggtgcaggacgaggcgatggtgcagctgtacgcggtgtaggtgcagccgttgcacctgctgggcgtcctgagctgcgcgacgtcgttgcagcagcgactatgtcgctacaggggagccacttgctcgcctgcaggaacgggaggagcgacgcagggttgagcccggttgatattgacggcgacgcaacaagggaggatgcaccagcaatgccgccagtcgatcccatcccagacgcgaacaccgacagcagccccacggccagcgacgctggggggtcatccaccggcggcggcgccttcgcggaacacgatcgcggcagcaacagtgagtagccatctcctcttgctgcaacggcaggggacagagccttgggcccgggcttcgggtggttctgatcctcggcgtcatggtgggggtcgacgtggcgggaggaggcgaagaggcagaaagggcgggatagcgcgtcctggaggaagcggcaccctggaccgggcgcggcgccagcgcccgcagccgcggcggcggtgcagcgcaggccgaaggacgcggccaggttctgcgccaggtagcccgaataggatacggtgatgcggatggccatcgcggcggcgctccgcgcacgcgcgaaggcggaggggggtacccctgggtccttggaccttactgaagatggcggcccattccgatcgggtagccgtcggcgggaaggagcgcggggtatcggagatctagggttccgcgggtgcgcggccggaggaggctacagggatcctcggagtagggatataagatcgagcagcgggggtggtggtgaccggcgaggtgcgacctcgccggtg

SEQ ID NO: 52326 - DNA, 1655 bp, Zea Mays
gtcagcctgtgcttacggcgtataccacgagcgcaccaaccaccaccaccatcctcatccttcgcgaggagatcccttcgtcggggaagagaacccgccaggagacctacccttcctcaatcctccgaccctccatggcctcctcctccctggccctccctccaatctctctcctcctcgcgctgctgctcctctccgccccctcgccgtccgcctgcgcctcgctttccttcctcaccgcctcctccaacggctccgcctccacctccgccgacccggagctggaggacctggccccggagcccaccttcctcgaggaggtcatcgacgccgtctcggagaagtacgactgggatccggacgccgaggtcagggtctggccgctcgacgccggcgccgtccgcgtcggctccgtgcagcggtacgagttccgggcgcgggcgggcgggtcggcggcgctggcgcggttctccgacgaggccgtggagtggagactcccctccgcgccggccgtcgaggaggtggatgggccggacggggtcgacgtcgtccccgccgaaggcgcgttcgggttcgacaccggcgtcagggacgtggagctggttgggccggtggagctcaagcttgctggcaaccaggacggtagcctcgtcgagctccagttaccttcggcttaagaggatatttgttgcggatggcattgcattaaaggtcattggtgcacagaaagtttctgtaacccaccctcacagtataggtcttctatcaaatggaagtttgttggctagtaacaacgacctaagccaaatatggcctttgagctactcaacctgtgccccattacttcaagtgggtattgtaggatcagtcgtaattgttgtgcatcaaacaagtgtatctggaggccatgtgaagactttcttaaggtcacatgacactatagagttattgtcagacaagtataaagtccatatatcaaatcggttgatctcagaatttttgttctcctcaattagcccaagactgataaagcttgaaaagatcttgaagacttggtttagcaaaagaaaccaggagaatagttcagtgcacttcattgaagctaaagtgacatcgatacctctggtgaaattccgtttggagtttgaaagggatgtcactgaggatgatcccatctgggaagatgttccagagtggaaaacgagacccatggtccagcgagttccagttgacattatagctagagtggaagatgacgataggctgaaggctatttcggtgaagaaggttaggaggcaatttccagtagtggacaccactacttggggcagcctgacttcaaatatttccttcacaaagtttctgtcattcattttgccaccagaaccgctgtcgctggatgtaaagtggtaatagattctgctgtcatctacttctcgtagggctgataggaaattacacatatacatcgatttcatgtatacttaggctggaagtgtgcctgaacgtgaaatgggttgtaacataatgttcaaattttgtattgcatctagcaatgcaggggtacaatcttacattgttcatactgccttcttgcaatcatgcaatgactatctttagcaccttgcatcttctgagtacatatgccttcttgt

SEQ ID NO: 52327 - DNA, 1949 bp, Zea Mays
atggccgtctctctcgcccccgctctcctctttgctatctgcacctacgcgacatggaaggagatcgccttcgctgcgccaaatcgagaaatccgcgtccgctatggaagggatcggcatcagaggacgctcgccgttgtctccggcgcggtgcttgccggtggagctctggcgtacgcccgctcgagccagagccgccggcggaggaggcgcccggaggcgagtcgcagcagcggagccggtgcattggccgccaatggggatggtttcagccggaacggtgccggcggtggattggctgcagcggaccagaggaggagtggcctcaaatctctgcatttcctcgctgctatcctactcaagaagatagggcccagtggcacgcgctaccttctatgcttggtattaacattgatagtgctcgtgttcaccgctgccttcatcatctcctcgccagcgccgctcgcgatgacccccctccaacgattccggggtcttcgcgacccaagcgtgacgctctacgccgacgatggaggggagctacacaccacctcctccgtccgggcgttgttccacctctttcttcccccctgtaggaatcacgggactgaaagaaaggacaaaggttctgatgaggttgtactcaaggccatgggaagggctatcaataaaattgtcatggttgtagaattgatcaaggtactcctgaagactctggtccttgctaatattactggtgacttgattgttgattgtgtgagaatgtcggcaccaaatggatgggggcaaaatctgttggtaggaatgcattcgatgaacaacgctcttgctcggcgaggcagccctgaacagcttgatttctacaggacgaggctgggatctcaagggcttatgtcgtgcttcatagatggagagccaggacatcatggcgtgcatatggctggaccaaatcacctagctgacaaaaggtcgaacaagtactccatcattttcaataacagagagaaagaatctcttgtggtttttattgatagcgaggatgagatcaccttttcattacatctcaatgaaggttcagcgaataaatttgctcatgttgatgccataaatacgccccttgcacttcagccatgttgttttctgaaggagagacttctgatgcagcaagagatgtctgacacaacaaggcaacatcaaacagtgagggaaaacagaggttgtttttttaatgccactgatgagaaggagttgctgaatgcaattttcaagcctgctgttgagtatcctcacgcggacaatttagctggcaaggagacaaggcagcgattgagtaccaggatgagtctattcaatgtcgctgaggcaacagttacaagatcctggaagaaaacccgtggcagctctacactacaataagggtgataaagatgtctcgcccaatggaagacatgatcaaggttcacgatgttccccatcctctgctcaaaagtcttggcgtgaagaatctcccagctgtaattggccgaaccgtgaatggtgaggagctccttctgaaggatggcatttcggtgaaagatctcagatctggtgtcaaggaattgaagacactgctagatagtattgagaagaagaataagaagttattatcgaatctagctaataagaaaccttccggtcaatgggaagaaatcaagaagattcctctgctcacagcttccaattttgaggaaatcaagaagactccagtatgcatcattggtgttttcgggtcaaacaaagccaaggggcagcttgaagcagtcctgtctgagatatctaagaagactctgataagggggcagaactataattccagaaatgttgtctcctatgctttgctggataaggacaaacaatctgcattcctgtcatcgtttgacaagtctggatacagaaaaatcaatggataa

SEQ ID NO: 52328 - DNA, 2409 bp, Zea Mays
ccttgagttgcctacgcatactaagactgtctccaaccatgctacctaaaattggagatgtattcagtaatctgcctcgcgccagagcacaaggtcgcgtacgcatttgtaacattctccaacggcagacgcaaaagagaacccctgcgccaggctgtttcactcgcgcgcttaggcggaagcttcacgcgggaacggcgtatctgggcgggaataagttactgcgtccgcgggaaccacctagacggcgggaaaagttaccgtgttctctccatcgtggcctcgtgaagccccaaggcagcaagtcggcagcagcttggcggcaggaatcaataaagtagcagccgctgttgtttgcatggcttggaggtatctgaaaacttcgatgctcggggcagctgcggcttcatccaatgacgacgatgaccttgttgctgctgctgctgcagtggtcatccaggaacttggacgcaaacgacgatggggagggtcagtcccaggccacaggacgtacaggcgtgaccgccttgcagcacatcgacagctgcacatggactactttgttgatcgtccattgtacaacaatgaaatgttcagaagaagatttcgcatgaggccggaactgttccatgacattgtgaggaagattgctgccaagaaaaaatacttccaactgtcacgtgatgctgcaggagtattaagtttcagtcctgaccacaagtgtgctgtaggtatcaagatgctagcatacggaggacctgctgattcaatggatgaataccttaaaatgggagagagcactgtccttgagactttgaaggaatttgctttggctgtggttgatgtctttggcgatgaatttcttcgcccacccacaagtgctgagatagaacgtatattgaaacggaatgaagaaagaggatttccgggaatgatcggtagcatagattgcatgcattgggagtgggctaactgccctaccgcattggccggtatgtacttaggccacaaagggaagccaactatgatacttgaggccgtggcgacagaggatcttagaatttggcatgctaattttggtttcccaggctcccacaatgacattaatgttttacaccgctccaatgtatttgatgatttggctaatggaatagcaccacctgttgagttcaatgttaatggcaacacctactcccttgggtattacctagctgatggaatctatcctgattgggctacactagtgaagagtatcagtggtccaattacaaacatggaaaagatctttgcagagcagcaggaagcatgtagaaaggaagttgagcgttcattcggagtcttacaagccaagtggaagatattgtacaacccatcacgtttatggaagccagaagtattgaatacaattatgcgtgcctgtgtcatacttcacaatatgataattgaggatgagagggatgctgatctacctaacatccacacatcagaatggcctagggctgctaacccaactattatccaggatagagacattccctgtattgaagaatttgtagatgcacaggccgtcatacaagacaaagagactaatcatcaactccagaaggatctgatggagcacatgtggaacctgtatggaacaaagtctggaccgtttgtgccaaagccaattgcctaagcaacataattagtcatgtattttgttatgtaacctctttcctagaactgtaatcagcttgcttattagccctgctccttctctgttggctgctacaaattgtatgtgttggcatgcattctcaacacaaatgagatcaacaatcacaaattaagtttgaaatgagctttacctgcctcgggtggcacttgagaagatggtggcttactgatggtctctaggaacctattgttccatttcgcctcgttgcgaagtagcttccagcaatgcatgaagacaaagggttcacccttctcatacatgaaaacagcatcatcaatctacaattgcaatttaagtggcacatgttagaaattagataagttgaaattacacgaatgtgacaaggttgggaatattgtactcgatcctgctcgcttttaccgctctcattgcgcctatctactgatgatttgagggcacaaaacttattcactgccttctgtatggctccccacctatgttgaattgagatctggctacggttggaaccttctggtttgcgcttgttgaagtattcatgcatgcgtttgtaatacccacccgaattttgattgacacctgcatgttgttaatttcaatacaaaatatacaacttgtgcctgtgctaacactgtaatcggaaaacatacctgtaatagggtctttgctaacattgaggaatgccgagcaaatcacaatatcctcctctt

SEQ ID NO: 52329 - DNA, 1311 bp, Zea Mays
cgcaaaccaaaccaggcaaaaccccggcacccgtgcgccagccagccacagactccaaaccgaccgagcagcgatggtgtcggacttggagctggtggagcggctgcaggaggtgctgcggtcgtcggacctcaacaccacgaccaccgctgccttgcgccgccgcctcgaggaggacttcggcgcagacctctcccacaagaaggctttcatccgggagcaggttgacctcttcctcgccgaggtcgccgccaaggccgagccagaggagcccaaggaggaggaggagctcgaggacgcgccggtgcctaaagcggaggaggcggaggagggcgagggggtggaggaggagggcgagggggaggaggggggagaggaggaagaggaggaggaagaggaggaggtggatagcagcagcgcccggaagaagcagcggggtaatgatggcaagaaaaggggtggtggctttacaaaactatgcagtctttccccggcacttcaagagtttgtcggcgcctctgagttagccaggacagaggttgtcaagaagctttgggcatatattcgagaaaataatctgcaagaccaaaacaataggaggaagattttgcctgatgagagattgaagaagatcttcaatgtcaattccattgatatgttccaaatgaataaagctttgaccaagcatatctggccattgaattctgagggtcctgtctctcctgacagatcaacacccaaagagaagccacaaaagaaagacaggaatgaagaagcaaaagggtggctcttcaggagctggatctggtcttcttgtgccccttcaactttcggatgatttaatgaaatttatcggcactggtgagagcatgttatcacgatcggatgttgtgaagagaatgtgggactacataaaagagaacaacctgcaggatccttctgaccggaggaaaataatctgcgatgagaaactgaaggacctattaggagttgaaacgttcaccggctttactgtttcaaagctgcttgccccccattttaccaagacgaagtagcaacccgccatccagatcttctaaacccccaaaaggctgggtgatcatgttttgcagaatgtgtaatcatggaacagttaggagctatgtgagtggtgtgaaatttttttacatgtgggagtcggtggcactttccgaatgttaccagtaaagtaggttcctcgatgtctaatgaatctatcaactgtttactaaccgtcacgccctccgaaaactgtttatctgtgtggcttgtagtgcgttctttctgagttta

SEQ ID NO: 52330 - DNA, 1004 bp, Zea Mays
aggctctcatatctagcattctagcaccagcagctaccaggagtagtggtttctcttgcgtccgcctcagggcttgcgtccccccgatctgtgtcgcggaggcggcgagcggcttggccggccgggagagagtgagatcgagctgcgagggcgacactcggacggaggtcggtcgagaagaggccaacgatcgacgagaggagaaggagatcacgcagccgcctgcaagaaattcagcagcaggagaggatcgatcgaggaagatgtgcatggacggcgccgtgccggtgaagagggtctggctcggcatcgccgcgcgcctcggcctccgccgaaagaccgttactcctaaaaagatcgttgacgatcgagaggaggcacacagcacacaggtgtatcatgacatgcatatacctagagtacagctggaaccactggagtcgtcagcgtgtgaagacgaggaaagcacgtagtcacgctggtcttcccgcaaccgcaagaaaaaaaacaaaaagacatgtggaacggagctggtgttgatcatcactaccagtctaccacccttctgttctacaactgacgcactcaagcagtcaagactcgggctcaaccagccgcataacatcctggcgtttcttgcttgcaagcgatggccaactacttgagctttatggacgctgttttgcggcaaatccgcgtagcccaagactgtctggatccaacggagagcgaggtggtgcggcgttgtgcacagcgcatgcagtagcagatatgaaaggaagatttgtgccaacattttacaattatccaggagaaaaagaaagaaaggagagatacaactcccctaagcctgttcatttggctttaatccatatcggatttaatccaaaataaacggtagcatgaaaaatgctatggagtgaaaaaaatatcaatattttagtatattatttatgatatcttaataagcttgcgctcatatcacatccactagaaaacgatag

SEQ ID NO: 52331 - DNA, 1083 bp, Zea Mays
aggctctcatatctagcattctagcaccagcagctaccaggagtagtggtttctcttgcgtccgcctcagggcttgcgtccccccgatctgtgtcgcggaggcggcgagcggcttggccggccgggagagagtgagatcgagctgcgagggcgacactcggacggaggtcggtcgagaagaggccaacgatcgacgagaggagaaggagatcacgcagccgcctgcaagaaattcagcagcaggagaggatcgatcgaggaagatgtgcatggacggcgccgtgccggtgaagagggtctggctcggcatcgccgcgcgcctcggcctccgccgaaagaccggcctgaggaagctgaggaaggaggtgcgcacgtgcgagtaccgcgacgtgcacgtcatgtgggagatgctgcgggcgacggacgggccggcggtgccgctggcggagaaggaggccgcggcggcggcggccgtcgcggccgccgcaggcgccaggaagaggaggaacgcgtggaggcggttcgtctactactgctgcgcgttctgagcgacgcgcgtcgatcgatcgatcagcctggctgatgaacccaacggccggcgtcctagctttgtgctggtgatcgtcctaggctagctagctcctcaaagatccaaggtcgcgagctttgtgaacccgtgaccaaaatctcgaacgtgatcgggccatcgggggcgtcatcaggggaacgtgagctcgttcgagactcgagactatcatcgtctcgtcccccggcgaagatcgagagtatgagtacataggaagagtttggagtgggtgcggagagaaagggatgatcgagatgtacaaaaaataacttcgaaccaaagaagacttttgctttgattcgtgccaaaaaagaaagaaaggagagatacaactcccctaagcctgttcatttggctttaatccatatcggatttaatccaaaataaacggtagcatgaaaaatgctatggagtgaaaaaaatatcaatattttagtatattatttatgatatcttaataagcttgcgctcatatcacatccactagaaaacgatag

SEQ ID NO: 52332 - DNA, 1224 bp, Zea Mays
cgaagggtgtggtggcacatttcccttattgggcaagggttgggttgtgtagtgagctaccacttatctggtctcaaggttcttcatggccttgactctcaaagatcagagtattcttgtcaatggggatatcaatgaaggcttgcttcgcctttgtcacaagcttcatcgtttaaggaaagaatatgcatacacatttgaaagcacaagcttatcttatcagtgttctgaggttagcaggatcttgcaaggtaggggcaccatagttagcatgagacccactgaacgaatatgcataactacatttgcattaaacagaagattgaaccaaatgagctacaacataagattttatttgatagaagggtctaatgaaaacattggaccatgagagtgcagaggcagggccattgctactgcaagtcgcccctaagcctggtactaagagttgtaggaggcaagaattcacagttatcttagcctacatgctattctctgaacacaatatttacgagcttgataggcctgttttggaatacaaattatgtgtccgataggtaaataatttatgcaatgattcttagacctttggctcttactgcttcaaggattaatgtgtgactgtttagccttcaatccaagcggtatgccactaatctcaaaaattgcttctacgcaatatttacttgacaatttatagatttgttgtttcttagagatattttttcatgtaataggttataaggttgttcatgacataaagaggtttgttggtcataacttatactatatgaagattatgggagtcagccctaaattcacattttctgcaatctacagattcatgtaaaaaagttcaatctacaacagcatttcctcaaaatgtctaacagacttgttttcttcaggctagggacccaggggctacacatcttataactgaaaaacacatgagcagtatgttgttaacacttttttttcttgttcgtgtttcatagatagaggtatataatatggagacgaataatatttaaaccattagagacccatgtaacaataaaacagattgtttagctattatgctcactcaatatggagatcctcaagtatcttagaatcagttgggcaaacacaaatttacagtcatagttttctttgatggtttttacaaatacttggtttgcactattgatgaaaacatggtattgtttcaagccaaccttg

SEQ ID NO: 52333 - DNA, 1808 bp, Zea Mays
taacatcttgactcctatatcgatcaattatttctgttactcatttgattctttagtttcgtagagggaggaacatcgtgccatcgtgggatgcaggccccaaggaacaccagatattttgaggaaatatttatgggtcatttgattttacttatgaggtttagatcaaatgatagatgatgtcccgcatgattttggaattgcatttgtattgtataaacctgaatataaatgtcattcttaaatttgtgaagtagtctgaatgtctgatagcatcaaaaattggtgaagtagtctgatagcaacataaactataattaattgagatcttattactcacactagatcttgctattattaatcatggtacaacactgtcctcgatgtggttatgatcttctattgtaatggcactaacttcttatcaggaaaacatcaaaaacaatttggaaacaatttatttggacagggagaacctgggtgggttttcggattgtgcaaactgattatatgttgctaagtgcaggacatttgggaatttttctgagggtgaaatggtgccttttggaccctaaactatggagagattagtaggatgtatggactctttgtttcaattatgtggtaaatcagtttagctgaaaatagagtacttttaaaggcataaatactcctatttctgtacttgagatcacatttatcctgatataggttgccattcatgatatttctaggttgcacatatgttccaagcgctaggactgaaaggatgccacttgctattttgctgaattataacctatgcttaatatagatgattcttcattaagtgaacagaatggaggataatctaccagttaatgtccgggaatatcaagaacttgctaagaaattaattctaaaaaaagtcattacacgctaagaaaaataatgtgcaagctactgaatttacaatcaagcaagggtcgaggagtgggagggagggtactgggccctaaaggagaagtaccgaaccgggctaaacccgcaggagaaggtgaagctagagaaggagcccatggggcagttcgtggatgacgacatcagggacctgccaagatctccatggaggagatcgacgccgccaagcccaccaaggacaacgtcgacgtccgcctcaagtggctcggcctcttccaccgctacaagcaccagtgtacacccactgattctacaccccctgcaatggttgttgttgctgttggtaggagcgaccccgcgagcgtgacacagacaaagcagccttcggtgccagttcagaccacttatctggtctcaaggttcttcatggccttgactctcaaagatcagagtattcttgtcaatggggatatcaatgaaggcttgcttcgcctttgtcacaagcttcatcgtttaaggaaagaatatgcatacacatttgaaagcacaagcttatcttatcagtgttctgaggttagcaggatcttgcaaggctagggacccaggggctacacatcttataactgaaaaacacatgagcagtatgttgttaacacttttttttcttgttcgtgtttcatagatagaggtatataatatggagacgaataatatttaaaccattagagacccatgtaacaataaaacagattgtttagctattatgctcactcaatatggagatcctcaagtatcttagaatcagttgggcaaacacaaatttacagtcatagttttctttgatggtttttacaaatacttggtttgcactattgatgaaaacatggtattgtttcaagccaaccttg

SEQ ID NO: 52334 - DNA, 3549 bp, Zea Mays
cgcgccccgaaaccgtcgcccccggcctcccctcgcctcactcgattctggctggccacaaactccgccccctgcccctaccccgattatgccgccgtcgtccgatcccacccgcaaacgctgctccccgcctcgaggctcgtcggaacggacgcctggatgtcgcggctgcaacccaccgccgcgcagggaggctccgccaccagcaactcagaggatgcgcggaggccggagggcatgggagatccgccacctcctcctcggcccacgacaaaaatggcgtgggagatccgccacctcacctcctcccattcccgcgcccgcgcccgcgcctgatatggaaggtccgccgaagggactcggacgtcgaggccatggctgagccgcaccacttctccccctgcctcgcgcgcggcggccgagatggtgatggctgggttgttcgggatggtggtcctacctgccctccctgctatcctcgccccaaatcgacgagaatcatgcagcccaaatctaaggtggaggcgcctgcactgtcgatggaggtgtcgagtctgcgatggtgtctgtagatgggaaggcatggtgtgcagcggcagcggccaggtggtgtcgctgagcctgccctcctacaggctcactggcacgctctccacggccatcgggggacctctcgttcctgcgtatgctgaacctgagctccaatcggttccgcggggaggtcccagcgaccatcgttcgccttgcgcatctgcaggcgctagacctgagctacaacgccttcactgaattccagagctgcgattcccgaggccatggagcagcagaaaatatcaattgccaaaagcagccattacaatagtactcattttagggacttcatttcttgcagctgccaatccaattgcaggatgctatgactctcttaagtgatcatgaacttacacattgaaatactggtgggcctcgagaggccaggaggtggagaggagttcaacaagtactacatcatgtctgctctcctatccgtggattgatttggagttgctaatatgtgataataattcgtatgcatcttaaactcactatctaattacctattagcaggtgagtgcaaacagcttcctgctaaaagttagcacggaatcggttgatacttattgatgtacgtgttagttcataattattgtaccatgtttggttggaatattttttaaaagaatgttgaattctgaacgatatgagttattttatattctatattcttttgatttatgaaagggtgcctgaaatatcctatagatgtctttagtagaggatccaaataatggcctgcaagggtttcttgaatcggatcgcacaaaactccatctgcttcagaattgagctaagcgcatcctaacatcttgactcctatatcgatcaattatttctgttactcatttgattctttagtttcgtagagggaggaacatcgtgccatcgtgggatgcaggccccaaggaacaccagatattttgaggaaatatttatgggtcatttgattttacttatgaggtttagatcaaatgatagatgatgtcccgcatgattttggaattgcatttgtattgtataaacctgaatataaatgtcattcttaaatttgtgaagtagtctgaatgtctgatagcatcaaaaattggtgaagtagtctgatagcaacataaactataattaattgagatcttattactcacactagatcttgctattattaatcatggtacaacactgtcctcgatgtggttatgatcttctattgtaatggcactaacttcttatcaggaaaacatcaaaaacaatttggaaacaatttatttggacagggagaacctgggtgggttttcggattgtgcaaactgattatatgttgctaagtgcaggacatttgggaatttttctgagggtgaaatggtgccttttggaccctaaactatggagagattagtaggatgtatggactctttgtttcaattatgtggtaaatcagtttagctgaaaatagagtacttttaaaggcataaatactcctatttctgtacttgagatcacatttatcctgatataggttgccattcatgatatttctaggttgcacatatgttccaagcgctaggactgaaaggatgccacttgctattttgctgaattataacctatgcttaatatagatgattcttcattaagtgaacaggtagctgacccacattcttgctgaattataacctatgcttaatcttggatccaatcaacaaacaaataagtgccacaagcaaacccaccctgagaaaaatacagtgcttttctttggttccacattcttggtttccaatgcatgtttctcttcttttgatatactgttttcttttaccgacacatctctatctttatatgtgtccaaagctccaaaatgaaatgatttagtgcttgcactgaaaaaggaacattctgtatgctaattctctaaaatgtgtatggctgaaatcgatatatttgcaacatacgaatgaccttttttaacaatttgatggagcagaatggaggataatctaccagttaatgtccgggaatatcaagaacttgctaagaaattaattctaaaaaaagtcattacacgctaagaaaaataatgtgcaagctactgaatttacaatcaagcaagggtcgaggagtgggagggagggtactgggccctaaaggagaagtaccgaaccgggctaaacccgcaggagaaggtgaagctagagaaggagcccatggggcagttcgtggatgacgacatcagggacctgccaagatctccatggaggagatcgacgccgccaagcccaccaaggacaacgtcgacgtccgcctcaagtggctcggcctcttccaccgctacaagcaccagtgtacacccactgattctacaccccctgcaatggttgttgttgctgttggtaggagcgaccccgcgagcgtgacacagacaaagcagccttcggtgccagttcagaccacttatctggtctcaaggttcttcatggccttgactctcaaagatcagagtattcttgtcaatggggatatcaatgaaggcttgcttcgcctttgtcacaagcttcatcgtttaaggaaagaatatgcatacacatttgaaagcacaagcttatcttatcagtgttctgaggttagcaggatcttgcaaggctagggacccaggggctacacatcttataactgaaaaacacatgagcagtatgttgttaacacttttttttcttgttcgtgtttcatagatagaggtatataatatggagacgaataatatttaaaccattagagacccatgtaacaataaaacagattgtttagctattatgctcactcaatatggagatcctcaagtatcttagaatcagttgggcaaacacaaatttacagtcatagttttctttgatggtttttacaaatacttggtttgcactattgatgaaaacatggtattgtttcaagccaaccttg

SEQ ID NO: 52335 - DNA, 3381 bp, Zea Mays
caacagtcccgctccagatcgcgccccgaaaccgtcgcccccggcctcccctcgcctcactcgattctggctggccacaaactccgccccctgcccctaccccgattatgccgccgtcgtccgatcccacccgcaaacgctgctccccgcctcgaggctcgtcggaacggacgcctggatgtcgcggctgcaacccaccgccgcgcagggaggctccgccaccagcaactcagaggatgcgcggaggccggagggcatgggagatccgccacctcctcctcggcccacgacaaaaatggcgtgggagatccgccacctcacctcctcccattcccgcgcccgcgcccgcgcctgatatggaaggtccgccgaagggactcggacgtcgaggccatggctgagccgcaccacttctccccctgcctcgcgcgcggcggccgagatggtgatggctgggttgttcgggatggtggtcctacctgccctccctgctatcctcgccccaaatcgacgagaatcatgcagcccaaatctaaggtggaggcgcctgcactgtcgatggaggtgtcgagtctgcgatggtgtctgtagatgggaaggcatggtgtgcagcggcagcggccaggtggtgtcgctgagcctgccctcctacaggctcactggcacgctctccacggccatcgggggacctctcgttcctgcgtatgctgaacctgagctccaatcggttccgcggggaggtcccagcgaccatcgttcgccttgcgcatctgcaggcgctagacctgagctacaacgccttcactgaattccagagctgcgattcccgaggccatggagcagcagaaaatatcaattgccaaaagcagccattacaatagtactcattttagggacttcatttcttgcagctgccaatccaattgcaggatgctatgactctcttaagtgatcatgaacttacacattgaaatactggtgggcctcgagaggccaggaggtggagaggagttcaacaagtactacatcatgtctgctctcctatccgtggattggtgagtgcaaacagcttcctgctaaaagttagcacggaatcggttgatacttattgatggtgcctgaaatatcctatagatgtctttagtagaggatccaaataatggcctgcaagggtttcttgaatcggatcgcacaaaactccatctgcttcagaattgagctaagcgcatcctaacatcttgactcctatatcgatcaattatttctgttactcatttgattctttagtttcgtagagggaggaacatcgtgccatcgtgggatgcaggccccaaggaacaccagatattttgaggaaatatttatgggtcatttgattttacttatgaggtttagatcaaatgatagatgatgtcccgcatgattttggaattgcatttgtattgtataaacctgaatataaatgtcattcttaaatttgtgaagtagtctgaatgtctgatagcatcaaaaattggtgaagtagtctgatagcaacataaactataattaattgagatcttattactcacactagatcttgctattattaatcatggtacaacactgtcctcgatgtggttatgatcttctattgtaatggcactaacttcttatcaggaaaacatcaaaaacaatttggaaacaatttatttggacagggagaacctgggtgggttttcggattgtgcaaactgattatatgttgctaagtgcaggacatttgggaatttttctgagggtgaaatggtgccttttggaccctaaactatggagagattagtaggatgtatggactctttgtttcaattatgtggtaaatcagtttagctgaaaatagagtacttttaaaggcataaatactcctatttctgtacttgagatcacatttatcctgatataggttgccattcatgatatttctaggttgcacatatgttccaagcgctaggactgaaaggatgccacttgctattttgctgaattataacctatgcttaatatagatgattcttcattaagtgaacaggtagctgacccacattcttgctgaattataacctatgcttaatcttggatccaatcaacaaacaaataagtgccacaagcaaacccaccctgagaaaaatacagtgcttttctttggttccacattcttggtttccaatgcatgtttctcttcttttgatatactgttttcttttaccgacacatctctatctttatatgtgtccaaagctccaaaatgaaatgatttagtgcttgcactgaaaaaggaacattctgtatgctaattctctaaaatgtgtatggctgaaatcgatatatttgcaacatacgaatgaccttttttaacaatttgatggagcagaatggaggataatctaccagttaatgtccgggaatatcaagaacttgctaagaaattaattctaaaaaaagtcattacacgctaagaaaaataatgtgcaagctactgaatttacaatcaagcaagggtcgaggagtgggagggagggtactgggccctaaaggagaagtaccgaaccgggctaaacccgcaggagaaggtgaagctagagaaggagcccatggggcagttcgtggatgacgacatcagggacctgccaagatctccatggaggagatcgacgccgccaagcccaccaaggacaacgtcgacgtccgcctcaagtggctcggcctcttccaccgctacaagcaccagtgtacacccactgattctacaccccctgcaatggttgttgttgctgttggtaggagcgaccccgcgagcgtgacacagacaaagcagccttcggtgccagttcagaccacttatctggtctcaaggttcttcatggccttgactctcaaagatcagagtattcttgtcaatggggatatcaatgaaggcttgcttcgcctttgtcacaagcttcatcgtttaaggaaagaatatgcatacacatttgaaagcacaagcttatcttatcagtgttctgaggttagcaggatcttgcaaggctagggacccaggggctacacatcttataactgaaaaacacatgagcagtatgttgttaacacttttttttcttgttcgtgtttcatagatagaggtatataatatggagacgaataatatttaaaccattagagacccatgtaacaataaaacagattgtttagctattatgctcactcaatatggagatcctcaagtatcttagaatcagttgggcaaacacaaatttacagtcatagttttctttgatggtttttacaaatacttggtttgcactattgatgaaaacatggtattgtttcaagccaaccttg

SEQ ID NO: 52336 - DNA, 3752 bp, Zea Mays
atcccgcacaacagtcccgctccagatcgcgccccgaaaccgtcgcccccggcctcccctcgcctcactcgattctggctggccacaaactccgccccctgcccctaccccgattatgccgccgtcgtccgatcccacccgcaaacgctgctccccgcctcgaggctcgtcggaacggacgcctggatgtcgcggctgcaacccaccgccgcgcagggaggctccgccaccagcaactcagaggatgcgcggaggccggagggcatgggagatccgccacctcctcctcggcccacgacaaaaatggcgtgggagatccgccacctcacctcctcccattcccgcgcccgcgcccgcgcctgatatggaaggtccgccgaagggactcggacgtcgaggccatggctgagccgcaccacttctccccctgcctcgcgcgcggcggccgagatggtgatggctgggttgttcgggatggtggtcctacctgccctccctgctatcctcgccccaaatcgacgagaatcatgcagcccaaatctaaggtggaggcgcctgcactgtcgatggaggtgtcgagtctgcgatggtgtctgtagatgggaaggcatggtgtgcagcggcagcggccaggtggtgtcgctgagcctgccctcctacaggctcactggcacgctctccacggccatcgggggacctctcgttcctgcgtatgctgaacctgagctccaatcggttccgcggggaggtcccagcgaccatcgttcgccttgcgcatctgcaggcgctagacctgagctacaacgccttcactgaattccagagctgcgattcccgaggccatggagcagcagaaaatatcaattgccaaaagcagccattacaatagtactcattttagggacttcatttcttgcagctgccaatccaattgcaggatgctatgactctcttaagtgatcatgaacttacacattgaaatactggtgggcctcgagaggccaggaggtggagaggagttcaacaagtactacatcatgtctgctctcctatccgtggattggtgagttagtttggatgtttgcactgggtattgttatccatcaaccccaaaccaattgcagttccctttagtcatgtcatgtttaatttccctataaatttcgtactgcatttcatatatatatgtatcaaatatggacccctgaaactgaagtaggcattccttttcaattcgtgttgcttcttcatttcctttatcagtaagggcatgtccagatccattagcactaaaatttagcagctaaaattagtacgagtgggtctaaacggacctgctaattatttgttgaagggcgtgaagggctgatattagtttcattagcagatttggagttgctaatatgtgataataattcgtatgcatcttaaactcactatctaattacctattagcaggtgagtgcaaacagcttcctgctaaaagttagcacggaatcggttgatacttattgatggtgcctgaaatatcctatagatgtctttagtagaggatccaaataatggcctgcaagggtttcttgaatcggatcgcacaaaactccatctgcttcagaattgagctaagcgcatcctaacatcttgactcctatatcgatcaattatttctgttactcatttgattctttagtttcgtagagggaggaacatcgtgccatcgtgggatgcaggccccaaggaacaccagatattttgaggaaatatttatgggtcatttgattttacttatgaggtttagatcaaatgatagatgatgtcccgcatgattttggaattgcatttgtattgtataaacctgaatataaatgtcattcttaaatttgtgaagtagtctgaatgtctgatagcatcaaaaattggtgaagtagtctgatagcaacataaactataattaattgagatcttattactcacactagatcttgctattattaatcatggtacaacactgtcctcgatgtggttatgatcttctattgtaatggcactaacttcttatcaggaaaacatcaaaaacaatttggaaacaatttatttggacagggagaacctgggtgggttttcggattgtgcaaactgattatatgttgctaagtgcaggacatttgggaatttttctgagggtgaaatggtgccttttggaccctaaactatggagagattagtaggatgtatggactctttgtttcaattatgtggtaaatcagtttagctgaaaatagagtacttttaaaggcataaatactcctatttctgtacttgagatcacatttatcctgatataggttgccattcatgatatttctaggttgcacatatgttccaagcgctaggactgaaaggatgccacttgctattttgctgaattataacctatgcttaatatagatgattcttcattaagtgaacaggtagctgacccacattcttgctgaattataacctatgcttaatcttggatccaatcaacaaacaaataagtgccacaagcaaacccaccctgagaaaaatacagtgcttttctttggttccacattcttggtttccaatgcatgtttctcttcttttgatatactgttttcttttaccgacacatctctatctttatatgtgtccaaagctccaaaatgaaatgatttagtgcttgcactgaaaaaggaacattctgtatgctaattctctaaaatgtgtatggctgaaatcgatatatttgcaacatacgaatgaccttttttaacaatttgatggagcagaatggaggataatctaccagttaatgtccgggaatatcaagaacttgctaagaaattaattctaaaaaaagtcattacacgctaagaaaaataatgtgcaagctactgaatttacaatcaagcaagggtcgaggagtgggagggagggtactgggccctaaaggagaagtaccgaaccgggctaaacccgcaggagaaggtgaagctagagaaggagcccatggggcagttcgtggatgacgacatcagggacctgccaagatctccatggaggagatcgacgccgccaagcccaccaaggacaacgtcgacgtccgcctcaagtggctcggcctcttccaccgctacaagcaccagtgttgttgttgctgttggtaggagcgaccccgcgagcgtgacacagacaaagcagccttcggtgccagttcagaccacttatctggtctcaaggttcttcatggccttgactctcaaagatcagagtattcttgtcaatggggatatcaatgaaggcttgcttcgcctttgtcacaagcttcatcgtttaaggaaagaatatgcatacacatttgaaagcacaagcttatcttatcagtgttctgaggttagcaggatcttgcaaggctagggacccaggggctacacatcttataactgaaaaacacatgagcagtatgttgttaacacttttttttcttgttcgtgtttcatagatagaggtatataatatggagacgaataatatttaaaccattagagacccatgtaacaataaaacagattgtttagctattatgctcactcaatatggagatcctcaagtatcttagaatcagttgggcaaacacaaatttacagtcatagttttctttgatggtttttacaaatacttggtttgcactattgatgaaaacatggtattgtttcaagccaaccttg

SEQ ID NO: 52337 - DNA, 3779 bp, Zea Mays
atcccgcacaacagtcccgctccagatcgcgccccgaaaccgtcgcccccggcctcccctcgcctcactcgattctggctggccacaaactccgccccctgcccctaccccgattatgccgccgtcgtccgatcccacccgcaaacgctgctccccgcctcgaggctcgtcggaacggacgcctggatgtcgcggctgcaacccaccgccgcgcagggaggctccgccaccagcaactcagaggatgcgcggaggccggagggcatgggagatccgccacctcctcctcggcccacgacaaaaatggcgtgggagatccgccacctcacctcctcccattcccgcgcccgcgcccgcgcctgatatggaaggtccgccgaagggactcggacgtcgaggccatggctgagccgcaccacttctccccctgcctcgcgcgcggcggccgagatggtgatggctgggttgttcgggatggtggtcctacctgccctccctgctatcctcgccccaaatcgacgagaatcatgcagcccaaatctaaggtggaggcgcctgcactgtcgatggaggtgtcgagtctgcgatggtgtctgtagatgggaaggcatggtgtgcagcggcagcggccaggtggtgtcgctgagcctgccctcctacaggctcactggcacgctctccacggccatcgggggacctctcgttcctgcgtatgctgaacctgagctccaatcggttccgcggggaggtcccagcgaccatcgttcgccttgcgcatctgcaggcgctagacctgagctacaacgccttcactgaattccagagctgcgattcccgaggccatggagcagcagaaaatatcaattgccaaaagcagccattacaatagtactcattttagggacttcatttcttgcagctgccaatccaattgcaggatgctatgactctcttaagtgatcatgaacttacacattgaaatactggtgggcctcgagaggccaggaggtggagaggagttcaacaagtactacatcatgtctgctctcctatccgtggattggtgagttagtttggatgtttgcactgggtattgttatccatcaaccccaaaccaattgcagttccctttagtcatgtcatgtttaatttccctataaatttcgtactgcatttcatatatatatgtatcaaatatggacccctgaaactgaagtaggcattccttttcaattcgtgttgcttcttcatttcctttatcagtaagggcatgtccagatccattagcactaaaatttagcagctaaaattagtacgagtgggtctaaacggacctgctaattatttgttgaagggcgtgaagggctgatattagtttcattagcagatttggagttgctaatatgtgataataattcgtatgcatcttaaactcactatctaattacctattagcaggtgagtgcaaacagcttcctgctaaaagttagcacggaatcggttgatacttattgatggtgcctgaaatatcctatagatgtctttagtagaggatccaaataatggcctgcaagggtttcttgaatcggatcgcacaaaactccatctgcttcagaattgagctaagcgcatcctaacatcttgactcctatatcgatcaattatttctgttactcatttgattctttagtttcgtagagggaggaacatcgtgccatcgtgggatgcaggccccaaggaacaccagatattttgaggaaatatttatgggtcatttgattttacttatgaggtttagatcaaatgatagatgatgtcccgcatgattttggaattgcatttgtattgtataaacctgaatataaatgtcattcttaaatttgtgaagtagtctgaatgtctgatagcatcaaaaattggtgaagtagtctgatagcaacataaactataattaattgagatcttattactcacactagatcttgctattattaatcatggtacaacactgtcctcgatgtggttatgatcttctattgtaatggcactaacttcttatcaggaaaacatcaaaaacaatttggaaacaatttatttggacagggagaacctgggtgggttttcggattgtgcaaactgattatatgttgctaagtgcaggacatttgggaatttttctgagggtgaaatggtgccttttggaccctaaactatggagagattagtaggatgtatggactctttgtttcaattatgtggtaaatcagtttagctgaaaatagagtacttttaaaggcataaatactcctatttctgtacttgagatcacatttatcctgatataggttgccattcatgatatttctaggttgcacatatgttccaagcgctaggactgaaaggatgccacttgctattttgctgaattataacctatgcttaatatagatgattcttcattaagtgaacaggtagctgacccacattcttgctgaattataacctatgcttaatcttggatccaatcaacaaacaaataagtgccacaagcaaacccaccctgagaaaaatacagtgcttttctttggttccacattcttggtttccaatgcatgtttctcttcttttgatatactgttttcttttaccgacacatctctatctttatatgtgtccaaagctccaaaatgaaatgatttagtgcttgcactgaaaaaggaacattctgtatgctaattctctaaaatgtgtatggctgaaatcgatatatttgcaacatacgaatgaccttttttaacaatttgatggagcagaatggaggataatctaccagttaatgtccgggaatatcaagaacttgctaagaaattaattctaaaaaaagtcattacacgctaagaaaaataatgtgcaagctactgaatttacaatcaagcaagggtcgaggagtgggagggagggtactgggccctaaaggagaagtaccgaaccgggctaaacccgcaggagaaggtgaagctagagaaggagcccatggggcagttcgtggatgacgacatcagggacctgccaagatctccatggaggagatcgacgccgccaagcccaccaaggacaacgtcgacgtccgcctcaagtggctcggcctcttccaccgctacaagcaccagtgtacacccactgattctacaccccctgcaatggttgttgttgctgttggtaggagcgaccccgcgagcgtgacacagacaaagcagccttcggtgccagaccacttatctggtctcaaggttcttcatggccttgactctcaaagatcagagtattcttgtcaatggggatatcaatgaaggcttgcttcgcctttgtcacaagcttcatcgtttaaggaaagaatatgcatacacatttgaaagcacaagcttatcttatcagtgttctgaggttagcaggatcttgcaaggctagggacccaggggctacacatcttataactgaaaaacacatgagcagtatgttgttaacacttttttttcttgttcgtgtttcatagatagaggtatataatatggagacgaataatatttaaaccattagagacccatgtaacaataaaacagattgtttagctattatgctcactcaatatggagatcctcaagtatcttagaatcagttgggcaaacacaaatttacagtcatagttttctttgatggtttttacaaatacttggtttgcactattgatgaaaacatggtattgtttcaagccaaccttg

SEQ ID NO: 52338 - DNA, 3653 bp, Zea Mays
atcccgcacaacagtcccgctccagatcgcgccccgaaaccgtcgcccccggcctcccctcgcctcactcgattctggctggccacaaactccgccccctgcccctaccccgattatgccgccgtcgtccgatcccacccgcaaacgctgctccccgcctcgaggctcgtcggaacggacgcctggatgtcgcggctgcaacccaccgccgcgcagggaggctccgccaccagcaactcagaggatgcgcggaggccggagggcatgggagatccgccacctcctcctcggcccacgacaaaaatggcgtgggagatccgccacctcacctcctcccattcccgcgcccgcgcccgcgcctgatatggaaggtccgccgaagggactcggacgtcgaggccatggctgagccgcaccacttctccccctgcctcgcgcgcggcggccgagatggtgatggctgggttgttcgggatggtggtcctacctgccctccctgctatcctcgccccaaatcgacgagaatcatgcagcccaaatctaaggtggaggcgcctgcactgtcgatggaggtgtcgagtctgcgatggtgtctgtagatgggaaggcatggtgtgcagcggcagcggccaggtggtgtcgctgagcctgccctcctacaggctcactggcacgctctccacggccatcgggggacctctcgttcctgcgtatgctgaacctgagctccaatcggttccgcggggaggtcccagcgaccatcgttcgccttgcgcatctgcaggcgctagacctgagctacaacgccttcactgaattccagagctgcgattcccgaggccatggagcagcagaaaatatcaattgccaaaagcagccattacaatagtactcattttagggacttcatttcttgcagctgccaatccaattgcaggatgctatgactctcttaagtgatcatgaacttacacattgaaatactggtgggcctcgagaggccaggaggtggagaggagttcaacaagtactacatcatgtctgctctcctatccgtggattggtgagttagtttggatgtttgcactgggtattgttatccatcaaccccaaaccaattgcagttccctttagtcatgtcatgtttaatttccctataaatttcgtactgcatttcatatatatatgtatcaaatatggacccctgaaactgaagtaggcattccttttcaattcgtgttgcttcttcatttcctttatcagtaagggcatgtccagatccattagcactaaaatttagcagctaaaattagtacgagtgggtctaaacggacctgctaattatttgttgaagggcgtgaagggctgatattagtttcattagcagatttggagttgctaatatgtgataataattcgtatgcatcttaaactcactatctaattacctattagcaggtgagtgcaaacagcttcctgctaaaagttagcacggaatcggttgatacttattgatatgtctttagtagaggatccaaataatggcctgcaagggtttcttgaatcggatcgcacaaaactccatctgcttcagaattgagctaagcgcatcctaacatcttgactcctatatcgatcaattatttctgttactcatttgattctttagtttcgtagagggaggaacatcgtgccatcgtgggatgcaggccccaaggaacaccagatattttgaggaaatatttatgggtcatttgattttacttatgaggtttagatcaaatgatagatgatgtcccgcatgattttggaattgcatttgtattgtataaacctgaatataaatgtcattcttaaatttgtgaagtagtctgaatgtctgatagcatcaaaaattggtgaagtagtctgatagcaacataaactataattaattgagatcttattactcacactagatcttgctattattaatcatggtacaacactgtcctcgatgtggttatgatcttctattgtaatggcactaacttcttatcaggaaaacatcaaaaacaatttggaaacaatttatttggacagggagaacctgggtgggttttcggattgtgcaaactgattatatgttgctaagtgcaggacatttgggaatttttctgagggtgaaatggtgccttttggaccctaaactatggagagattagtaggatgtatggactctttgtttcaattatgtggttgcacatatgttccaagcgctaggactgaaaggatgccacttgctattttgctgaattataacctatgcttaatatagatgattcttcattaagtgaacaggtagctgacccacattcttgctgaattataacctatgcttaatcttggatccaatcaacaaacaaataagtgccacaagcaaacccaccctgagaaaaatacagtgcttttctttggttccacattcttggtttccaatgcatgtttctcttcttttgatatactgttttcttttaccgacacatctctatctttatatgtgtccaaagctccaaaatgaaatgatttagtgcttgcactgaaaaaggaacattctgtatgctaattctctaaaatgtgtatggctgaaatcgatatatttgcaacatacgaatgaccttttttaacaatttgatggagcagaatggaggataatctaccagttaatgtccgggaatatcaagaacttgctaagaaattaattctaaaaaaagtcattacacgctaagaaaaataatgtgcaagctactgaatttacaatcaagcaagggtcgaggagtgggagggagggtactgggccctaaaggagaagtaccgaaccgggctaaacccgcaggagaaggtgaagctagagaaggagcccatggggcagttcgtggatgacgacatcagggacctgccaagatctccatggaggagatcgacgccgccaagcccaccaaggacaacgtcgacgtccgcctcaagtggctcggcctcttccaccgctacaagcaccagtgtacacccactgattctacaccccctgcaatggttgttgttgctgttggtaggagcgaccccgcgagcgtgacacagacaaagcagccttcggtgccagttcagaccacttatctggtctcaaggttcttcatggccttgactctcaaagatcagagtattcttgtcaatggggatatcaatgaaggcttgcttcgcctttgtcacaagcttcatcgtttaaggaaagaatatgcatacacatttgaaagcacaagcttatcttatcagtgttctgaggttagcaggatcttgcaaggctagggacccaggggctacacatcttataactgaaaaacacatgagcagtatgttgttaacacttttttttcttgttcgtgtttcatagatagaggtatataatatggagacgaataatatttaaaccattagagacccatgtaacaataaaacagattgtttagctattatgctcactcaatatggagatcctcaagtatcttagaatcagttgggcaaacacaaatttacagtcatagttttctttgatggtttttacaaatacttggtttgcactattgatgaaaacatggtattgtttcaagccaaccttg

SEQ ID NO: 52339 - DNA, 3647 bp, Zea Mays
atcccgcacaacagtcccgctccagatcgcgccccgaaaccgtcgcccccggcctcccctcgcctcactcgattctggctggccacaaactccgccccctgcccctaccccgattatgccgccgtcgtccgatcccacccgcaaacgctgctccccgcctcgaggctcgtcggaacggacgcctggatgtcgcggctgcaacccaccgccgcgcagggaggctccgccaccagcaactcagaggatgcgcggaggccggagggcatgggagatccgccacctcctcctcggcccacgacaaaaatggcgtgggagatccgccacctcacctcctcccattcccgcgcccgcgcccgcgcctgatatggaaggtccgccgaagggactcggacgtcgaggccatggctgagccgcaccacttctccccctgcctcgcgcgcggcggccgagatggtgatggctgggttgttcgggatggtggtcctacctgccctccctgctatcctcgccccaaatcgacgagaatcatgcagcccaaatctaaggtggaggcgcctgcactgtcgatggaggtgtcgagtctgcgatggtgtctgtagatgggaaggcatggtgtgcagcggcagcggccaggtggtgtcgctgagcctgccctcctacaggctcactggcacgctctccacggccatcgggggacctctcgttcctgcgtatgctgaacctgagctccaatcggttccgcggggaggtcccagcgaccatcgttcgccttgcgcatctgcaggcgctagacctgagctacaacgccttcactgaattccagagctgcgattcccgaggccatggagcagcagaaaatatcaattgccaaaagcagccattacaatagtactcattttagggacttcatttcttgcagctgccaatccaattgcaggatgctatgactctcttaagtgatcatgaacttacacattgaaatactggtgggcctcgagaggccaggaggtggagaggagttcaacaagtactacatcatgtctgctctcctatccgtggattggtgagttagtttggatgtttgcactgggtattgttatccatcaaccccaaaccaattgcagttccctttagtcatgtcatgtttaatttccctataaatttcgtactgcatttcatatatatatgtatcaaatatggacccctgaaactgaagtaggcattccttttcaattcgtgttgcttcttcatttcctttatcagtaagggcatgtccagatccattagcactaaaatttagcagctaaaattagtacgagtgggtctaaacggacctgctaattatttgttgaagggcgtgaagggctgatattagtttcattagcagatttggagttgctaatatgtgataataattcgtatgcatcttaaactcactatctaattacctattagcaggtgagtgcaaacagcttcctgctaaaagttagcacggaatcggttgatacttattgatggtgcctgaaatatcctatagatgtctttagtagaggatccaaataatggcctgcaagggtttcttgaatcggatcgcacaaaactccatctgcttcagaattgagctaagcgcatcctaacatcttgactcctatatcgatcaattatttctgttactcatttgattctttagtttcgtagagggaggaacatcgtgccatcgtgggatgcaggccccaaggaacaccagatattttgaggaaatatttatgggtcatttgattttacttatgaggtttagatcaaatgatagatgatgtcccgcatgattttggaattgcatttgtattgtataaacctgaatataaatgtcattcttaaatttgtgaagtagtctgaatgtctgatagcatcaaaaattggtgaagtagtctgatagcaacataaactataattaattgagatcttattactcacactagatcttgctattattaatcatggtacaacactgtcctcgatgtggttatgatcttctattgtaatggcactaacttcttatcaggaaaacatcaaaaacaatttggaaacaatttatttggacagggagaacctgggtgggttttcggattgtgcaaactgattatatgttgctaagtgcaggacatttgggaatttttctgagggtgaaatggtgccttttggaccctaaactatggagagattagtaggatgttgcacatatgttccaagcgctaggactgaaaggatgccacttgctattttgctgaattataacctatgcttaatatagatgattcttcattaagtgaacaggtagctgacccacattcttgctgaattataacctatgcttaatcttggatccaatcaacaaacaaataagtgccacaagcaaacccaccctgagaaaaatacagtgcttttctttggttccacattcttggtttccaatgcatgtttctcttcttttgatatactgttttcttttaccgacacatctctatctttatatgtgtccaaagctccaaaatgaaatgatttagtgcttgcactgaaaaaggaacattctgtatgctaattctctaaaatgtgtatggctgaaatcgatatatttgcaacatacgaatgaccttttttaacaatttgatggagcagaatggaggataatctaccagttaatgtccgggaatatcaagaacttgctaagaaattaattctaaaaaaagtcattacacgctaagaaaaataatgtgcaagctactgaatttacaatcaagcaagggtcgaggagtgggagggagggtactgggccctaaaggagaagtaccgaaccgggctaaacccgcaggagaaggtgaagctagagaaggagcccatggggcagttcgtggatgacgacatcagggacctgccaagatctccatggaggagatcgacgccgccaagcccaccaaggacaacgtcgacgtccgcctcaagtggctcggcctcttccaccgctacaagcaccagtgtacacccactgattctacaccccctgcaatggttgttgttgctgttggtaggagcgaccccgcgagcgtgacacagacaaagcagccttcggtgccagttcagaccacttatctggtctcaaggttcttcatggccttgactctcaaagatcagagtattcttgtcaatggggatatcaatgaaggcttgcttcgcctttgtcacaagcttcatcgtttaaggaaagaatatgcatacacatttgaaagcacaagcttatcttatcagtgttctgaggttagcaggatcttgcaaggctagggacccaggggctacacatcttataactgaaaaacacatgagcagtatgttgttaacacttttttttcttgttcgtgtttcatagatagaggtatataatatggagacgaataatatttaaaccattagagacccatgtaacaataaaacagattgtttagctattatgctcactcaatatggagatcctcaagtatcttagaatcagttgggcaaacacaaatttacagtcatagttttctttgatggtttttacaaatacttggtttgcactattgatgaaaacatggtattgtttcaagccaaccttg

SEQ ID NO: 52340 - DNA, 3370 bp, Zea Mays
cgatcccgcacaacagtcccgctccagatcgcgccccgaaaccgtcgcccccggcctcccctcgcctcactcgattctggctggccacaaactccgccccctgcccctaccccgattatgccgccgtcgtccgatcccacccgcaaacgctgctccccgcctcgaggctcgtcggaacggacgcctggatgtcgcggctgcaacccaccgccgcgcagggaggctccgccaccagcaactcagaggatgcgcggaggccggagggcatgggagatccgccacctcctcctcggcccacgacaaaaatggcgtgggagatccgccacctcacctcctcccattcccgcgcccgcgcccgcgcctgatatggaaggtccgccgaagggactcggacgtcgaggccatggctgagccgcaccacttctccccctgcctcgcgcgcggcggccgagatggtgatggctgggttgttcgggatggtggtcctacctgccctccctgctatcctcgccccaaatcgacgagaatcatgcagcccaaatctaaggtggaggcgcctgcactgtcgatggaggtgtcgagtctgcgatggtgtctgtagatgggaaggcatggtgtgcagcggcagcggccaggtggtgtcgctgagcctgccctcctacaggctcactggcacgctctccacggccatcgggggacctctcgttcctgcgtatgctgaacctgagctccaatcggttccgcggggaggtcccagcgaccatcgttcgccttgcgcatctgcaggcgctagacctgagctacaacgccttcactgaattccagagctgcgattcccgaggccatggagcagcagaaaatatcaattgccaaaagcagccattacaatagtactcattttagggacttcatttcttgcagctgccaatccaattgcaggatgctatgactctcttaagtgatcatgaacttacacattgaaatactggtgggcctcgagaggccaggaggtggagaggagttcaacaagtactacatcatgtctgctctcctatccgtggattggtgagtgcaaacagcttcctgctaaaagttagcacggaatcggttgatacttattgatatgtctttagtagaggatccaaataatggcctgcaagggtttcttgaatcggatcgcacaaaactccatctgcttcagaattgagctaagcgcatcctaacatcttgactcctatatcgatcaattatttctgttactcatttgattctttagtttcgtagagggaggaacatcgtgccatcgtgggatgcaggccccaaggaacaccagatattttgaggaaatatttatgggtcatttgattttacttatgaggtttagatcaaatgatagatgatgtcccgcatgattttggaattgcatttgtattgtataaacctgaatataaatgtcattcttaaatttgtgaagtagtctgaatgtctgatagcatcaaaaattggtgaagtagtctgatagcaacataaactataattaattgagatcttattactcacactagatcttgctattattaatcatggtacaacactgtcctcgatgtggttatgatcttctattgtaatggcactaacttcttatcaggaaaacatcaaaaacaatttggaaacaatttatttggacagggagaacctgggtgggttttcggattgtgcaaactgattatatgttgctaagtgcaggacatttgggaatttttctgagggtgaaatggtgccttttggaccctaaactatggagagattagtaggatgtatggactctttgtttcaattatgtggtaaatcagtttagctgaaaatagagtacttttaaaggcataaatactcctatttctgtacttgagatcacatttatcctgatataggttgccattcatgatatttctaggttgcacatatgttccaagcgctaggactgaaaggatgccacttgctattttgctgaattataacctatgcttaatatagatgattcttcattaagtgaacaggtagctgacccacattcttgctgaattataacctatgcttaatcttggatccaatcaacaaacaaataagtgccacaagcaaacccaccctgagaaaaatacagtgcttttctttggttccacattcttggtttccaatgcatgtttctcttcttttgatatactgttttcttttaccgacacatctctatctttatatgtgtccaaagctccaaaatgaaatgatttagtgcttgcactgaaaaaggaacattctgtatgctaattctctaaaatgtgtatggctgaaatcgatatatttgcaacatacgaatgaccttttttaacaatttgatggagcagaatggaggataatctaccagttaatgtccgggaatatcaagaacttgctaagaaattaattctaaaaaaagtcattacacgctaagaaaaataatgtgcaagctactgaatttacaatcaagcaagggtcgaggagtgggagggagggtactgggccctaaaggagaagtaccgaaccgggctaaacccgcaggagaaggtgaagctagagaaggagcccatggggcagttcgtggatgacgacatcagggacctgccaagatctccatggaggagatcgacgccgccaagcccaccaaggacaacgtcgacgtccgcctcaagtggctcggcctcttccaccgctacaagcaccagtgtacacccactgattctacaccccctgcaatggttgttgttgctgttggtaggagcgaccccgcgagcgtgacacagacaaagcagccttcggtgccagttcagaccacttatctggtctcaaggttcttcatggccttgactctcaaagatcagagtattcttgtcaatggggatatcaatgaaggcttgcttcgcctttgtcacaagcttcatcgtttaaggaaagaatatgcatacacatttgaaagcacaagcttatcttatcagtgttctgaggttagcaggatcttgcaaggctagggacccaggggctacacatcttataactgaaaaacacatgagcagtatgttgttaacacttttttttcttgttcgtgtttcatagatagaggtatataatatggagacgaataatatttaaaccattagagacccatgtaacaataaaacagattgtttagctattatgctcactcaatatggagatcctcaagtatcttagaatcagttgggcaaacacaaatttacagtcatagttttctttgatggtttttacaaatacttggtttgcactattgatgaaaacatggtattgtttcaagccaaccttg

SEQ ID NO: 52341 - DNA, 1642 bp, Zea Mays
atatcgatcaattatttctgttactcatttgattctttagtttcgtagagggaggaacatcgtgccatcgtgggatgcaggccccaaggaacaccagatattttgaggaaatatttatgggtcatttgattttacttatgaggtttagatcaaatgatagatgatgtcccgcatgattttggaattgcatttgtattgtataaacctgaatataaatgtcattcttaaatttgtgaagtagtctgaatgtctgatagcatcaaaaattggtgaagtagtctgatagcaacataaactataattaattgagatcttattactcacactagatcttgctattattaatcatggtacaacactgtcctcgatgtggttatgatcttctattgtaatggcactaacttcttatcaggaaaacatcaaaaacaatttggaaacaatttatttggacagggagaacctgggtgggttttcggattgtgcaaactgattatatgttgctaagtgcaggacatttgggaatttttctgagggtgaaatggtgccttttggaccctaaactatggagagattagtaggatgtatggactctttgtttcaattatgtggtaaatcagtttagctgaaaatagagtacttttaaaggcataaatactcctatttctgtacttgagatcacatttatcctgatataggttgccattcatgatatttctaggttgcacatatgttccaagcgctaggactgaaaggatgccacttgctattttgctgaattataacctatgcttaatatagatgattcttcattaagtgaacagaatggaggataatctaccagttaatgtccgggaatatcaagaacttgctaagaaattaattctaaaaaaagtcattacacgctaagaaaaataatgtgcaagctactgaatttacaatcaagcaagggtcgaggagtgggagggagggtactgggccctaaaggagaagtaccgaaccgggctaaacccgcaggagaaggtgaagctagagaaggagcccatggggcagttcgtggatgacgacatcagggacctgccaagatctccatggaggagatcgacgccgccaagcccaccaaggacaacgtcgacgtccgcctcaagtggctcggcctcttccaccgctacaagcaccagtgtacacccactgattctacaccccctgcaatggttgttgttgctgttggtaggagcgaccccgcgagcgtgacacagacaaagcagccttcggtgccaggttcgatttggtttctgcaaagtttatcactcctacattttcacaattagtttctacaaattatatcactccatttcactcctatgaaattactgtgacttaatttcaatcgaggtcattcttcttgctccttcgctttgcttagcagtaaagacaataacttcctttaccttgctcaatagtttgccttttaatttgaacaaaaatctaatcacttgacattgcatgggaggtaagctcctgtttttcacaaactttatcggtggacagttcatagtcctaacagacccattagtccgatagaacagttagcattaggtaattattttggcattggcaattttgatctactcctattttaaaa

SEQ ID NO: 52342 - DNA, 1587 bp, Zea Mays
cttgaatcggatcgcacaaaactccatctgcttcagaattgagctaagcgcatcctaacatcttgactcctatatcgatcaattatttctgttactcatttgattctttagtttcgtagagggaggaacatcgtgccatcgtgggatgcaggccccaaggaacaccagatattttgaggaaatatttatgggtcatttgattttacttatgaggtttagatcaaatgatagatgatgtcccgcatgattttggaattgcatttgtattgtataaacctgaatataaatgtcattcttaaatttgtgaagtagtctgaatgtctgatagcatcaaaaattggtgaagtagtctgatagcaacataaactataattaattgagatcttattactcacactagatcttgctattattaatcatggtacaacactgtcctcgatgtggttatgatcttctattgtaatggcactaacttcttatcaggaaaacatcaaaaacaatttggaaacaatttatttggacagggagaacctgggtgggttttcggattgtgcaaactgattatatgttgctaagtgcaggacatttgggaatttttctgagggtgaaatggtgccttttggaccctaaactatggagagattagtaggatgtatggactctttgtttcaattatgtggtaaatcagtttagctgaaaatagagtacttttaaaggcataaatactcctatttctgtacttgagatcacatttatcctgatataggttgccattcatgatatttctaggttgcacatatgttccaagcgctaggactgaaaggatgccacttgctattttgctgaattataacctatgcttaatatagatgattcttcattaagtgaacagggtcgaggagtgggagggagggtactgggccctaaaggagaagtaccgaaccgggctaaacccgcaggagaaggtgaagctagagaaggagcccatggggcagttcgtggatgacgacatcagggacctgccaagatctccatggaggagatcgacgccgccaagcccaccaaggacaacgtcgacgtccgcctcaagtggctcggcctcttccaccgctacaagcaccagtgtacacccactgattctacaccccctgcaatggttgttgttgctgttggtaggagcgaccccgcgagcgtgacacagacaaagcagccttcggtgccaggttcgatttggtttctgcaaagtttatcactcctacattttcacaattagtttctacaaattatatcactccatttcactcctatgaaattactgtgacttaatttcaatcgaggtcattcttcttgctccttcgctttgcttagcagtaaagacaataacttcctttaccttgctcaatagtttgccttttaatttgaacaaaaatctaatcacttgacattgcatgggaggtaagctcctgtttttcacaaactttatcggtggacagttcatagtcctaacagacccattagtccgatagaacagttagcattaggtaattattttggcattggcaattttgatctactcctattttaaaa

SEQ ID NO: 52343 - DNA, 3524 bp, Zea Mays
atcccgcacaacagtcccgctccagatcgcgccccgaaaccgtcgcccccggcctcccctcgcctcactcgattctggctggccacaaactccgccccctgcccctaccccgattatgccgccgtcgtccgatcccacccgcaaacgctgctccccgcctcgaggctcgtcggaacggacgcctggatgtcgcggctgcaacccaccgccgcgcagggaggctccgccaccagcaactcagaggatgcgcggaggccggagggcatgggagatccgccacctcctcctcggcccacgacaaaaatggcgtgggagatccgccacctcacctcctcccattcccgcgcccgcgcccgcgcctgatatggaaggtccgccgaagggactcggacgtcgaggccatggctgagccgcaccacttctccccctgcctcgcgcgcggcggccgagatggtgatggctgggttgttcgggatggtggtcctacctgccctccctgctatcctcgccccaaatcgacgagaatcatgcagcccaaatctaaggtggaggcgcctgcactgtcgatggaggtgtcgagtctgcgatggtgtctgtagatgggaaggcatggtgtgcagcggcagcggccaggtggtgtcgctgagcctgccctcctacaggctcactggcacgctctccacggccatcgggggacctctcgttcctgcgtatgctgaacctgagctccaatcggttccgcggggaggtcccagcgaccatcgttcgccttgcgcatctgcaggcgctagacctgagctacaacgccttcactgaattccagagctgcgattcccgaggccatggagcagcagaaaatatcaattgccaaaagcagccattacaatagtactcattttagggacttcatttcttgcagctgccaatccaattgcaggatgctatgactctcttaagtgatcatgaacttacacattgaaatactggtgggcctcgagaggccaggaggtggagaggagttcaacaagtactacatcatgtctgctctcctatccgtggattggtgagttagtttggatgtttgcactgggtattgttatccatcaaccccaaaccaattgcagttccctttagtcatgtcatgtttaatttccctataaatttcgtactgcatttcatatatatatgtatcaaatatggacccctgaaactgaagtaggcattccttttcaattcgtgttgcttcttcatttcctttatcagtaagggcatgtccagatccattagcactaaaatttagcagctaaaattagtacgagtgggtctaaacggacctgctaattatttgttgaagggcgtgaagggctgatattagtttcattagcagatttggagttgctaatatgtgataataattcgtatgcatcttaaactcactatctaattacctattagcaggtgagtgcaaacagcttcctgctaaaagttagcacggaatcggttgatacttattgatggtgcctgaaatatcctatagatgtctttagtagaggatccaaataatggcctgcaagggtttcttgaatcggatcgcacaaaactccatctgcttcagaattgagctaagcgcatcctaacatcttgactcctatatcgatcaattatttctgttactcatttgattctttagtttcgtagagggaggaacatcgtgccatcgtgggatgcaggccccaaggaacaccagatattttgaggaaatatttatgggtcatttgattttacttatgaggtttagatcaaatgatagatgatgtcccgcatgattttggaattgcatttgtattgtataaacctgaatataaatgtcattcttaaatttgtgaagtagtctgaatgtctgatagcatcaaaaattggtgaagtagtctgatagcaacataaactataattaattgagatcttattactcacactagatcttgctattattaatcatggtacaacactgtcctcgatgtggttatgatcttctattgtaatggcactaacttcttatcaggaaaacatcaaaaacaatttggaaacaatttatttggacagggagaacctgggtgggttttcggattgtgcaaactgattatatgttgctaagtgcaggacatttgggaatttttctgagggtgaaatggtgccttttggaccctaaactatggagagattagtaggatgtatggactctttgtttcaattatgtggttgcacatatgttccaagcgctaggactgaaaggatgccacttgctattttgctgaattataacctatgcttaatatagatgattcttcattaagtgaacaggtagctgacccacattcttgctgaattataacctatgcttaatcttggatccaatcaacaaacaaataagtgccacaagcaaacccaccctgagaaaaatacagtgcttttctttggttccacattcttggtttccaatgcatgtttctcttcttttgatatactgttttcttttaccgacacatctctatctttatatgtgtccaaagctccaaaatgaaatgatttagtgcttgcactgaaaaaggaacattctgtatgctaattctctaaaatgtgtatggctgaaatcgatatatttgcaacatacgaatgaccttttttaacaatttgatggagcagaatggaggataatctaccagttaatgtccgggaatatcaagaacttgctaagaaattaattctaaaaaaagtcattacacgctaagaaaaataatgtgcaagctactgaatttacaatcaagcaagggtcgaggagtgggagggagggtactgggccctaaaggagaagtaccgaaccgggctaaacccgcaggagaaggtgaagctagagaaggagcccatggggcagttcgtggatgacgacatcagggacctgccaagatctccatggaggagatcgacgccgccaagcccaccaaggacaacgtcgacgtccgcctcaagtggctcggcctcttccaccgctacaagcaccagtgtacacccactgattctacaccccctgcaatggttgttgttgctgttggtaggagcgaccccgcgagcgtgacacagacaaagcagccttcggtgccaggttcgatttggtttctgcaaagtttatcactcctacattttcacaattagtttctacaaattatatcactccatttcactcctatgaaattactgtgacttaatttcaatcgaggtcattcttcttgctccttcgctttgcttagcagtaaagacaataacttcctttaccttgctcaatagtttgccttttaatttgaacaaaaatctaatcacttgacattgcatgggaggtaagctcctgtttttcacaaactttatcggtggacagttcatagtcctaacagacccattagtccgatagaacagttagcattaggtaattattttggcattggcaattttgatctactcctattttaaaa

SEQ ID NO: 52344 - DNA, 3581 bp, Zea Mays
atcccgcacaacagtcccgctccagatcgcgccccgaaaccgtcgcccccggcctcccctcgcctcactcgattctggctggccacaaactccgccccctgcccctaccccgattatgccgccgtcgtccgatcccacccgcaaacgctgctccccgcctcgaggctcgtcggaacggacgcctggatgtcgcggctgcaacccaccgccgcgcagggaggctccgccaccagcaactcagaggatgcgcggaggccggagggcatgggagatccgccacctcctcctcggcccacgacaaaaatggcgtgggagatccgccacctcacctcctcccattcccgcgcccgcgcccgcgcctgatatggaaggtccgccgaagggactcggacgtcgaggccatggctgagccgcaccacttctccccctgcctcgcgcgcggcggccgagatggtgatggctgggttgttcgggatggtggtcctacctgccctccctgctatcctcgccccaaatcgacgagaatcatgcagcccaaatctaaggtggaggcgcctgcactgtcgatggaggtgtcgagtctgcgatggtgtctgtagatgggaaggcatggtgtgcagcggcagcggccaggtggtgtcgctgagcctgccctcctacaggctcactggcacgctctccacggccatcgggggacctctcgttcctgcgtatgctgaacctgagctccaatcggttccgcggggaggtcccagcgaccatcgttcgccttgcgcatctgcaggcgctagacctgagctacaacgccttcactgaattccagagctgcgattcccgaggccatggagcagcagaaaatatcaattgccaaaagcagccattacaatagtactcattttagggacttcatttcttgcagctgccaatccaattgcaggatgctatgactctcttaagtgatcatgaacttacacattgaaatactggtgggcctcgagaggccaggaggtggagaggagttcaacaagtactacatcatgtctgctctcctatccgtggattggtgagttagtttggatgtttgcactgggtattgttatccatcaaccccaaaccaattgcagttccctttagtcatgtcatgtttaatttccctataaatttcgtactgcatttcatatatatatgtatcaaatatggacccctgaaactgaagtaggcattccttttcaattcgtgttgcttcttcatttcctttatcagtaagggcatgtccagatccattagcactaaaatttagcagctaaaattagtacgagtgggtctaaacggacctgctaattatttgttgaagggcgtgaagggctgatattagtttcattagcagatttggagttgctaatatgtgataataattcgtatgcatcttaaactcactatctaattacctattagcaggtgagtgcaaacagcttcctgctaaaagttagcacggaatcggttgatacttattgatatgtctttagtagaggatccaaataatggcctgcaagggtttcttgaatcggatcgcacaaaactccatctgcttcagaattgagctaagcgcatcctaacatcttgactcctatatcgatcaattatttctgttactcatttgattctttagtttcgtagagggaggaacatcgtgccatcgtgggatgcaggccccaaggaacaccagatattttgaggaaatatttatgggtcatttgattttacttatgaggtttagatcaaatgatagatgatgtcccgcatgattttggaattgcatttgtattgtataaacctgaatataaatgtcattcttaaatttgtgaagtagtctgaatgtctgatagcatcaaaaattggtgaagtagtctgatagcaacataaactataattaattgagatcttattactcacactagatcttgctattattaatcatggtacaacactgtcctcgatgtggttatgatcttctattgtaatggcactaacttcttatcaggaaaacatcaaaaacaatttggaaacaatttatttggacagggagaacctgggtgggttttcggattgtgcaaactgattatatgttgctaagtgcaggacatttgggaatttttctgagggtgaaatggtgccttttggaccctaaactatggagagattagtaggatgtatggactctttgtttcaattatgtggtaaatcagtttagctgaaaatagagtacttttaaaggcataaatactcctatttctgtacttgagatcacatttatcctgatataggttgccattcatgatatttctaggttgcacatatgttccaagcgctaggactgaaaggatgccacttgctattttgctgaattataacctatgcttaatatagatgattcttcattaagtgaacaggtagctgacccacattcttgctgaattataacctatgcttaatcttggatccaatcaacaaacaaataagtgccacaagcaaacccaccctgagaaaaatacagtgcttttctttggttccacattcttggtttccaatgcatgtttctcttcttttgatatactgttttcttttaccgacacatctctatctttatatgtgtccaaagctccaaaatgaaatgatttagtgcttgcactgaaaaaggaacattctgtatgctaattctctaaaatgtgtatggctgaaatcgatatatttgcaacatacgaatgaccttttttaacaatttgatggagcagaatggaggataatctaccagttaatgtccgggaatatcaagaacttgctaagaaattaattctaaaaaaagtcattacacgctaagaaaaataatgtgcaagctactgaatttacaatcaagcaagggtcgaggagtgggagggagggtactgggccctaaaggagaagtaccgaaccgggctaaacccgcaggagaaggtgaagctagagaaggagcccatggggcagttcgtggatgacgacatcagggacctgccaagatctccatggaggagatcgacgccgccaagcccaccaaggacaacgtcgacgtccgcctcaagtggctcggcctcttccaccgctacaagcaccagtgttgttgttgctgttggtaggagcgaccccgcgagcgtgacacagacaaagcagccttcggtgccaggttcgatttggtttctgcaaagtttatcactcctacattttcacaattagtttctacaaattatatcactccatttcactcctatgaaattactgtgacttaatttcaatcgaggtcattcttcttgctccttcgctttgcttagcagtaaagacaataacttcctttaccttgctcaatagtttgccttttaatttgaacaaaaatctaatcacttgacattgcatgggaggtaagctcctgtttttcacaaactttatcggtggacagttcatagtcctaacagacccattagtccgatagaacagttagcattaggtaattattttggcattggcaattttgatctactcctattttaaaa

SEQ ID NO: 52345 - DNA, 3497 bp, Zea Mays
atcccgcacaacagtcccgctccagatcgcgccccgaaaccgtcgcccccggcctcccctcgcctcactcgattctggctggccacaaactccgccccctgcccctaccccgattatgccgccgtcgtccgatcccacccgcaaacgctgctccccgcctcgaggctcgtcggaacggacgcctggatgtcgcggctgcaacccaccgccgcgcagggaggctccgccaccagcaactcagaggatgcgcggaggccggagggcatgggagatccgccacctcctcctcggcccacgacaaaaatggcgtgggagatccgccacctcacctcctcccattcccgcgcccgcgcccgcgcctgatatggaaggtccgccgaagggactcggacgtcgaggccatggctgagccgcaccacttctccccctgcctcgcgcgcggcggccgagatggtgatggctgggttgttcgggatggtggtcctacctgccctccctgctatcctcgccccaaatcgacgagaatcatgcagcccaaatctaaggtggaggcgcctgcactgtcgatggaggtgtcgagtctgcgatggtgtctgtagatgggaaggcatggtgtgcagcggcagcggccaggtggtgtcgctgagcctgccctcctacaggctcactggcacgctctccacggccatcgggggacctctcgttcctgcgtatgctgaacctgagctccaatcggttccgcggggaggtcccagcgaccatcgttcgccttgcgcatctgcaggcgctagacctgagctacaacgccttcactgaattccagagctgcgattcccgaggccatggagcagcagaaaatatcaattgccaaaagcagccattacaatagtactcattttagggacttcatttcttgcagctgccaatccaattgcaggatgctatgactctcttaagtgatcatgaacttacacattgaaatactggtgggcctcgagaggccaggaggtggagaggagttcaacaagtactacatcatgtctgctctcctatccgtggattggtgagttagtttggatgtttgcactgggtattgttatccatcaaccccaaaccaattgcagttccctttagtcatgtcatgtttaatttccctataaatttcgtactgcatttcatatatatatgtatcaaatatggacccctgaaactgaagtaggcattccttttcaattcgtgttgcttcttcatttcctttatcagtaagggcatgtccagatccattagcactaaaatttagcagctaaaattagtacgagtgggtctaaacggacctgctaattatttgttgaagggcgtgaagggctgatattagtttcattagcagatttggagttgctaatatgtgataataattcgtatgcatcttaaactcactatctaattacctattagcaggtgagtgcaaacagcttcctgctaaaagttagcacggaatcggttgatacttattgatggtgcctgaaatatcctatagatgtctttagtagaggatccaaataatggcctgcaagggtttcttgaatcggatcgcacaaaactccatctgcttcagaattgagctaagcgcatcctaacatcttgactcctatatcgatcaattatttctgttactcatttgattctttagtttcgtagagggaggaacatcgtgccatcgtgggatgcaggccccaaggaacaccagatattttgaggaaatatttatgggtcatttgattttacttatgaggtttagatcaaatgatagatgatgtcccgcatgattttggaattgcatttgtattgtataaacctgaatataaatgtcattcttaaatttgtgaagtagtctgaatgtctgatagcatcaaaaattggtgaagtagtctgatagcaacataaactataattaattgagatcttattactcacactagatcttgctattattaatcatggtacaacactgtcctcgatgtggttatgatcttctattgtaatggcactaacttcttatcaggaaaacatcaaaaacaatttggaaacaatttatttggacagggagaacctgggtgggttttcggattgtgcaaactgattatatgttgctaagtgcaggacatttgggaatttttctgagggtgaaatggtgccttttggaccctaaactatggagagattagtaggatgttgcacatatgttccaagcgctaggactgaaaggatgccacttgctattttgctgaattataacctatgcttaatatagatgattcttcattaagtgaacaggtagctgacccacattcttgctgaattataacctatgcttaatcttggatccaatcaacaaacaaataagtgccacaagcaaacccaccctgagaaaaatacagtgcttttctttggttccacattcttggtttccaatgcatgtttctcttcttttgatatactgttttcttttaccgacacatctctatctttatatgtgtccaaagctccaaaatgaaatgatttagtgcttgcactgaaaaaggaacattctgtatgctaattctctaaaatgtgtatggctgaaatcgatatatttgcaacatacgaatgaccttttttaacaatttgatggagcagaatggaggataatctaccagttaatgtccgggaatatcaagaacttgctaagaaattaattctaaaaaaagtcattacacgctaagaaaaataatgtgcaagctactgaatttacaatcaagcaagggtcgaggagtgggagggagggtactgggccctaaaggagaagtaccgaaccgggctaaacccgcaggagaaggtgaagctagagaaggagcccatggggcagttcgtggatgacgacatcagggacctgccaagatctccatggaggagatcgacgccgccaagcccaccaaggacaacgtcgacgtccgcctcaagtggctcggcctcttccaccgctacaagcaccagtgtacacccactgattctacaccccctgcaatggttgttgttgctgttggtaggagcgaccccgcgagcgtgacacagacaaagcagccttcggtgccaggttcgatttggtttctgcaaagtttatcactcctacattttcacaattagtttctacaaattatatcactccatttcactcctatgaaattactgtgacttaatttcaatcgaggtcattcttcttgctccttcgctttgcttagcagtaaagacaataacttcctttaccttgctcaatagtttgccttttaatttgaacaaaaatctaatcacttgacattgcatgggaggtaagctcctgtttttcacaaactttatcggtggacagttcatagtcctaacagacccattagtccgatagaacagttagcattaggtaattattttggcattggcaattttgatctactcctattttaaaa

SEQ ID NO: 52346 - DNA, 1996 bp, Zea Mays
ggggcaccggcgcaccgcacatcggtgcctaggtcactcgggcccactccacagaactacggaagaagaagaagcagtcggcagcaaactgaatggcgcttcgcgctgtggagctccggagattccttctccggcgcatcggcggcggcgaggcggccctgcctcctctcgcgtggcgcggccggccagcgagcacatccgccccggcggacgacgagctcgcggggaagagcgcctacgaggtcctcggggttggggagaccagttccagcgccgagatcaaggcttccttccatcgcctagccaaagagacccacccagacgtcgccgcggctgctggttcccgacggttccttcagatcctcgccgcctacgagatcctatcagattcacagagaagggctcactatgatagctacctgcgatcgcagaggcgggttgtggggaaacatcccaggccatctcagttcgtgtacccaagtggttcaggctcaggcattgtggtacctcgagagagcaatgttgttgaatggctgaaatggtacaggcttaccattgacgacatagttaccaagaagagggttgccactggctctggttattttgaaaggctcgaaagcgagctgtacacggctatccatgctgcatactatggccctgatgtcgactccatggatgtccttcctgattgctttgaagccgaggagagatctgcatatgaaacctctgagctattacaccttgtttcaggccgtgatctttttggtattgttactgtaactgatagtgtcaaagagctgtcagatgtttgtcgtgaaaaactggtaccctctggttgtagatcttcggaatttactcatgttgtttcaagaaatgcgaataagaattcaatatctatgaatcctgttgatatgaacaagcaagaaatgcgatatgaaaatgatgttccttcatcagattccttcaaggacattgagttgcaaatatgtgggaaattagttgctactgcgactaggagccccaactgcgattgcattgacaaatcggatttggaagaagatcacattcatgtgtatcttgttccaaatgcaaatatatctgatttaacacatgggaaacttctcctcggcacaattactgggttagccaccactggtgaggaaggatcttgctgtgtctacgatggtcacaacataaagacacacattattatgaagcacaggacattgatggttaaacacatgcactggtatcaggttggagatacagtttcaccctgtgagtgtcgatgtagtagggctcgattgccacctagcaggtattggctttttgagcctcgttgttacatgcatgacactggtggatggtatatcgaaacttatgggagagacaagaaagggaggacgattccgtctcaaagacagtgggatggttccaatgaacattctgaaaaatctttggatcttgaagatgctggaagaagacgatggaatgtgactagcttgctgcaatggtccttatctcatcttcgtcagctgttcaaaaaaagttgctaatggagagaaaggggattgacacgagaacaccatgaaaatagttgtttggggtctcgctttaacaattagactgaacctgtggtgtcacaccctttgctggttctgttcagctgctttttagtatgctactgtatagttagaaactaatgtgctttcttgatatgatagctgataaggacatctttctgaggctgttgactaccctgcccgtttgatatacaacatgatagtaaaggtttgcagagcgtgcgataaatgatctgacactgatggtaagatagccagaatcctacatgacaatgtcttctacatcgttttatgcatatttcttagctacaagtgacatgtaacttaaaaggatggtgccatggtggtatccaccattttgcacatctgctgtatttttataagaatttaaatccaaagccgactgattgaga

SEQ ID NO: 52347 - DNA, 2232 bp, Zea Mays
ggggcaccggcgcaccgcacatcggtgcctaggtcactcgggcccactccacagaactacggaagaagaagaagcagtcggcagcaaactgaatggcgcttcgcgctgtggagctccggagattccttctccggcgcatcggcggcggcgaggcggccctgcctcctctcgcgtggcgcggccggccagcgagcacatccgccccggcggacgacgagctcgcggggaagagcgcctacgaggtcctcggggttggggagaccagttccagcgccgagatcaaggcttccttccatcgcctagccaaagagacccacccagacgtcgccgcggctgctggttcccgacggttccttcagatcctcgccgcctacgagatcctatcagattcacagagaagggctcactatgatagctacctgcgatcgcagaggcgggttgtggggaaacatcccaggccatctcagttcgtgtacccaagtggttcaggctcaggcattgtggtacctcgagagagcaatgttgttgaatggctgaaatggtacaggcttaccattgacgacatagttaccaagaagagggttgccactggctctggttattttgaaaggctcgaaagcgagctgtacacggctatccatgctgcatactatggccctgatgtcgactccatggatgtccttcctgattgctttgaagccgaggagagatctgcatatgaaacctctgagctattacaccttgtttcaggccgtgatctttttggtattgttactgtaactgatagtgtcaaagagctgtcagatgtttgtcgtgaaaaactggtaccctctggttgtagatcttcggaatttactcatgttgtttcaagaaatgcgaataagaattcaatatctatgaatcctgttgatatgaacaagcaagaaatgcgatatgaaaatgatgttccttcatcagattccttcaaggacattgagttgcaaatatgtgggaaattagttgctactgcgactaggagccccaactgcgattgcattgacaaatcggatttggaagaagatcacattcatgtgtatcttgttccaaatgcaaatatatctgatttaacacatgggaaacttctcctcggcacaattactgggttagccaccactggtgaggaaggatcttgctgtgtctacgatggtcacaacataaagacacacattattatgaagcacaggacattgatggtatgaagtatgaacacattccttaaatattatgcacaatattttttgtacaaagtttgcttatatcaatcaaatactcatgcaaaataaacggtgacttttgttatatgactgcatgatggtgcaacagtaatcgttggacttgtatatagtattgaatgttagctgcatccatatgttgcacaggttaaacacatgcactggtatcaggttggagatacagtttcaccctgtgagtgtcgatgtagtagggctcgattgccacctagcagaaatatggatgccctgaagaccatggttcgtccagctacatataagattggtattggctttttgagcctcgttgttacatgcatgacactggtggatggtatatcgaaacttatgggagagacaagaaagggaggacgattccgtctcaaagacagtgggatggttccaatgaacattctgaaaaatctttggatcttgaagatgctggaagaagacgatggaatgtgactagcttgctgcaatggtccttatctcatcttcgtcagctgttcaaaaaaagttgctaatggagagaaaggggattgacacgagaacaccatgaaaatagttgtttggggtctcgctttaacaattagactgaacctgtggtgtcacaccctttgctggttctgttcagctgctttttagtatgctactgtatagttagaaactaatgtgctttcttgatatgatagctgataaggacatctttctgaggctgttgactaccctgcccgtttgatatacaacatgatagtaaaggtttgcagagcgtgcgataaatgatctgacactgatggtaagatagccagaatcctacatgacaatgtcttctacatcgttttatgcatatttcttagctacaagtgacatgtaacttaaaaggatggtgccatggtggtatccaccattttgcacatctgctgtatttttataagaatttaaatccaaagccgactgattgaga

SEQ ID NO: 52348 - DNA, 1100 bp, Zea Mays
caaaaccccacttcatccggcactccacgccctaaaaccctaatcgacaattcccgttgtcattcgtcagcgcgccccctcaaccccgtctcagcctagcgcgccgccacaatgcaggccgccgccgccgtcgtcgtccgccacccgcgcctattcccgccgtccccgggccgctccgcgcagcaccggcgcgcacccagcaccgtgcgcatggcgctgcgcgaggacgggccctcggtggccatcgtgggcgccacgggcgcggtgggccaggagttcctccgcgtcatcacggaccgggacttcccctaccgcggcctccgcctcctcgccagcgagcggtccgcggggaagcgcctcgcctttgaggaccgcgagtacaccgtccaggacctcgcggcccctggggcgttcgacggcgtcgacatcgcgctattcagcgccggcgggagcgtcagccggaagtatgggcccgcggccgtcgccagcggcgccgtagttgtcgacaacagctccgcgttccggatggagcccgaggtgccgctcgtcatccccgaggtcaaccccgaggccatggcgaacgtccgcctcgggcagggggcgattgtggcaaatccgaattgctcgaccatcatctgcctcatggctgccacgccgctccatcgccacgctaaggtgttaaggatggttgtcagcacataccaagcagcaagtggtgcgggtgctgcggcaatggaagaactcaagctgcagactcaggaggtcttggaagggaaggcgccaacatgcaacattttcaaacagcagtatgcttttaatatattctcacacaatgcaccagttcttgagaatgggtataacgaggaggaaatgaaaatggtgaaggagaccaggaaaatttggaatgacaaggaggtgaaagtaactgcgacttgcatacgggttcctgtgatgcgcgcacatgctgaaagtgtcaatctacagtttgaaaagccacttgatgaggatactgcaagagaaattttgagagcagctcctggtgttaccattattgatgaccgagcttccaatcgctttcctacacctctggagacaaaaag

SEQ ID NO: 52349 - DNA, 1111 bp, Zea Mays
tgttgttgtaacctgccacttcgctgtctaggatactgcaagagaaattttgagagcagctcctggtgttaccattattgatgaccgagcttccaatcgctttcctacacctctggaggtatcagacaaagatgacgtagcagtgggtaggattcgtcaggacttgtccctggatggtaaccgagggttggacatatttgtgtgtggtgatcagatacgtaaaggcgccgcactcaatgccgttcagattgctgaaatgctgctgaagtgaatgtgacctaaccctcttgtccctccctccctgtccctaattgctctgatcaaatgctggactgtactctgattagtttgtcctcaattttggtcgcctgttctgtattctgccgtgctagtgcaataattgtgttatgggcttgagttatctgctgtacgcataagtgggctcctaaactgggaaataatgggccgtccttattcagcattccggtttatatcttgttcagattcgtctaacagcccagcagtgccgggttctgtggatcacagggcccaaagtgtcctacgggatttacactttcatgtgcaagaatagggtctgattgtaacctgacccagaaggtactgggaagttctcttgagcaggaagcatctgttgcaggtctgaaagaaactgtgcaacgataagacattagagttgagaggaaagagggcgggttagcccgtaaatttctgtgatcgcatgatgtgttgtttgtcagtatatgtaatcctttgtttcaatggatttagttgttttggtggtcttatttaccgttttgcactgtaggcttcactttgcagggtggagtttgaatatagagattatgatggataagtgtaagctgttagaagtagtctaagatagatacatttgacacttggtagttcaccttttcttcgttttttactgcaaaaatatctgtcagaggagtgcggccaagagggtgaatgcctgtttgtaaattgtaatcacctgtcacgaggttaatcggcccagaggagggggatcaaagcgttctataatttaaaattaaggaggtaagcagcagttaactggccagagagcaagttg

SEQ ID NO: 52350 - DNA, 1499 bp, Zea Mays
ctcaaacgcacacgactggagtgatgtgaagctttcctggaccttatagatggctatggcctgccgcctgcatgaattgggccacaaaggtgttaaggatggttgtcagcacataccaagcagcaagtggtgcgggtgctgcggcaatggaagaactcaagctgcagactcaggaggtcttggaagggaaggcgccaacatgcaacattttcaaacagcagtatgcttttaatatattctcacacaatgcaccagttcttgagaatgggtataacgaggaggaaatgaaaatggtgaaggagaccaggaaaatttggaatgacaaggaggtgaaagtaactgcgacttgcatacgggttcctgtgatgcgcgcacatgctgaaagtgtcaatctacagtttgaaaagccacttgatgaggatactgcaagagaaattttgagagcagctcctggtgttaccattattgatgaccgagcttccaatcgctttcctacacctctggaggtatcagacaaagatgacgtagcagtgggtaggattcgtcaggacttgtccctggatggtaaccgagggttggacatatttgtgtgtggtgatcagatacgtaaaggcgccgcactcaatgccgttcagattgctgaaatgctgctgaagtgaatgtgacctaaccctcttgtccctccctccctgtccctaattgctctgatcaaatgctggactgtactctgattagtttgtcctcaattttggtcgcctgttctgtattctgccgtgctagtgcaataattgtgttatgggcttgagttatctgctgtacgcataagtgggctcctaaactgggaaataatgggccgtccttattcagcattccggtttatatcttgttcagattcgtctaacagcccagcagtgccgggttctgtggatcacagggcccaaagtgtcctacgggatttacactttcatgtgcaagaatagggtctgattgtaacctgacccagaaggtactgggaagttctcttgagcaggaagcatctgttgcaggtctgaaagaaactgtgcaacgataagacattagagttgagaggaaagagggcgggttagcccgtaaatttctgtgatcgcatgatgtgttgtttgtcagtatatgtaatcctttgtttcaatggatttagttgttttggtggtcttatttaccgttttgcactgtaggcttcactttgcagggtggagtttgaatatagagattatgatggataagtgtaagctgttagaagtagtctaagatagatacatttgacacttggtagttcaccttttcttcgttttttactgcaaaaatatctgtcagaggagtgcggccaagagggtgaatgcctgtttgtaaattgtaatcacctgtcacgaggttaatcggcccagaggagggggatcaaagcgttctataatttaaaattaaggaggtaagcagcagttaactggccagagagcaagttg

SEQ ID NO: 52351 - DNA, 2124 bp, Zea Mays
gcaaacgcaacacgtctaagcttaacaagcatgatggatctggcggcctacatcgccattctctccttagtcttcctcttcctcctacgccgcgtccatggtctcgccagacgcgacggcaagagcaggagcatgcggcggccgccgccgagccctccaggcgccgtccccttcctcggccacctccacctgatcaagaagccgttccacgccacgctgtccggcctcgcgcagcgccacgggccggtcttcacgctgcgcctgggctcccgcgacgccgcggtggtgacgtccccggcgtgcgcgcgggagtgcttcacggagcacgacgtgacgttcgccaaccgctcgctgctgccctcgcagaggctcgtgaccttcgacggcgccgcgctcggcacggccagctacgggccgcgctggcgcgacctccgccgcgtcgccgtggtgcagctcctctcggcgcaccgcgtcggctgcatgtcgggcgtcatctgcggcgaggtgcgcgccatggtgcggcgcctgcaccgcgcggctgccgcggccgcgggcgccggcgcgcgggtcgagctgaagcgcaggctgttcgagctctcgctcagcgtcctcatggaggccatcgcggagaccaaggcggcgcgccgggacccggagccggagccagacgcggacggcaccaccgacatgtcgccggaagcgcaggagttcaagcgggtcatcgacgaggtcttcccgtacgtcagctcggtgctgtgggactacctgccggtgctgcggtggttcgacgtggccggcgtgaggagcaggatcctggccgcggtgagcaggagggacgcgtttctgcggcggctgatcgacgcggagcggcggaggatggccgacggcgtctgcggcgagaagaagagcttgatcgccgtgctgctcgccctgcagaagctggagccggaggtttacaccgacaccgtgatcacggctttctgttcgaacctatttggagctggaacagagacgacctcgaccacagtcgaatgggccatgtcgctgctgctcaacaatccagggacactcgagaaggcacgagcagagatcgacgccgctgtggggcactcccgcttgctcaacgcgggcgacctgccgcgtctcggctacctcaggtgcatcatcgccgagacgctgcgcctgtaccccgccgcgccgctgctgctcccgcacgagtcgtcggcagactgcaaggtcggcggctacgacgtcccgcgcggcacggcgctgctggtgaacgtgtacgcgatccacagggacccggctgtgtgggaggagccgggcaggttcgtgccggagcggttcgagggcgggaaagccgaggggctgttcgtggcgccgtttgggatggggcggcgcaagtgccccggagagaggctcgcgctgcagacggtcggggtggcgctggggtccctcatccagtgcttccactggaacagagtcgatggcgtggaggttgacatgagcgagggcagcggactgacgatgcccaaggctgttccgctggaggctttgtgtacaactcgtgaggctatgtatgacgttcttcagaagatctgataggacattcacggagtgcgcactcgtgagcatgttcaggtcaacaaatgtaagacgttttatagactggcagacagagaataagaggaggaaaaaaaaaagggctaaggaatggtctaattcaaacgtgacatgacaagcagctatctctgttcggcccaggcgaaatggactatggtgtttcgtcatagaaacgtacatccacaacatgtggcaaacacaaaaggcaacgataggacaggacagtcatgatgtacacgcggtagggcgcctttgtgtcagtcagagtccgaaggatatcctttctgcattatagaaaagagataaaagatggtgcccacttaatctcattcaaagaaagtgcttggttccagcgatttgcataccgcagacaaagtagcaaatgttgcttccctccagcagcactcacgaagtaccactggcttggctccgtcgccgtttccaaacaggcaatgtaaccgagtgtctctcaacctcatcagtacaccatcaactctaagc

SEQ ID NO: 52352 - DNA, 2221 bp, Zea Mays
atgtcgcatcccatcaccccgcgccgcgccacccgctcgtccgcggccgatcccgcctccccgtccggacccaggcccaaaccgacgcccaggcgccaacccgtctccaccgccgccgcgaacgcgaagcaggaggaaggagaggagcacgagcggagccccgtcgacgcgctcctcgaggcgctgcccggccgccgcgagcaggcgacggacctgctccggctcctggcgcccgcgccggcgctcccgctcctcctccacgggggcgccgccacgggcaagacgcgcgcgctcctcctcgctctccgccacgtgcgcccccgcccgctgcgcgtcgcctacgccgccctgcgctcgctaccgtcccctcgcgccctgttctcctccgtcctcgcccaactcagcccgccttcgtcgtcctcctcctcctcccgcctgcgcgtccccgacaagccctcggacttcgtcgccgcgctccgcgacgcgcttgctggcctctccgcgcggggcgaggccgtgtatctggtgttcgataatttggaggttgttaggagctgggacaagggtggccagcttctggcgctcctcctccgcctctacgatctcctccgattgccgcaggtcgtgctcgtctacgtgagcagtgctacacctgacgcgtactactccatgactggctctgtcgagccgaatcacatttacttccctgattatacagtggacgaggtacgagacatcctgatgcgaggccatccaaatccgaagctgtactcatcgttccttagtgtggcgctgaagccattgttccgggtaacaaggagggtagatgaactggtggctgcactggagccacttttcaggaggtactgcgagccattgggggatttgaaggccgttccggatgagagcatcaaaagaaggttgtttgaacatatacagccacatttggctgttgccatgaacgagactttcattgttcccacgagggtttctgtggatgaatgcaaagaccacagttctcgtgggaaggccagtagtaaaagacagtttggcagtagggatggcttgccgactgaattggagttccacatgtctgtgtctgcgaaatacttactattgtcagctttcctggcttcaaggaacccggctactcttgatgcagctttgttcgattcaactggagggtcagataacaataggcgtaagagaaagagctctcaagcatcgatgaatatgaaggacaccatggccgaagagatgcttatgaaaggccccggcacatttcctcttgagaggctcttggctatatttcagtgtatcacatcagtgtcagaagatgatctcggtgatgttgaatgttctgatagtatgatgaatggaagtggaatgactggtttgatgtcagatgttcttttgcaactgtcaacactttgcaattctaatttcctctccaaaagccggagctgcccgatggaaggctcagctagatatcgatctaacattgatgaagatttagcactcaaggttgccaggagtgttagtttccccctctcgaagtatatttacagaagatagcctttgcatccttagcctaggctgtaacaactgttgtctgttgttgttgggtttagactataatgggatccaatttgtctatttcacaagatggtagagcatcaagggataaagcaaatgctatatgctctatcttctttagtgtgttgacttctgatagtcctgtttctcagtcagacaacgagtacggtgtctgatcctggatctagtggtaacttaacattctgagctttatggagatgtctcagaagtagcattatgtcaatagctcgtgccattcagacagaaaagaaccattagcatctgaatatagccatgctgcttagtttgctagatgttcttttcttcacaattcaaatgtaatgcggtttttgtgtgtcacagtggtaccacgattctatctgaaagagatcagtgccactttgtccaagtccaatgttgttgtaatgatctgtattaagtgattattccattcacaaccatatgaacttccagtggtactggtttagaacccttaacatagcattgggctgttgaggtattgcctgcagctgattagaccttatgaatgcattttattctttgggactagaatgcccttgtccacgctttacttgatattatgcccacttgaacaggaaagttc

SEQ ID NO: 52353 - DNA, 1000 bp, Zea Mays
cttcaatcgtaatattccttcccaaagtgccagtatatactgataacgatcatcattatccatgttaaactgggaatgttttcagttgtcaattagcttgctgcttgccttgtaagtgcatatttctagttcgtgtcaggtctgtgagattgtgacaataaatcattcacgatgattttgcttgttccatctgcttgaatcggtgtgtatgtacatgttgagattttaggttgtacattaagcaagcatcctctgcaatatcaatcgtggacgaagaggattctgaacctgaatgggtggaatacaagatcaaagagacgaacatattcactgtggacaaatatcagcagatagggttctttcctgaagaaaaggcatttgctctgaggtatcagactgctggaatgctggagactgttcttcgggttggcacgcttggagaagatgatactggtgaagaatctcccaaaaacctgaagataccttctcgcaagccatctatcgtatgtgaaaattgtctttactcccttgaaggcaatggtcgaatgagggctttccacataatggatccaaagggagtgcttgacacacttcttatttttcatgagaagaggcagggatctgaattggcacaatcatttaaacactattcagtttgtaccaagagtgccagcagtgataggataagtacagtacttggaagatgggagggtcattctgtgactaagaggagtggggtgtatggagcaacacttgctgaagcagatacagctgttgttctcaaaatgggctctaatggccaattgattcaggccaactgctggaaagggcctccgaacctgaatagggatttcaagaaccgaagtggcgccaaaggacgacgcatatcatacatgcaaccggtctggtcaagccgatgccttttttattttttttttctttgtacgggtgggagtcatggagaggcagagagcacatcataacaaattgacaatgcgac

SEQ ID NO: 52354 - DNA, 1217 bp, Zea Mays
gccttgtaagtgcatatttctagttcgtgtcaggttgtacattaagcaagcatcctctgcaatatcaatcgtggacgaagaggattctgaacctgaatgggtggaatacaagatcaaagagacgaacatattcactgtggacaaatatcagcagatagggttctttcctgaagaaaaggcatttgctctgaggtatcagactgctggaatgctggagactgttcttcgggttggcacgcttggagaagatgatactggtgaagaatctcccaaaaacctgaagataccttctcgcaagccatctatcaggcagggatctgaattggcacaatcatttaaacactattcagtttgtaccaagagtgccagcagtgataggataagtacagtacttggaagatgggagggtcattctgtgactaagaggagtggggtgtatggagcaacacttgctgaagcagatacagctgttgttctcaaaatgggctctaatggccaattgattcaggatactttatcaactaaaatcggaaccggtacaacaacaacggtcaactggacaggatcagcaaatgaaaacttgcttcagtttgatggaggatatgaaataacattgctacctggtgggatgtacatgggatatccatcagacattagcaaatctatttcccaattagattcttttcatttagagttttgttggatggaatcacctggaaagaggcagcggcttgtccgaacttacgatgcagctggtttggctgtttcatcgacctatttttttgaaaccaaagtttgagtcatagcttctacaaaatgtattgcaacggttttgtaagtcatacagtaatctcactatttgtgtccttcggtgcatgatatttgagtatatattgtcagatctttctatatccaaaacccagaaattcatgaaccaaacgtgtattcttgttttgctcattatgttgcattcctctcgatgatgataatagaggaacaacggaaaattagcatactactcacaagggaaaattagcatactactcaagcatatcactgagcatctcatgtgcataaattaaaaaatatctaaatttgaacccatgaaaccgtaagttgtacacatgataaagtttatattgttagattgacccagtgcgatatgtcgttggattgttacgtgaaatatgtgacatcaagcattctcgagaggtata

SEQ ID NO: 52355 - DNA, 2030 bp, Zea Mays
actctgatatttatctcaccctcactttggtctcatctaaacaccgtaaaattgtgatgcccccttctatccattcttatgatcaaaccaaacataccactatagccgtcgccaatacccgataagactcggcaaatcagctggacacatagcacatctatcccgcttccgtctcccgctccagtcgccatggcggaagccctcgtgggcctccgcgtcgctgccctcgccgtcccgcagcctaggagccaccgcagacggcttcttcccgctgcgcgcctcgctgcgttccggcgcgaccggctgagcaccgcccgcgcggccgtcgcagggccaccggaggtggacgaggacgattccatgagtatcgacaacttgcatcgtttcttcgacctcaacgtcggaaagtgggacgggtcattctaccaattcgacgcgcacgggagggttcttcaggagattagcacgcggctgtccgtgagcacgtacggggaggacaacctcatcagcctccttcaatcgtaatattccttcccaaagtgccagtatatactgataacgatcatcattatccatgttaaactgggaatgttttcagttgtcaattagcttgctgcttgccttgtaagtgcatatttctagttcgtgtcaggtctgtgagattgtgacaataaatcattcacgatgattttgcttgttccatctgcttgaatcggtgtgtatgtacatgttgagattttaggttgtacattaagcaagcatcctctgcaatatcaatcgtggacgaagaggattctgaacctgaatgggtggaatacaagatcaaagagacgaacatattcactgtggacaaatatcagcagggttctttcctgaagaaaaggcatttgctctgaggtatcagactgctggaatgctggagactgttcttcgggttggcacgcttggagaagatgatactggtgaagaatctcccaaaaacctgaagataccttctcgcaagccatctatcgtatgtgaaaattgtctttactcccttgaaggcaatggtcgaatgagggctttccacataatggatccaaagggagtgcttgacacacttcttatttttcatgagaagaggcagggatctgaattggcacaatcatttaaacactattcagtttgtaccaagagtgccagcagtgataggataagtacagtacttggaagatgggagggtcattctgtgactaagaggagtggggtgtatggagcaacacttgctgaagcagatacagctgttgttctcaaaatgggctctaatggccaattgattcaggatactttatcaactaaaatcggaaccggtacaacaacaacggtcaactggacaggatcagcaaatgaaaacttgcttcagtttgatggaggatatgaaataacattgctacctggtgggatgtacatgggatatccatcagacattagcaaatctatttcccaattagattcttttcatttagagttttgttggatggaatcacctggaaagaggcagcggcttgtccgaacttacgatgcagctggtttggctgtttcatcgacctatttttttgaaaccaaagtttgagtcatagcttctacaaaatgtattgcaacggttttgtaagtcatacagtaatctcactatttgtgtccttcggtgcatgatatttgagtatatattgtcagatctttctatatccaaaacccagaaattcatgaaccaaacgtgtattcttgttttgctcattatgttgcattcctctcgatgatgataatagaggaacaacggaaaattagcatactactcacaagggaaaattagcatactactcaagcatatcactgagcatctcatgtgcataaattaaaaaatatctaaatttgaacccatgaaaccgtaagttgtacacatgataaagtttatattgttagattgacccagtgcgatatgtcgttggattgttacgtgaaatatgtgacatcaagcattctcgagaggtata

SEQ ID NO: 52356 - DNA, 1712 bp, Zea Mays
actctgatatttatctcaccctcactttggtctcatctaaacaccgtaaaattgtgatgcccccttctatccattcttatgatcaaaccaaacataccactatagccgtcgccaatacccgataagactcggcaaatcagctggacacatagcacatctatcccgcttccgtctcccgctccagtcgccatggcggaagccctcgtgggcctccgcgtcgctgccctcgccgtcccgcagcctaggagccaccgcagacggcttcttcccgctgcgcgcctcgctgcgttccggcgcgaccggctgagcaccgcccgcgcggccgtcgcagggccaccggaggtggacgaggacgattccatgagtatcgacaacttgcatcgtttcttcgacctcaacgtcggaaagtgggacgggtcattctaccaattcgacgcgcacgggagggttcttcaggagattagcacgcggctgtccgtgagcacgtacggggaggacaacctcatcagcctccttcaatcgttgtacattaagcaagcatcctctgcaatatcaatcgtggacgaagaggattctgaacctgaatgggtggaatacaagatcaaagagacgaacatattcactgtggacaaatatcagcagtgtacagatagggttctttcctgaagaaaaggcatttgctctgaggtatcagactgctggaatgctggagactgttcttcgggttggcacgcttggagaagatgatactggtgaagaatctcccaaaaacctgaagataccttctcgcaagccatctatcaggcagggatctgaattggcacaatcatttaaacactattcagtttgtaccaagagtgccagcagtgataggataagtacagtacttggaagatgggagggtcattctgtgactaagaggagtggggtgtatggagcaacacttgctgaagcagatacagctgttgttctcaaaatgggctctaatggccaattgattcaggatactttatcaactaaaatcggaaccggtacaacaacaacggtcaactggacaggatcagcaaatgaaaacttgcttcagtttgatggaggatatgaaataacattgctacctggtgggatgtacatgggatatccatcagacattagcaaatctatttcccaattagattcttttcatttagagttttgttggatggaatcacctggaaagaggcagcggcttgtccgaacttacgatgcagctggtttggctgtttcatcgacctatttttttgaaaccaaagtttgagtcatagcttctacaaaatgtattgcaacggttttgtaagtcatacagtaatctcactatttgtgtccttcggtgcatgatatttgagtatatattgtcagatctttctatatccaaaacccagaaattcatgaaccaaacgtgtattcttgttttgctcattatgttgcattcctctcgatgatgataatagaggaacaacggaaaattagcatactactcacaagggaaaattagcatactactcaagcatatcactgagcatctcatgtgcataaattaaaaaatatctaaatttgaacccatgaaaccgtaagttgtacacatgataaagtttatattgttagattgacccagtgcgatatgtcgttggattgttacgtgaaatatgtgacatcaagcattctcgagaggtata

SEQ ID NO: 52357 - DNA, 727 bp, Zea Mays
gccttgtaagtgcatatttctagttcgtgtcaggttgtacattaagcaagcatcctctgcaatatcaatcgtggacgaagaggattctgaacctgaatgggtggaatacaagatcaaagagacgaacatattcactgtggacaaatatcagcagatagggttctttcctgaagaaaaggcatttgctctgaggtatcagactgctggaatgctggagactgttcttcgggttggcacgcttggagaagatgatactggtgaagaatctcccaaaaacctgaagataccttctcgcaagccatctatcgtatgtgaaaattgtctttactcccttgaaggcaatggtcgaatgagggctttccacataatggatccaaagggagtgcttgacacacttcttatttttcatgagaagaggcagggatctgaattggcacaatcatttaaacactattcagtttgtaccaagagtgccagcagtgataggataagtacagtacttggaagatgggagggtcattctgtgactaagaggagtggggtgtatggagcaacacttgctgaagcagatacagctgttgttctcaaaatgggctctaatggccaattgattcaggctgtgttggcgatcagagcggaggtccgtcgccggaaggcttggtaaaggtttcgcctgcctagtgcccgtgttttttcccttcgcattgaaggtttttccacgtaaggg

SEQ ID NO: 52358 - DNA, 1215 bp, Zea Mays
actctgatatttatctcaccctcactttggtctcatctaaacaccgtaaaattgtgatgcccccttctatccattcttatgatcaaaccaaacataccactatagccgtcgccaatacccgataagactcggcaaatcagctggacacatagcacatctatcccgcttccgtctcccgctccagtcgccatggcggaagccctcgtgggcctccgcgtcgctgccctcgccgtcccgcagcctaggagccaccgcagacggcttcttcccgctgcgcgcctcgctgcgttccggcgcgaccggctgagcaccgcccgcgcggccgtcgcagggccaccggaggtggacgaggacgattccatgagtatcgacaacttgcatcgtttcttcgacctcaacgtcggaaagtgggacgggtcattctaccaattcgacgcgcacgggagggttcttcaggagattagcacgcggctgtccgtgagcacgtacggggaggacaacctcatcagcctccttcaatcgttgtacattaagcaagcatcctctgcaatatcaatcgtggacgaagaggattctgaacctgaatgggtggaatacaagatcaaagagacgaacatattcactgtggacaaatatcagcagatagggttctttcctgaagaaaaggcatttgctctgaggtatcagactgctggaatgctggagactgttcttcgggttggcacgcttggagaagatgatactggtgaagaatctcccaaaaacctgaagataccttctcgcaagccatctatcgtatgtgaaaattgtctttactcccttgaaggcaatggtcgaatgagggctttccacataatggatccaaagggagtgcttgacacacttcttatttttcatgagaagaggcagggatctgaattggcacaatcatttaaacactattcagtttgtaccaagagtgccagcagtgataggataagtacagtacttggaagatgggagggtcattctgtgactaagaggagtggggtgtatggagcaacacttgctgaagcagatacagctgttgttctcaaaatgggctctaatggccaattgattcaggctgtgttggcgatcagagcggaggtccgtcgccggaaggcttggtaaaggtttcgcctgcctagtgcccgtgttttttcccttcgcattgaaggtttttccacgtaaggg

SEQ ID NO: 52359 - DNA, 1127 bp, Zea Mays
gaatccagaatccacataccggcccatttacagcaaggaaccgcgaagcccaagctcgtcttctttcttggaagaggggccgcttcactcgactgaaagcgcaatcaactctagtctctagccacaactcgaagtacgagtaactccggagtccggatggctgcagcgatggacgtcgacgaagccggcggcgaggagaggcgaccgtcagagaaggagctcttccgcgccgctgagtccggcgacgccgccgcgttcgcctccctcgcccccgccgacctctccctgcgcaacgaggacggccgctccctcctccacgtcgccgccgctgccgggcatccccaggtggtgctcgcgcttgcccagtgcggtggtgacgccgcggctagcgtgctgaatgcgcaggacgaggaggggtgggcgccgatccactccgccgcgagctccggcaactctcaaatcgtcgacatcctgcttgagcgagggaggcttaacatagctgaaaaactaatagcccatggtgctaatgtcaacaagaaagacaagtttggctgcacacctttgcatagagctgcaagcactggaaacgcggagctgtgtgaattcctcattgaggaaggtgctgaagttgatgctgttgacaagacaggacaaacacctcttacgcatgctgttatatgtgagaacaaaggggctgctcttctgctaattagacatggtgctgatgttgatgtcgaggacaaggaaggctacactgcccttggccgagcatcgaacagcttcagacctgtactcatcgatgcagccagggcaatgctcgaaggatgatctggtgctctgctcaaagacgatggaaagtgtgatacgagaaactgtgctgagtcgaggtgttaaagcttgttctggtgtgtaaacaaaggggctctctacagaatcagatttgaccctgctagaattttgcccttgttgggtttatttaaccattgtgactaacatctcataagctaagctttggttctcccttctctctttcttttatgtctgttcatgatggcgtatcaggctatcagctaacagatcggtgactgtcacacccggctttaaggaacaaagccaggtgcatctca

SEQ ID NO: 52360 - DNA, 5091 bp, Zea Mays
aattgctcgagtcaatccggtaggtgtagccgtgtctgcgtagccgttccggggagccaagggctcggcaccaccgcggcatcggtgcacaaggacggcgcacgtacgcgccacgtccttgggccccggcgcagttgtaccctccatctctgtcctctttacttgccccatccatcccacgccgatcgccaggcgccagcagcaggctagctctgctccgccgctcactgctcgctagctactggaccgcgcttccctctctccatcgcgccggcgcgcacggctagctctagctcccggagccgccctttcatggtccccgccgtggtcgggacgagatgcctccgctcgcattcctccgccgctacctccccgcgaggaaccgagtgtctgttatcgatcctgagttgcgtctgtctgtttgtttccctgagcaaaggcttctcgcgcgagcgtgcgatggtggagtccgggggagcccgggcgtggcgcgggacgaggaggccggaggcagcggcggactgagcggccggtcggcgggggcgccgtccggggagtgctacgcgtgcacgcagcccggggtgccggcgttccactccacggcctgcgaccaggtgcactcgccggactgggacgccgacgcggggtcctcgctggtgccggtccaggcgcagcagcaggcccagccggcggcggcggcggcgcagcacgcggcgcggtggctgttcgggcccgtgctggacccgcgcagcaagcgcgtgcagcgctggaaccgctggatcctgctcggccgcgccgccgcgctggcgctggacccgctcttcttctacgcgctctccatcggccgcgccggccggccctgcctctacttggacgccggcctcgccgccgcggtcaccgcgctccggacctgcgccgacgtcgcgcacctcgcgcacgtgctcctgcagttccgcctcgcctacgtctcccgcgagtccctcgtcgtcgggtgcggcaagctcgtctgggacgcccgcgccatcgccgcgcactacgcccgctccgtcaagggcctctgcttcgacctcttcgtcatcctccccatcccgcaggtcatcttctggttggttataccaaagttaattagggaagaacgtgttaggcttatcatgacgatactgctactcatgttcatatttcaatttctccccaaggtctaccatagtatacacatcatgaggaaaatgcagaaggtgacgggttacatctttggatcgatatggtggggatttggtttaaatctatttgcctatttcattgcttctcatattgcaggtgggtgctggtatgttcttgcaatccagcgcattgcttcctgcctccaggaagaatgcaagaaaaacaatagttgtgatctaatatcactagcttgttcgaaggagatatgctttcaccctccttggtcttcgaatgttaatgggttcgcatgtgatacgaacatgacctcctttagtcaacgaaatgtgtctacttgtttaagtggtaaagggtcgtttgcttatggaatctatttgggggctcttcctgttatatcgagcaattcgcttgctgtcaaaattctctatcctatattttggggactcatgacactcaggtaatcacttcttaataatctgctatattctctccaacacagggtctgctctctaggaaactattgtcttaataatctgctatattctcaaaagtcaaaatattctctctttcttatactgtttatctgaataaacatggcatcaaactgataccccagttccacttcaaaaaaaaattagtcttgttccatgctgcatacacatgtatttttttatgctgcatattcataaacttgtacaattccttgaattgcttggcagtacttttggtaacgatcttgccccaacaagcaatggtattgaggtgatattcagcataatcaatgtcctcagtggcctgatgctcttcacattgctgatcggaaacatacaggtatttctgcacgcggtcctggcaaggaagcggaagatgcagctgcggttccgagacatggaatggtggatgagacggaggcagctgccgtctcggctgaggcagagggtgcgcaaatatgagcgcgaacgctgggccgccgtcacgggagacgaggagatggagatgatcaaggatctgcctgaaggactgaggcgggacatcaagcgctacctctgcctcgagctggttaagcaggttccgctgttccatggcatggacgatctgatcctggataacatctgcgaccggctgcggccactggtgttctccagcggggagaaggtgatccgagagggcgaccccgtgcagcgcatggtgttcatcctgcagggcaagctccggagcacgcagccgctgaccaagggcgtggtggcaacgtgcatgctaggggcgggcaacttcctaggcgacgagctgctgtcgtggtgcctgcgccgccccttcgtggaccggctccccgcgtcgtcggccacgttcgagtgcgtggaggcggcgcaggcgttctgcctcgacgcgccggacctgcggttcatcaccgagcacttccgctacaagttcgccaacgagaagctcaggcgcacggcgcggtactactcgtccaactggcggacgtgggccgccgtcaacatccagctcgcgtggcgcaggtatagggcccgggcatcgacggacctggcggcgatggccgcgccgccgttggcgggcggacccgacgacggggaccggcggctcagacactacgcggccatgttcatgtcgctccggccgcatgaccacctagagtgatcaggaggggggacgggaccatcctagctgtgccggccgggtcatggtgtctgtacagtgtacactagtggtatgttgttgtcatcttctgcgtgagtgaactggtggttcgggatttgtcatttaaagaaggtcaataatggagaaatagtttcttagcccgattcaattgtcttcctttcaccaagaataaaaattacttctgccggactgcctctccgcgttggtctggattgcttttaccaagaataaaaattgcagccccggctgcagcggctgatggcaggacagattcagacgcgcagagaatacgtacaagtcgccgaagtcggtatccattccaaccaggttctccaccaccagattcagaaaccgcctggcctgttcatcctctccaaaacaaactaaaatcgagaaacgcgatcgtaaggtagcggcggcggcggcggcgtggcgacagcaggagtatgattggcccagttcaatcgcgcgggcgcggccaatctggtaggcggtcatcatcagaatccagaatccacataccggcccatttacagcaaggaaccgcgaagcccaagctcgtcttctttcttggaagaggggccgcttcactcgactgaaagcgcaatcaactctagtctctagccacaactcgaagtacgagtaactccggagtccggatggctgcagcgatggacgtcgacgaagccggcggcgaggagaggcgaccgtcagagaaggagctcttccgcgccgctgagtccggcgacgccgccgcgttcgcctccctcgcccccgccgacctctccctgcgcaacgaggacggccgctccctcctccacgtcgccgccgctgccgggcatccccaggtggtgctcgcgcttgcccagtgcggtggtgacgccgcggctagcgtgctgaatgcgcaggacgaggaggggtgggcgccgatccactccgccgcgagctccggcaactctcaaatcgtcgacatcctgcttgagcgaggtgctgatgttaacctggttactgatggtggtcgaactgctcttcattatgctgcgagtaaagggaggcttaacatagctgaaaaactaatagcccatggtgctaatgtcaacaagaaagacaaggtttgtatactttcaacaatctaaaacaatatgcaaatggacttcattggtggtaaaactcaaatccagaaaagaggtttaatgccccagctcattgacagtcagatatctatgagtttttgatgacattgaaacttggctagtgtttagtgtgagatgtatatgaatctgtaaacatggaagctttttctgccctgaagcaatgcaatgacaaggctgagatctgttgaattcttaaaatcatgaagctaatgtttgtcaatatctattttttcttgtgaaacatttagtctagcatagttcttttgtcctctatatcagtttggacaagaaaaaataaccaggtaaattttatgtggtcagatacagttgatatttgtgagactcagagatgtggtagatgccccctccccctagaaataagtttattgctgttatgcatatcgcatatgcctctgcattgtacaccatcgcacaaattgcagtaggcaaccaaactgattcgctaaactcatggatcttaaactgcttcttttcagtttggctgcacacctttgcatagagctgcaagcactggaaacgcggagctgtgtgaattcctcattgaggaaggtgctgaagttgatgctgttgacaagacaggacaaacacctcttacgcatgctgttatatgtgagaacaaaggggctgctcttctgctaattagacatggtgctgatgttgatgtcgaggacaaggaaggctacactgcccttggccgagcatcgaacagcttcagacctgtactcatcgatgcagccagggcaatgctcgaaggatgatctggtgctctgctcaaagacgatggaaagtgtgatacgagaaactgtgctgagtcgaggtgttaaagcttgttctggtgtgtaaacaaaggggctctctacagaatcagatttgaccctgctagaattttgcccttgttgggtttatttaaccattgtgactaacatctcataagctaagctttggttctcccttctctctttcttttatgtctgttcatgatggcgtatcaggctatcagctaacagatcggtgactgtcacacccggctttaaggaacaaagccaggtgcatctca

SEQ ID NO: 52361 - DNA, 4290 bp, Zea Mays
aattgctcgagtcaatccggtaggtgtagccgtgtctgcgtagccgttccggggagccaagggctcggcaccaccgcggcatcggtgcacaaggacggcgcacgtacgcgccacgtccttgggccccggcgcagttgtaccctccatctctgtcctctttacttgccccatccatcccacgccgatcgccaggcgccagcagcaggctagctctgctccgccgctcactgctcgctagctactggaccgcgcttccctctctccatcgcgccggcgcgcacggctagctctagctcccggagccgccctttcatggtccccgccgtggtcgggacgagatgcctccgctcgcattcctccgccgctacctccccgcgaggaaccgagtgtctgttatcgatcctgagttgcgtctgtctgtttgtttccctgagcaaaggcttctcgcgcgagcgtgcgatggtggagtccgggggagcccgggcgtggcgcgggacgaggaggccggaggcagcggcggactgagcggccggtcggcgggggcgccgtccggggagtgctacgcgtgcacgcagcccggggtgccggcgttccactccacggcctgcgaccaggtgcactcgccggactgggacgccgacgcggggtcctcgctggtgccggtccaggcgcagcagcaggcccagccggcggcggcggcggcgcagcacgcggcgcggtggctgttcgggcccgtgctggacccgcgcagcaagcgcgtgcagcgctggaaccgctggatcctgctcggccgcgccgccgcgctggcgctggacccgctcttcttctacgcgctctccatcggccgcgccggccggccctgcctctacttggacgccggcctcgccgccgcggtcaccgcgctccggacctgcgccgacgtcgcgcacctcgcgcacgtgctcctgcagttccgcctcgcctacgtctcccgcgagtccctcgtcgtcgggtgcggcaagctcgtctgggacgcccgcgccatcgccgcgcactacgcccgctccgtcaagggcctctgcttcgacctcttcgtcatcctccccatcccgcaggtcatcttctggttggttataccaaagttaattagggaagaacgtgttaggcttatcatgacgatactgctactcatgttcatatttcaatttctccccaaggtctaccatagtatacacatcatgaggaaaatgcagaaggtgacgggttacatctttggatcgatatggtggggatttggtttaaatctatttgcctatttcattgcttctcatattgcaggtgggtgctggtatgttcttgcaatccagcgcattgcttcctgcctccaggaagaatgcaagaaaaacaatagttgtgatctaatatcactagcttgttcgaaggagatatgctttcaccctccttggtcttcgaatgttaatgggttcgcatgtgatacgaacatgacctcctttagtcaacgaaatgtgtctacttgtttaagtggtaaagggtcgtttgcttatggaatctatttgggggctcttcctgttatatcgagcaattcgcttgctgtcaaaattctctatcctatattttggggactcatgacactcagtacttttggtaacgatcttgccccaacaagcaatggtattgaggtgatattcagcataatcaatgtcctcagtggcctgatgctcttcacattgctgatcggaaacatacaggtatttctgcacgcggtcctggcaaggaagcggaagatgcagctgcggttccgagacatggaatggtggatgagacggaggcagctgccgtctcggctgaggcagagggtgcgcaaatatgagcgcgaacgctgggccgccgtcacgggagacgaggagatggagatgatcaaggatctgcctgaaggactgaggcgggacatcaagcgctacctctgcctcgagctggttaagcaggttccgctgttccatggcatggacgatctgatcctggataacatctgcgaccggctgcggccactggtgttctccagcggggagaaggtgatccgagagggcgaccccgtgcagcgcatggtgttcatcctgcagggcaagctccggagcacgcagccgctgaccaagggcgtggtggcaacgtgcatgctaggggcgggcaacttcctaggcgacgagctgctgtcgtggtgcctgcgccgccccttcgtggaccggctccccgcgtcgtcggccacgttcgagtgcgtggaggcggcgcaggcgttctgcctcgacgcgccggacctgcggttcatcaccgagcacttccgctacaagttcgccaacgagaagctcaggcgcacggcgcggtactactcgtccaactggcggacgtgggccgccgtcaacatccagctcgcgtggcgcaggtatagggcccgggcatcgacggacctggcggcgatggccgcgccgccgttggcgggcggacccgacgacggggaccggcggctcagacactacgcggccatgttcatgtcgctccggccgcatgaccacctagagtgatcaggaggggggacgggaccatcctagctgtgccggccgggtcatggtgtctgtacagtgtacactagtggtatgttgttgtcatcttctgcgtgagtgaactggtggttcgggatttgtcatttaaagaaggtcaataatggagaaatagtttcttagcccgattcaattgtcttcctttcaccaagaataaaaattacttctgccggactgcctctccgcgttggtctggattgcttttaccaagaataaaaattgcagccccggctgcagcggctgatggcaggacagattcagacgcgcagagaatacgtacaagtcgccgaagtcggtatccattccaaccaggttctccaccaccagattcagaaaccgcctggcctgttcatcctctccaaaacaaactaaaatcgagaaacgcgatcgtaaggtagcggcggcggcggcggcgtggcgacagcaggagtatgattggcccagttcaatcgcgcgggcgcggccaatctggtaggcggtcatcatcagaatccagaatccacataccggcccatttacagcaaggaaccgcgaagcccaagctcgtcttctttcttggaagaggggccgcttcactcgactgaaagcgcaatcaactctagtctctagccacaactcgaagtacgagtaactccggagtccggatggctgcagcgatggacgtcgacgaagccggcggcgaggagaggcgaccgtcagagaaggagctcttccgcgccgctgagtccggcgacgccgccgcgttcgcctccctcgcccccgccgacctctccctgcgcaacgaggacggccgctccctcctccacgtcgccgccgctgccgggcatccccaggtggtgctcgcgcttgcccagtgcggtggtgacgccgcggctagcgtgctgaatgcgcaggacgaggaggggtgggcgccgatccactccgccgcgagctccggcaactctcaaatcgtcgacatcctgcttgagcgaggtgctgatgttaacctggttactgatggtggtcgaactgctcttcattatgctgcgagtaaagggaggcttaacatagctgaaaaactaatagcccatggtgctaatgtcaacaagaaagacaagtttggctgcacacctttgcatagagctgcaagcactggaaacgcggagctgtgtgaattcctcattgaggaaggtgctgaagttgatgctgttgacaagacaggacaaacacctcttacgcatgctgttatatgtgagaacaaaggggctgctcttctgctaattagacatggtgctgatgttgatgtcgaggacaaggaaggctacactgcccttggccgagcatcgaacagcttcagacctgtactcatcgatgcagccagggcaatgctcgaaggatgatctggtgctctgctcaaagacgatggaaagtgtgatacgagaaactgtgctgagtcgaggtgttaaagcttgttctggtgtgtaaacaaaggggctctctacagaatcagatttgaccctgctagaattttgcccttgttgggtttatttaaccattgtgactaacatctcataagctaagctttggttctcccttctctctttcttttatgtctgttcatgatggcgtatcaggctatcagctaacagatcggtgactgtcacacccggctttaaggaacaaagccaggtgcatctca

SEQ ID NO: 52362 - DNA, 5439 bp, Zea Mays
aattgctcgagtcaatccggtaggtgtagccgtgtctgcgtagccgttccggggagccaagggctcggcaccaccgcggcatcggtgcacaaggacggcgcacgtacgcgccacgtccttgggccccggcgcagttgtaccctccatctctgtcctctttacttgccccatccatcccacgccgatcgccaggcgccagcagcaggctagctctgctccgccgctcactgctcgctagctactggaccgcgcttccctctctccatcgcgccggcgcgcacggctagctctagctcccggagccgccctttcatggtccccgccgtggtcgggacgagatgcctccgctcgcattcctccgccgctacctccccgcgaggcttctcgcgcgagcgtgcgatggtggagtccgggggagcccgggcgtggcgcgggacgaggaggccggaggcagcggcggactgagcggccggtcggcgggggcgccgtccggggagtgctacgcgtgcacgcagcccggggtgccggcgttccactccacggcctgcgaccaggtgcactcgccggactgggacgccgacgcggggtcctcgctggtgccggtccaggcgcagcagcaggcccagccggcggcggcggcggcgcagcacgcggcgcggtggctgttcgggcccgtgctggacccgcgcagcaagcgcgtgcagcgctggaaccgctggatcctgctcggccgcgccgccgcgctggcgctggacccgctcttcttctacgcgctctccatcggccgcgccggccggccctgcctctacttggacgccggcctcgccgccgcggtcaccgcgctccggacctgcgccgacgtcgcgcacctcgcgcacgtgctcctgcagttccgcctcgcctacgtctcccgcgagtccctcgtcgtcgggtgcggcaagctcgtctgggacgcccgcgccatcgccgcgcactacgcccgctccgtcaagggcctctgcttcgacctcttcgtcatcctccccatcccgcaggtcatcttctggttggttataccaaagttaattagggaagaacgtgttaggcttatcatgacgatactgctactcatgttcatatttcaatttctccccaaggtctaccatagtatacacatcatgaggaaaatgcagaaggtgacgggttacatctttggatcgatatggtggggatttggtttaaatctatttgcctatttcattgcttctcatattgcaggtgggtgctggtatgttcttgcaatccagcgcattgcttcctgcctccaggaagaatgcaagaaaaacaatagttgtgatctaatatcactagcttgttcgaaggagatatgctttcaccctccttggtcttcgaatgttaatgggttcgcatgtgatacgaacatgacctcctttagtcaacgaaatgtgtctacttgtttaagtggtaaagggtcgtttgcttatggaatctatttgggggctcttcctgttatatcgagcaattcgcttgctgtcaaaattctctatcctatattttggggactcatgacactcaggtaatcacttcttaataatctgctatattctctccaacacagggtctgctctctaggaaactattgtcttaataatctgctatattctcaaaagtcaaaatattctctctttcttatactgtttatctgaataaacatggcatcaaactgataccccagttccacttcaaaaaaaaattagtcttgttccatgctgcatacacatgtatttttttatgctgcatattcataaacttgtacaattccttgaattgcttggcagtacttttggtaacgatcttgccccaacaagcaatggtattgaggtgatattcagcataatcaatgtcctcagtggcctgatgctcttcacattgctgatcggaaacatacaggtatttctgcacgcggtcctggcaaggaagcggaagatgcagctgcggttccgagacatggaatggtggatgagacggaggcagctgccgtctcggctgaggcagagggtgcgcaaatatgagcgcgaacgctgggccgccgtcacgggagacgaggagatggagatgatcaaggatctgcctgaaggactgaggcgggacatcaagcgctacctctgcctcgagctggttaagcaggttccgctgttccatggcatggacgatctgatcctggataacatctgcgaccggctgcggccactggtgttctccagcggggagaaggtgatccgagagggcgaccccgtgcagcgcatggtgttcatcctgcagggcaagctccggagcacgcagccgctgaccaagggcgtggtggcaacgtgcatgctaggggcgggcaacttcctaggcgacgagctgctgtcgtggtgcctgcgccgccccttcgtggaccggctccccgcgtcgtcggccacgttcgagtgcgtggaggcggcgcaggcgttctgcctcgacgcgccggacctgcggttcatcaccgagcacttccgctacaagttcgccaacgagaagctcaggcgcacggcgcggtactactcgtccaactggcggacgtgggccgccgtcaacatccagctcgcgtggcgcaggtatagggcccgggcatcgacggacctggcggcgatggccgcgccgccgttggcgggcggacccgacgacggggaccggcggctcagacactacgcggccatgttcatgtcgctccggccgcatgaccacctagagtgatcaggaggggggacgggaccatcctagctgtgccggccgggtcatggtgtctgtacagtgtacactagtggtatgttgttgtcatcttctgcgtgagtgaactggtggttcgggatttgtcatttaaagaaggtcaataatggagaaatagtttcttagcccgattcaattgtcttcctttcaccaagaataaaaattacttctgccggactgcctctccgcgttggtctggattgcttttaccaagaataaaaattgcagccccggctgcagcggctgatggcaggacagattcagacgcgcagagaatacgtacaagtcgccgaagtcggtatccattccaaccaggttctccaccaccagattcagaaaccgcctggcctgttcatcctctccaaaacaaactaaaatcgagaaacgcgatcgtaaggtagcggcggcggcggcggcgtggcgacagcaggagtatgattggcccagttcaatcgcgcgggcgcggccaatctggtaggcggtcatcatcagaatccagaatccacataccggcccatttacagcaaggaaccgcgaagcccaagctcgtcttctttcttggaagaggggccgcttcactcgactgaaagcgcaatcaactctagtctctagccacaactcgaagtacgagtaactccggagtccggatggctgcagcgatggacgtcgacgaagccggcggcgaggagaggcgaccgtcagagaaggagctcttccgcgccgctgagtccggcgacgccgccgcgttcgcctccctcgcccccgccgacctctccctgcgcaacgaggacggccgctccctcctccacgtcgccgccgctgccgggcatccccaggtggtgctcgcgcttgcccagtgcggtggtgacgccgcggctagcgtgctgaatgcgcaggacgaggaggggtgggcgccgatccactccgccgcgagctccggcaactctcaaatcgtcgacatcctgcttgagcgaggtacgagaccagctcaatacgtgtgggtggactgtactatttctgctacgttttttttaagattagttggcgcaaaattggtagtacatgacggggttgatgtcttggtgttttctgataacatagtttctagtttctacgataagtttctgacattgcagtaattgctgcagatttgagcatcatgtctcacgtgataaagcgaagcacagtgttacttgctatatgttacttattttgtcctttgggtaatctggctgatttattgtagttgtgatttgtaatatgatgcggtaacatagtggttaatgatgggcatgtgattccttaggctgtaacatttcaaattgatgtttgctaatggtagcttattgctcatggttaaaatcatcatggatattgctcctggttggcaatgtcctccgattggttcgtatttgcagaacttccctgttttgtctgtttataccgcacaagcaaaataacagctggcacctatgtctataacagggcatggtatatctcgatatattgttttttattcttattttcagaatgatatggttttctagaggattgctgagtttttcggtttttcccccctgaataagctttctgatgaattcctattcatcacttgtcctcttcgactggaatgtacctggacaagtccattccagcgtaccagaggccaacactttcctttcataaaaacaaacttatcattttgaaagcaaaagaattgtgaagtattttagcttctaatacgctgtaatagtatctgctatttattaattataagcattatgatattctctttgctgctattcaagtgggtttgtggtcgacattccttattggacttcttaaggaaaaaacagttaattttgtctctataattcttttactttcacccaactagtgcaatcataaatttgtaataccaggtgctgatgttaacctggttactgatggtggtcgaactgctcttcattatgctgcgagtaaagggaggcttaacatagctgaaaaactaatagcccatggtgctaatgtcaacaagaaagacaagtttggctgcacacctttgcatagagctgcaagcactggaaacgcggagctgtgtgaattcctcattgaggaaggtgctgaagttgatgctgttgacaagacaggacaaacacctcttacgcatgctgttatatgtgagaacaaaggggctgctcttctgctaattagacatggtgctgatgttgatgtcgaggacaaggaaggctacactgcccttggccgagcatcgaacagcttcagacctgtactcatcgatgcagccagggcaatgctcgaaggatgatctggtgctctgctcaaagacgatggaaagtgtgatacgagaaactgtgctgagtcgaggtgttaaagcttgttctggtgtgtaaacaaaggggctctctacagaatcagatttgaccctgctagaattttgcccttgttgggtttatttaaccattgtgactaacatctcataagctaagctttggttctcccttctctctttcttttatgtctgttcatgatggcgtatcaggctatcagctaacagatcggtgactgtcacacccggctttaaggaacaaagccaggtgcatctca

SEQ ID NO: 52363 - DNA, 2060 bp, Zea Mays
ctgagaaaaaaaatggaattgtattgcgggctttaattatcacacatgccaatcatctgcatgaaggacactgaaggtcatcttctggttggttataccaaagttaattagggaagaacgtgttaggcttatcatgacgatactgctactcatgttcatatttcaatttctccccaaggtctaccatagtatacacatcatgaggaaaatgcagaaggtgacgggttacatctttggatcgatatggtggggatttggtttaaatctatttgcctatttcattgcttctcatattgcaggtgggtgctggtatgttcttgcaatccagcgcattgcttcctgcctccaggaagaatgcaagaaaaacaatagttgtgatctaatatcactagcttgttcgaaggagatatgctttcaccctccttggtcttcgaatgttaatgggttcgcatgtgatacgaacatgacctcctttagtcaacgaaatgtgtctacttgtttaagtggtaaagggtcgtttgcttatggaatctatttgggggctcttcctgttatatcgagcaattcgcttgctgtcaaaattctctatcctatattttggggactcatgacactcaggtaatcacttcttaataatctgctatattctctccaacacagggtctgctctctaggaaactattgtcttaataatctgctatattctcaaaagtcaaaatattctctctttcttatactgtttatctgaataaacatggcatcaaactgataccccagttccacttcaaaaaaaaattagtcttgttccatgctgcatacacatgtatttttttatgctgcatattcataaacttgtacaattccttgaattgcttggcagtacttttggtaacgatcttgccccaacaagcaatggtattgaggtgatattcagcataatcaatgtcctcagtggcctgatgctcttcacattgctgatcggaaacatacaggtatttctgcacgcggtcctggcaaggaagcggaagatgcagctgcggttccgagacatggaatggtggatgagacggaggcagctgccgtctcggctgaggcagagggtgcgcaaatatgagcgcgaacgctgggccgccgtcacgggagacgaggagatggagatgatcaaggatctgcctgaaggactgaggcgggacatcaagcgctacctctgcctcgagctggttaagcaggttccgctgttccatggcatggacgatctgatcctggataacatctgcgaccggctgcggccactggtgttctccagcggggagaaggtgatccgagagggcgaccccgtgcagcgcatggtgttcatcctgcagggcaagctccggagcacgcagccgctgaccaagggcgtggtggcaacgtgcatgctaggggcgggcaacttcctaggcgacgagctgctgtcgtggtgcctgcgccgccccttcgtggaccggctccccgcgtcgtcggccacgttcgagtgcgtggaggcggcgcaggcgttctgcctcgacgcgccggacctgcggttcatcaccgagcacttccgctacaagttcgccaacgagaagctcaggcgcacggcgcggtactactcgtccaactggcggacgtgggccgccgtcaacatccagctcgcgtggcgcaggtatagggcccgggcatcgacggacctggcggcgatggccgcgccgccgttggcgggcggacccgacgacggggaccggcggctcagacactacgcggccatgttcatgtcgctccggccgcatgaccacctagagtgatcaggaggggggacgggaccatcctagctgtgccggccgggtcatggtgtctgtacagtgtacactagtggtatgttgttgtcatcttctgcgtgagtgaactggtggttcgggatttgtcatttaaagaaggtcaataatggagaaatagtttcttagcccgattcaattgtcttcctttcaccaagaataaaaattacttctgccggactgcctctccgcgttggtctggattgcttt

SEQ ID NO: 52364 - DNA, 2022 bp, Zea Mays
cgactagtacggatcgataatggtgtgacgcaatgattggcggcggtcatcttctggttggttataccaaagttaattagggaagaacgtgttaggcttatcatgacgatactgctactcatgttcatatttcaatttctccccaaggtctaccatagtatacacatcatgaggaaaatgcagaaggtgacgggttacatctttggatcgatatggtggggatttggtttaaatctatttgcctatttcattgcttctcatgtgggtgctggtatgttcttgcaatccagcgcattgcttcctgcctccaggaagaatgcaagaaaaacaatagttgtgatctaatatcactagcttgttcgaaggagatatgctttcaccctccttggtcttcgaatgttaatgggttcgcatgtgatacgaacatgacctcctttagtcaacgaaatgtgtctacttgtttaagtggtaaagggtcgtttgcttatggaatctatttgggggctcttcctgttatatcgagcaattcgcttgctgtcaaaattctctatcctatattttggggactcatgacactcaggtaatcacttcttaataatctgctatattctctccaacacagggtctgctctctaggaaactattgtcttaataatctgctatattctcaaaagtcaaaatattctctctttcttatactgtttatctgaataaacatggcatcaaactgataccccagttccacttcaaaaaaaaattagtcttgttccatgctgcatacacatgtatttttttatgctgcatattcataaacttgtacaattccttgaattgcttggcagtacttttggtaacgatcttgccccaacaagcaatggtattgaggtgatattcagcataatcaatgtcctcagtggcctgatgctcttcacattgctgatcggaaacatacaggtatttctgcacgcggtcctggcaaggaagcggaagatgcagctgcggttccgagacatggaatggtggatgagacggaggcagctgccgtctcggctgaggcagagggtgcgcaaatatgagcgcgaacgctgggccgccgtcacgggagacgaggagatggagatgatcaaggatctgcctgaaggactgaggcgggacatcaagcgctacctctgcctcgagctggttaagcaggttccgctgttccatggcatggacgatctgatcctggataacatctgcgaccggctgcggccactggtgttctccagcggggagaaggtgatccgagagggcgaccccgtgcagcgcatggtgttcatcctgcagggcaagctccggagcacgcagccgctgaccaagggcgtggtggcaacgtgcatgctaggggcgggcaacttcctaggcgacgagctgctgtcgtggtgcctgcgccgccccttcgtggaccggctccccgcgtcgtcggccacgttcgagtgcgtggaggcggcgcaggcgttctgcctcgacgcgccggacctgcggttcatcaccgagcacttccgctacaagttcgccaacgagaagctcaggcgcacggcgcggtactactcgtccaactggcggacgtgggccgccgtcaacatccagctcgcgtggcgcaggtatagggcccgggcatcgacggacctggcggcgatggccgcgccgccgttggcgggcggacccgacgacggggaccggcggctcagacactacgcggccatgttcatgtcgctccggccgcatgaccacctagagtgatcaggaggggggacgggaccatcctagctgtgccggccgggtcatggtgtctgtacagtgtacactagtggtatgttgttgtcatcttctgcgtgagtgaactggtggttcgggatttgtcatttaaagaaggtcaataatggagaaatagtttcttagcccgattcaattgtcttcctttcaccaagaataaaaattacttctgccggactgcctctccgcgttggtctggattgcttt

SEQ ID NO: 52365 - DNA, 1763 bp, Zea Mays
gaacgactagtacggatcgataatggtgtgacgcaatgattggcggcggtcatcttctggttggttataccaaagttaattagggaagaacgtgttaggcttatcatgacgatactgctactcatgttcatatttcaatttctccccaaggtctaccatagtatacacatcatgaggaaaatgcagaaggtgacgggttacatctttggatcgatatggtggggatttggtttaaatctatttgcctatttcattgcttctcatgtgggtgctggtatgttcttgcaatccagcgcattgcttcctgcctccaggaagaatgcaagaaaaacaatagttgtgatctaatatcactagcttgttcgaaggagatatgctttcaccctccttggtcttcgaatgttaatgggttcgcatgtgatacgaacatgacctcctttagtcaacgaaatgtgtctacttgtttaagtggtaaagggtcgtttgcttatggaatctatttgggggctcttcctgttatatcgagcaattcgcttgctgtcaaaattctctatcctatattttggggactcatgacactcagtacttttggtaacgatcttgccccaacaagcaatggtattgaggtgatattcagcataatcaatgtcctcagtggcctgatgctcttcacattgctgatcggaaacatacaggtatttctgcacgcggtcctggcaaggaagcggaagatgcagctgcggttccgagacatggaatggtggatgagacggaggcagctgccgtctcggctgaggcagagggtgcgcaaatatgagcgcgaacgctgggccgccgtcacgggagacgaggagatggagatgatcaaggatctgcctgaaggactgaggcgggacatcaagcgctacctctgcctcgagctggttaagcaggttccgctgttccatggcatggacgatctgatcctggataacatctgcgaccggctgcggccactggtgttctccagcggggagaaggtgatccgagagggcgaccccgtgcagcgcatggtgttcatcctgcagggcaagctccggagcacgcagccgctgaccaagggcgtggtggcaacgtgcatgctaggggcgggcaacttcctaggcgacgagctgctgtcgtggtgcctgcgccgccccttcgtggaccggctccccgcgtcgtcggccacgttcgagtgcgtggaggcggcgcaggcgttctgcctcgacgcgccggacctgcggttcatcaccgagcacttccgctacaagttcgccaacgagaagctcaggcgcacggcgcggtactactcgtccaactggcggacgtgggccgccgtcaacatccagctcgcgtggcgcaggtatagggcccgggcatcgacggacctggcggcgatggccgcgccgccgttggcgggcggacccgacgacggggaccggcggctcagacactacgcggccatgttcatgtcgctccggccgcatgaccacctagagtgatcaggaggggggacgggaccatcctagctgtgccggccgggtcatggtgtctgtacagtgtacactagtggtatgttgttgtcatcttctgcgtgagtgaactggtggttcgggatttgtcatttaaagaaggtcaataatggagaaatagtttcttagcccgattcaattgtcttcctttcaccaagaataaaaattacttctgccggactgcctctccgcgttggtctggattgcttt

SEQ ID NO: 52366 - DNA, 2068 bp, Zea Mays
attcaggtgacgataaaagagtctgatgggcttccggaacgactagtacggatcgataatggtgtgacgcaatgattggcggcggtcatcttctggttggttataccaaagttaattagggaagaacgtgttaggcttatcatgacgatactgctactcatgttcatatttcaatttctccccaaggtctaccatagtatacacatcatgaggaaaatgcagaaggtgacgggttacatctttggatcgatatggtggggatttggtttaaatctatttgcctatttcattgcttctcatattgcaggtgggtgctggtatgttcttgcaatccagcgcattgcttcctgcctccaggaagaatgcaagaaaaacaatagttgtgatctaatatcactagcttgttcgaaggagatatgctttcaccctccttggtcttcgaatgttaatgggttcgcatgtgatacgaacatgacctcctttagtcaacgaaatgtgtctacttgtttaagtggtaaagggtcgtttgcttatggaatctatttgggggctcttcctgttatatcgagcaattcgcttgctgtcaaaattctctatcctatattttggggactcatgacactcaggtaatcacttcttaataatctgctatattctctccaacacagggtctgctctctaggaaactattgtcttaataatctgctatattctcaaaagtcaaaatattctctctttcttatactgtttatctgaataaacatggcatcaaactgataccccagttccacttcaaaaaaaaattagtcttgttccatgctgcatacacatgtatttttttatgctgcatattcataaacttgtacaattccttgaattgcttggcagtacttttggtaacgatcttgccccaacaagcaatggtattgaggtgatattcagcataatcaatgtcctcagtggcctgatgctcttcacattgctgatcggaaacatacaggtatttctgcacgcggtcctggcaaggaagcggaagatgcagctgcggttccgagacatggaatggtggatgagacggaggcagctgccgtctcggctgaggcagagggtgcgcaaatatgagcgcgaacgctgggccgccgtcacgggagacgaggagatggagatgatcaaggatctgcctgaaggactgaggcgggacatcaagcgctacctctgcctcgagctggttaagcaggttccgctgttccatggcatggacgatctgatcctggataacatctgcgaccggctgcggccactggtgttctccagcggggagaaggtgatccgagagggcgaccccgtgcagcgcatggtgttcatcctgcagggcaagctccggagcacgcagccgctgaccaagggcgtggtggcaacgtgcatgctaggggcgggcaacttcctaggcgacgagctgctgtcgtggtgcctgcgccgccccttcgtggaccggctccccgcgtcgtcggccacgttcgagtgcgtggaggcggcgcaggcgttctgcctcgacgcgccggacctgcggttcatcaccgagcacttccgctacaagttcgccaacgagaagctcaggcgcacggcgcggtactactcgtccaactggcggacgtgggccgccgtcaacatccagctcgcgtggcgcaggtatagggcccgggcatcgacggacctggcggcgatggccgcgccgccgttggcgggcggacccgacgacggggaccggcggctcagacactacgcggccatgttcatgtcgctccggccgcatgaccacctagagtgatcaggaggggggacgggaccatcctagctgtgccggccgggtcatggtgtctgtacagtgtacactagtggtatgttgttgtcatcttctgcgtgagtgaactggtggttcgggatttgtcatttaaagaaggtcaataatggagaaatagtttcttagcccgattcaattgtcttcctttcaccaagaataaaaattacttctgccggactgcctctccgcgttggtctggattgcttt

SEQ ID NO: 52367 - DNA, 1740 bp, Zea Mays
gtttctagtgattgctgggacggagaattcaggtgacgataaaagagtctgatgggcttccggaacgactagtacggatcgataatggtgtgacgcaatgattggcggcggtcatcttctggttggttataccaaagttaattagggaagaacgtgttaggcttatcatgacgatactgctactcatgttcatatttcaatttctccccaaggtctaccatagtatacacatcatgaggaaaatgcagaaggtgacgggttacatctttggatcgatatggtggggatttggtttaaatctatttgcctatttcattgcttctcatattgcaggtgggtgctggtatgttcttgcaatccagcgcattgcttcctgcctccaggaagaatgcaagaaaaacaatagttgtgatctaatatcactagcttgttcgaaggagatatgctttcaccctccttggtcttcgaatgttaatgggttcgcatgtgatacgaacatgacctcctttagtcaacgaaatgtgtctacttgtttaagtggtaaagggtcgtttgcttatggaatctatttgggggctcttcctgttatatcgagcaattcgcttgctgtcaaaattctctatcctatattttggggactcatgacactcagtacttttggtaacgatcttgccccaacaagcaatggtattgaggtgatattcagcataatcaatgtcctcagtggcctgatgctcttcacattgctgatcggaaacatacaggtatttctgcacgcggtcctggcaaggaagcggaagatgcagctgcggttccgagacatggaatggtggatgagacggaggcagctgccgtctcggctgaggcagagggtgcgcaaatatgagcgcgaacgctgggccgccgtcacgggagacgaggagatggagatgatcaaggatctgcctgaaggactgaggcgggacatcaagcgctacctctgcctcgagctggttaagcaggttccgctgttccatggcatggacgatctgatcctggataacatctgcgaccggctgcggccactggtgttctccagcggggagaaggtgatccgagagggcgaccccgtgcagcgcatggtgttcatcctgcagggcaagctccggagcacgcagccgctgaccaagggcgtggtggcaacgtgcatgctaggggcgggcaacttcctaggcgttctgcctcgacgcgccggacctgcggttcatcaccgagcacttccgctacaagttcgccaacgagaagctcaggcgcacggcgcggtactactcgtccaactggcggacgtgggccgccgtcaacatccagctcgcgtggcgcaggtatagggcccgggcatcgacggacctggcggcgatggccgcgccgccgttggcgggcggacccgacgacggggaccggcggctcagacactacgcggccatgttcatgtcgctccggccgcatgaccacctagagtgatcaggaggggggacgggaccatcctagctgtgccggccgggtcatggtgtctgtacagtgtacactagtggtatgttgttgtcatcttctgcgtgagtgaactggtggttcgggatttgtcatttaaagaaggtcaataatggagaaatagtttcttagcccgattcaattgtcttcctttcaccaagaataaaaattacttctgccggactgcctctccgcgttggtctggattgcttt

SEQ ID NO: 52368 - DNA, 2546 bp, Zea Mays
gcaggctagctctgctccgccgctcactgctcgctagctactggaccgcgcttccctctctccatcgcgccggcgcgcacggctagctctagctcccggagccgccctttcatggtccccgccgtggtcgggacgagatgcctccgctcgcattcctccgccgctacctccccgcgaggaaccgagtgtctgttatcgatcctgagttgcgtctgtctgtttgtttccctgagcaaaggcttctcgcgcgagcgtgcgatggtggagtccgggggagcccgggcgtggcgcgggacgaggaggccggaggcagcggcggactgagcggccggtcggcgggggcgccgtccggggagtgctacgcgtgcacgcagcccggggtgccggcgttccactccacggcctgcgaccaggtgcactcgccggactgggacgccgacgcggggtcctcgctggtgccggtccaggcgcagcagcaggcccagccggcggcggcggcggcgcagcacgcggcgcggtggctgttcgggcccgtgctggacccgcgcagcaagcgcgtgcagcgctggaaccgctggatcctgctcggccgcgccgccgcgctggcgctggacccgctcttcttctacgcgctctccatcggccgcgccggccggccctgcctctacttggacgccggcctcgccgccgcggtcaccgcgctccggacctgcgccgacgtcgcgcacctcgcgcacgtgctcctgcagttccgcctcgcctacgtctcccgcgagtccctcgtcgtcgggtgcggcaagctcgtctgggacgcccgcgccatcgccgcgcactacgcccgctccgtcaagggcctctgcttcgacctcttcgtcatcctccccatcccgcaggtcatcttctggttggttataccaaagttaattagggaagaacgtgttaggcttatcatgacgatactgctactcatgttcatatttcaatttctccccaaggtctaccatagtatacacatcatgaggaaaatgcagaaggtgacgggttacatctttggatcgatatggtggggatttggtttaaatctatttgcctatttcattgcttctcatattgcaggtgggtgctggtatgttcttgcaatccagcgcattgcttcctgcctccaggaagaatgcaagaaaaacaatagttgtgatctaatatcactagcttgttcgaaggagatatgctttcaccctccttggtcttcgaatgttaatgggttcgcatgtgatacgaacatgacctcctttagtcaacgaaatgtgtctacttgtttaagtggtaaagggtcgtttgcttatggaatctatttgggggctcttcctgttatatcgagcaattcgcttgctgtcaaaattctctatcctatattttggggactcatgacactcagtacttttggtaacgatcttgccccaacaagcaatggtattgaggtatttctgcacgcggtcctggcaaggaagcggaagatgcagctgcggttccgagacatggaatggtggatgagacggaggcagctgccgtctcggctgaggcagagggtgcgcaaatatgagcgcgaacgctgggccgccgtcacgggagacgaggagatggagatgatcaaggatctgcctgaaggactgaggcgggacatcaagcgctacctctgcctcgagctggttaagcaggttccgctgttccatggcatggacgatctgatcctggataacatctgcgaccggctgcggccactggtgttctccagcggggagaaggtgatccgagagggcgaccccgtgcagcgcatggtgttcatcctgcagggcaagctccggagcacgcagccgctgaccaagggcgtggtggcaacgtgcatgctaggggcgggcaacttcctaggcgacgagctgctgtcgtggtgcctgcgccgccccttcgtggaccggctccccgcgtcgtcggccacgttcgagtgcgtggaggcggcgcaggcgttctgcctcgacgcgccggacctgcggttcatcaccgagcacttccgctacaagttcgccaacgagaagctcaggcgcacggcgcggtactactcgtccaactggcggacgtgggccgccgtcaacatccagctcgcgtggcgcaggtatagggcccgggcatcgacggacctggcggcgatggccgcgccgccgttggcgggcggacccgacgacggggaccggcggctcagacactacgcggccatgttcatgtcgctccggccgcatgaccacctagagtgatcaggaggggggacgggaccatcctagctgtgccggccgggtcatggtgtctgtacagtgtacactagtggtatgttgttgtcatcttctgcgtgagtgaactggtggttcgggatttgtcatttaaagaaggtcaataatggagaaatagtttcttagcccgattcaattgtcttcctttcaccaagaataaaaattacttctgccggactgcctctccgcgttggtctggattgcttt

SEQ ID NO: 52369 - DNA, 2714 bp, Zea Mays
aattgctcgagtcaatccggtaggtgtagccgtgtctgcgtagccgttccggggagccaagggctcggcaccaccgcggcatcggtgcacaaggacggcgcacgtacgcgccacgtccttgggccccggcgcagttgtaccctccatctctgtcctctttacttgccccatccatcccacgccgatcgccaggcgccagcagcaggctagctctgctccgccgctcactgctcgctagctactggaccgcgcttccctctctccatcgcgccggcgcgcacggctagctctagctcccggagccgccctttcatggtccccgccgtggtcgggacgagatgcctccgctcgcattcctccgccgctacctccccgcgaggaaccgagtgtctgttatcgatcctgagttgcgtctgtctgtttgtttccctgagcaaaggcttctcgcgcgagcgtgcgatggtggagtccgggggagcccgggcgtggcgcgggacgaggaggccggaggcagcggcggactgagcggccggtcggcgggggcgccgtccggggagtgctacgcgtgcacgcagcccggggtgccggcgttccactccacggcctgcgaccaggtgcactcgccggactgggacgccgacgcggggtcctcgctggtgccggtccaggcgcagcagcaggcccagccggcggcggcggcggcgcagcacgcggcgcggtggctgttcgggcccgtgctggacccgcgcagcaagcgcgtgcagcgctggaaccgctggatcctgctcggccgcgccgccgcgctggcgctggacccgctcttcttctacgcgctctccatcggccgcgccggccggccctgcctctacttggacgccggcctcgccgccgcggtcaccgcgctccggacctgcgccgacgtcgcgcacctcgcgcacgtgctcctgcagttccgcctcgcctacgtctcccgcgagtccctcgtcgtcgggtgcggcaagctcgtctgggacgcccgcgccatcgccgcgcactacgcccgctccgtcaagggcctctgcttcgacctcttcgtcatcctccccatcccgcaggtctaccatagtatacacatcatgaggaaaatgcagaaggtgacgggttacatctttggatcgatatggtggggatttggtttaaatctatttgcctatttcattgcttctcatattgcaggtgggtgctggtatgttcttgcaatccagcgcattgcttcctgcctccaggaagaatgcaagaaaaacaatagttgtgatctaatatcactagcttgttcgaaggagatatgctttcaccctccttggtcttcgaatgttaatgggttcgcatgtgatacgaacatgacctcctttagtcaacgaaatgtgtctacttgtttaagtggtaaagggtcgtttgcttatggaatctatttgggggctcttcctgttatatcgagcaattcgcttgctgtcaaaattctctatcctatattttggggactcatgacactcagtacttttggtaacgatcttgccccaacaagcaatggtattgaggtgatattcagcataatcaatgtcctcagtggcctgatgctcttcacattgctgatcggaaacatacaggtatttctgcacgcggtcctggcaaggaagcggaagatgcagctgcggttccgagacatggaatggtggatgagacggaggcagctgccgtctcggctgaggcagagggtgcgcaaatatgagcgcgaacgctgggccgccgtcacgggagacgaggagatggagatgatcaaggatctgcctgaaggactgaggcgggacatcaagcgctacctctgcctcgagctggttaagcaggttccgctgttccatggcatggacgatctgatcctggataacatctgcgaccggctgcggccactggtgttctccagcggggagaaggtgatccgagagggcgaccccgtgcagcgcatggtgttcatcctgcagggcaagctccggagcacgcagccgctgaccaagggcgtggtggcaacgtgcatgctaggggcgggcaacttcctaggcgacgagctgctgtcgtggtgcctgcgccgccccttcgtggaccggctccccgcgtcgtcggccacgttcgagtgcgtggaggcggcgcaggcgttctgcctcgacgcgccggacctgcggttcatcaccgagcacttccgctacaagttcgccaacgagaagctcaggcgcacggcgcggtactactcgtccaactggcggacgtgggccgccgtcaacatccagctcgcgtggcgcaggtatagggcccgggcatcgacggacctggcggcgatggccgcgccgccgttggcgggcggacccgacgacggggaccggcggctcagacactacgcggccatgttcatgtcgctccggccgcatgaccacctagagtgatcaggaggggggacgggaccatcctagctgtgccggccgggtcatggtgtctgtacagtgtacactagtggtatgttgttgtcatcttctgcgtgagtgaactggtggttcgggatttgtcatttaaagaaggtcaataatggagaaatagtttcttagcccgattcaattgtcttcctttcaccaagaataaaaattacttctgccggactgcctctccgcgttggtctggattgcttt

SEQ ID NO: 52370 - DNA, 3056 bp, Zea Mays
gaacccctagcgcgatcatcaccattattgtgatgtgcccggctcacctgtgccaggaacccggtggccccactacgaacaattgctcgagtcaatccggtaggtgtagccgtgtctgcgtagccgttccggggagccaagggctcggcaccaccgcggcatcggtgcacaaggacggcgcacgtacgcgccacgtccttgggccccggcgcagttgtaccctccatctctgtcctctttacttgccccatccatcccacgccgatcgccaggcgccagcagcaggctagctctgctccgccgctcactgctcgctagctactggaccgcgcttccctctctccatcgcgccggcgcgcacggctagctctagctcccggagccgccctttcatggtccccgccgtggtcgggacgagatgcctccgctcgcattcctccgccgctacctccccgcgaggaaccgagtgtctgttatcgatcctgagttgcgtctgtctgtttgtttccctgagcaaaggcttctcgcgcgagcgtgcgatggtggagtccgggggagcccgggcgtggcgcgggacgaggaggccggaggcagcggcggactgagcggccggtcggcgggggcgccgtccggggagtgctacgcgtgcacgcagcccggggtgccggcgttccactccacggcctgcgaccaggtgcactcgccggactgggacgccgacgcggggtcctcgctggtgccggtccaggcgcagcagcaggcccagccggcggcggcggcggcgcagcacgcggcgcggtggctgttcgggcccgtgctggacccgcgcagcaagcgcgtgcagcgctggaaccgctggatcctgctcggccgcgccgccgcgctggcgctggacccgctcttcttctacgcgctctccatcggccgcgccggccggccctgcctctacttggacgccggcctcgccgccgcggtcaccgcgctccggacctgcgccgacgtcgcgcacctcgcgcacgtgctcctgcagttccgcctcgcctacgtctcccgcgagtccctcgtcgtcgggtgcggcaagctcgtctgggacgcccgcgccatcgccgcgcactacgcccgctccgtcaagggcctctgcttcgacctcttcgtcatcctccccatcccgcaggtctaccatagtatacacatcatgaggaaaatgcagaaggtgacgggttacatctttggatcgatatggtggggatttggtttaaatctatttgcctatttcattgcttctcatattgcaggtgggtgctggtatgttcttgcaatccagcgcattgcttcctgcctccaggaagaatgcaagaaaaacaatagttgtgatctaatatcactagcttgttcgaaggagatatgctttcaccctccttggtcttcgaatgttaatgggttcgcatgtgatacgaacatgacctcctttagtcaacgaaatgtgtctacttgtttaagtggtaaagggtcgtttgcttatggaatctatttgggggctcttcctgttatatcgagcaattcgcttgctgtcaaaattctctatcctatattttggggactcatgacactcaggtaatcacttcttaataatctgctatattctctccaacacagggtctgctctctaggaaactattgtcttaataatctgctatattctcaaaagtcaaaatattctctctttcttatactgtttatctgaataaacatggcatcaaactgataccccagttccacttcaaaaaaaaattagtcttgttccatgctgcatacacatgtatttttttatgctgcatattcataaacttgtacaattccttgaattgcttggcagtacttttggtaacgatcttgccccaacaagcaatggtattgaggtgatattcagcataatcaatgtcctcagtggcctgatgctcttcacattgctgatcggaaacatacaggtatttctgcacgcggtcctggcaaggaagcggaagatgcagctgcggttccgagacatggaatggtggatgagacggaggcagctgccgtctcggctgaggcagagggtgcgcaaatatgagcgcgaacgctgggccgccgtcacgggagacgaggagatggagatgatcaaggatctgcctgaaggactgaggcgggacatcaagcgctacctctgcctcgagctggttaagcaggttccgctgttccatggcatggacgatctgatcctggataacatctgcgaccggctgcggccactggtgttctccagcggggagaaggtgatccgagagggcgaccccgtgcagcgcatggtgttcatcctgcagggcaagctccggagcacgcagccgctgaccaagggcgtggtggcaacgtgcatgctaggggcgggcaacttcctaggcgacgagctgctgtcgtggtgcctgcgccgccccttcgtggaccggctccccgcgtcgtcggccacgttcgagtgcgtggaggcggcgcaggcgttctgcctcgacgcgccggacctgcggttcatcaccgagcacttccgctacaagttcgccaacgagaagctcaggcgcacggcgcggtactactcgtccaactggcggacgtgggccgccgtcaacatccagctcgcgtggcgcaggtatagggcccgggcatcgacggacctggcggcgatggccgcgccgccgttggcgggcggacccgacgacggggaccggcggctcagacactacgcggccatgttcatgtcgctccggccgcatgaccacctagagtgatcaggaggggggacgggaccatcctagctgtgccggccgggtcatggtgtctgtacagtgtacactagtggtatgttgttgtcatcttctgcgtgagtgaactggtggttcgggatttgtcatttaaagaaggtcaataatggagaaatagtttcttagcccgattcaattgtcttcctttcaccaagaataaaaattacttctgccggactgcctctccgcgttggtctggattgcttt

SEQ ID NO: 52371 - DNA, 5334 bp, Zea Mays
atgaacagaatgacacggcaacagcatgcctgcataatgaatgcccggaagaagtatgaacaattacaaaggccacgaaagcagtatgtacagttacaaaggccaagagaggaaatcagtgatttgatacttttcactgctatatgtatggacatgtttaacatgaattcatatggctttgctttgattggctgatatgtttctactgctttgtcctcgcgcaggtcagtggccaagccttttccacggacggatcaccccagaactgccagatatatggctttgctttgatcagatatatgctagctgccagatatatggctatgttccaatgagtcaaggtggtcgatctccgatcaggagagcagcgacgcaggttacgccgtaataattgcacagcaaggtatctgggaatatcagaagagtcctcttacagatttggcaggcatagaagaacttcctcaggcatccttgatgcttgcttgcagtggcattgaagcgatatcggcgttccatacagtggccatgacgaccacaggattaaataccatgaatgtcctgcttgaggatcccttgagaaatgacatttgaattgcttgccagttgccaccagtttatttggaacattactggctgttgcagtctacattccaaaagaacataacatttcaattttgatgattcacattcagaacatgaaatcttgtaaagttactttaccaataaaaaagtgcataagaaaaggtaagtataattattaaaaaaatgcattttatcagcaagtgacaattatatccagctcatagctcatctacaagacaaactagctaaagagtaaatcatctgatcaagaatacaagccctgcatttcatccctcatataatgaatgaagaaaaatgctaatcaaatacagagagaaaacatctcatggcttcatctttaaggaggggagtattgaaccatagcagtccagggaactcactcaaaatatttcaggggggaaacaggggtggagccagaatattatgtcactgggtccggtcaaatacactttgcggttcacttggaagcactgtttgtccaaacggtcatttagcctatttacatactatgtaaacactacacactagtgcatcatttctatttaatcatttactaatcctatttaattagctatttagcctatttaatgtactgttcagaccaaagaataactaaacggtacatgaccgatgatttactttttagcatttaagaaaacactgcttggaagggtgatttgctaatcttaaagaacttcaaatagaatttgaaattttcattgggtcagctgaaccaaacgaatacaaagctctgttccacttcctggggaggaacacacatgggacacatctccatagacgcttgtattcacaaaggttcatgatttctaaaacacaatcacgtgcaagagaatggtctaacatttttactaataaataattaaatatcatatcagtacattaatcataattggaatttgttactatttggatgagagagttggacagagcaaaaggggtgggaaaatagtttatataccttggtctcattatgcagaagcaaaccagtctctgcttgctattcctagtaagacggtggtctgagttccttaagtcgccgaacaacttgcttcattgtgggcctagaagaaagagaatcaaccgtacacttgatgcccaggtgtagaatctcaacaaggtcgtcatgtggggccacatcccacagcccttctataaagaattcacgagctcgacccttttgtaaaagcatgcaagcccaggcaactatgttgaatccattcccgtaaggagagaaagaaggatccagtgcctttttgtctgaaatgagttcaagaagtacaactccataactatacacatccgccttatcagaaacgcggcatgtcatcgcatactctggagctacatatccaaaagtacctgccacaccagtggttgcatgtgtttctgaatttccaagcagccttgctaatccaaaatcagaaaggtaggcagtgtaatcattatcaagcaagatgttacttggtttgacatccctgtgtaagatgcgtgggacacaattgtcatgaagatatgcaagtgcacgcgcaacatctagagcaattttgtgaagcattctccaatcaattggtctcttactcctttcttgtatgaatctttctaaattgccaccaggcagaaaattatatattagaaacatctctgaatcgctgagatggtatcctatgagtgttacaagattggaatggcgacacctcccaagtgtttttacctctgcttggaattgctgaatgccttggaaccttccaatagcaagtctctttattgccaccaattttcctggtgctacctcagctttgtacgttgctccgaagccaccacttccgatgcaattacttgcattgaagcttccactggcacgtaaaacagcctcatatgtcaagggagcaccgatatcaacaaaaatagttacttcccttcttagagaacgccttgatggtcttgatgcacattttcgtgtgtaaatataaaggatgaccagagccaagagaactgcaacaattgctgatgctgaagttatggaggcaatctctattttgctgaatccgccaccgttaccattgtcatcaggggctgtattatcagctggtggattattgtctgcctcacttagtgctcgagcattcactaaaggactggagagcgttgacagtccacaaggttgaagggatggatttccacgaatactgttgcatgtcagtgagtgaatttttgaaggcagtggcccagacaaatcattgaatgaaacattgaatatggacagcgatggtgaagaggcaaaatttggaatgtttccagagagcctattattgttgagtagaagcacagttatgtctcctagtgtcacaaggttatttgggatctcaccagcaagagaattagatgagagatctaaaaccctcagtgatctcaactgacccaaacaggatggtattctgccactaatgttgttcccagctaatgagagaaacttcaagctcttgaaatctttgaaactggcaggtatttgaccctccaaaaaatttctgctcatgtccatcttgacaagggctcctaacaaaccaacgttatcaggcatcattcctgatatttgattgccagctaaatccaaagctctgatagcactgcattttctgctaaactctgctgttatctgaccagatatcttgttgtctcggaagcttacaaccaaccccttcaagttgctacactgttccaacagaattgaatccaacgatccactgaaattattgtgatcaacgacaaacacatacgacgtcttgtttccaaacctgtcagcactaaatggcatggatgtaaggtgaccttcaaggttgttctttgcaaaattatgatacacaacagaacactccccggagttgcaaaaaactgatggcagttcttgtagagttttggacatgaggaatgaagaataactggatgacatttcatccagcattagctgagaagtacagactttattcacacatgctggaattgatcctgaaagttcatttccgctgacatcgaatacagtcatacaatgcggacatagatccttatccagtaaaccagataatctatttgagctgaggttgagaaacttgaggttactgcactgtcctagatcccttgggattgctccagaaagaaaatttccccccagattaaccatttctaaattagaacaccttccccagttgctcgggagagttccttccaggcccgcccttggcacccatagcacccggagtcttggcaaagctgtcacactctctggaattcctcctttaaacagattgaactcatgtgactttactgaattggactggctagacaatacgagcactgacaaatctgagcaatttccgagctccggtggcaccaggccacttaatctgtttcttgatacgtccaacacctgtagtttcctcagctttccaatccctgctggaattgaaccgtgtaatgaattggagaacaaccgcagcgagcggagcagcctgcaattccccagaccagaggggatgccaccgacaagaaggtttccagacaagtcaagccacttcagattaggcaggctgccaagtgctctcggcaccgatccagtgaaccggttgcctgaaagatccaacctctccaagtctttgcaggtggaaagggaagacgggatctcaccgtgaagcaggttggaagcgagcgagagcaccctcagccgcggcgggaaggaggcaggaagggcgccccggagagagttcccagcgaggttgaccacctcgagatcctccaaccgccagatctcaccggggatcttgccccggaggccgtggagcggaaaagagaccactttcaactcggtgaggagcccaaccgccgcaggaagctcgccggcaagctcctggctgggtccgaaacgccgtgaaggggagagcacctccagagcgacgacccgggagcttgagtcgcatgttacccccagccaggagcagtggttgcggccgctagagtccggggaccactgctggagcaggtctacggcagggaaggcgttcttgatctggagcagcgccgatctgtcctggtcctggacacggcgcaacccggaggaagaagagacggcgaccgcagcggcaaacagcaagagcagcagaaacgcgtaggtggaggccgtgctccggcaagcggccaccatgtccgcctagagctagccgacggcggcgacccggatatggacctgaactgtagaaggcttcgcttccggtaggtgcaggcgacggggatgggagagggagacttacatgggggagaaggactggaaaataattagctagattccgatgggaggaggcaaaattttctctccgactctgatctatcgctgggttctttcctctcctctcctactgtgtgtgagttgctacttttctcttggttggtgctggtcttcgttcagctcttcttctcggccaccgtcccctactcgtccaggactccaggtctagcaacaactctttttttccccttgatttttaaaggtacttggcgtgaccaatttgccctttaaaagattgattttgtttgatggaggtagttgcgggctgcctgcgcatgctttgggactgttgagtgttagacttgtccgtccctcgtagtgatgttttcatcggtgagaatatcttatatagaatgaaataaaaaaaaatttagaag

SEQ ID NO: 52372 - DNA, 1877 bp, Zea Mays
gccgcctgtctcagtcgcggccgtcccccggcttcttggactttgtcgccgcacccgcacggcgctacgcaacaacaaaagcaggtccgctcgtcccgtctcgtgaccctcccgcggctcgtctccctctcacggtctctcacctcacaacctcacggtcctcacctcactccacctcgttcgccgcctcgctgccgcgtcgggccagtgcgtgcgtgggggcgggcgtgagtgactggctctcctcggcgcgcggacccaggggcggcggcgatggggaagaatatgcgcatcaagacggcgcccaaggcgaaccgtgtccccctcctcggcgacggggagacgtcaagggcgctctcggacctggaagagggcagcgacgtccagccagcgaacgtcggcttctgtcgggtcatcaaacttgcgaaacatgacgccggaaagctggtcctcgccacagcggctctgctcgtcgcctccctcagtaaccttctcgttcccaaatatggtggcaagataattgacattgtgtcaagagatgttcggcgcccagaagataaggcgcaagccctggaggatgtgaagggcacaattttgtacattgtgacaatcgtcttagtcggttcagtttgcacggctcttcgggcatggttattcaattctgctagtgagagagtagtcgctcgactaaggaaagacttgttcagccatctcataaaccaggaaatagcgttttttgatgtgactagaacaggagagctcttaagcaggctttctgaagatacacaaataataaagaatgctgctacaaccaacctatcagaggcactgcgcaatgttactactacagctattggtcttggtttcatgttttcaacttcatggaagttaacatttgctgtgcgtagatttggacgttttcttcgtgagctttcacatcaaacacaagctgctgctgctgtagcttcatccatagctgaggaatcttttggtgccatccgcacagtaagatcctttgctcaggaatatcatgagatttcacgctatggtgaaaaagtagaggagacacttaaacttggtctcaaacaagctaaagttgttggcttgttttctggagggcttaacgctgcatcaaccatgtctgtggttattgttgttatttatggcgccaacttaaccatcaatggttacatgacaactggctctcttacatcattcatcttatacagccttacagttggttcgtcagtatctgccttgtcaggactatacacaactgtaatgaaagcctctggtgcaagccgtagggtttttcaacttttggaccgtgtttcgtcaatgacaaactctggggacaaatgtccaataaatgaaaaggatggggaagttgagcttgatgatgtctggtttgcatatccttctcgcccatctcatatgattcttaagggaataactctgaagctagcaccaggttcaaaggttgcacttgttgggccaagtggtggtgaagaggaaggagaaggccaaggtggcctatgagaggaggaagcagctggccaagctgcgcctaaaggctgaggctacagccgaggagaagttagggtcccagctggacattcttactccgatcaagtactgaatttgtggaacatctgatccatcgttttaaaattgtgacagtataatcttgagtgctattccgaacacattttttagccggtgaatgtattgtttgttttatcagatgtggttcgcattcacattcttagattttcgtagcactctttccaacgcaaccacatcatcttaagtgctataaaactatgaatgaaacaatgtctatcaattcaaaatttctcatttcacgtcattatttc

SEQ ID NO: 52373 - DNA, 2443 bp, Zea Mays
cgggcacagttcgtacgccacgcgcccacgtccgggtccgtccattctgctctcaccctcgggtcttggccatcggggaagagcacgaggctctcaacgcgtcagcgactcagcgtcatatttctgagttctcgcttctcacttgtgcccagatgccggccctttccttttcgggatctcctcggtgacctagatcggatggacccgccgccggcgacgcgcgcggcgtccaggcggcgggaccgccgacggcgcctgcggcagcggcagcgcgcagctgcagccacgaaaacgaaggtcggtgcggccgtgctggccgtggagccgcagagcgcagcagtcacaaccccggtggcttcgatcggtcctgctgccacgccggcgtcgaggggcaggaaacggcggaggcctcgtagacggcgtggccggaacgcgggcgcggctggggtgtcggacgaaccaccggctgcgtcccccgttcccgttccagatgccccgcaagcaagttgcaatttggaagcaatggcatcgcgtctgagcgataatgtgctgcaaactatgactgagaagataatgaggtcagataaaacaagcaagagaaattttcagcacggaaatgaggcgctaaaagattctgtggctgaaggtgctgcctgctcttctcttgcccgtcgtgaacattctaccagagaaaatggagcctcaaggagtaagatacttaagagatccaatgtaaaatccccagttgatagttgcactgaacaaggaactgatatggattatcacaagatgaagagtgccgatttgctagggaacctggaagaagtgtaccaggaaagaacgtgtcttggttactgctcttcgcagaagttggaagaatattgggaaaatgaaaatgtatcttctctcaactccagcagtttacaggcgggaaaaaagagaaagaaaagaagaggcaggaaaaagcacaatcgtcgcaagaaagctaatttacaggattctccagcatcaactgctgctgataattctggtttggtgacgttttctgagaactgtacttcagcccttaaactagaggaacagaggaagaagcaagatcagaacaagacatccatgactaacttacttttaatcaacaatgcaaagagatcagaaccatttgatgtgaatttggaaggcgctattgaaaagagctgtgaactggcaaagaatagttttgacaacacattagaaaataggtatgaactggcaaagaatagttttgacaacaccttagaaaataggtatgaactggcaaagagtaattctgactacataaatatggtaagaaatggattacaagagcaagacttagcatgcttgtcaaacagtcacaatgttaactacctgaagccttcccatttggctgaggaatatacagaaaaactcaaacatgtcttttcactgggaaagtccttaaggcctccgaagaaaaagcttctcatcttagatcttaatggtttacttgtggatatcaacgaagactaccacaacgctcacatggctgatgccaaggttcgaagaaaattagtattccgaaggccttactgcgatgattttctcaacttttgtgctctgaattttgagctaggcatatggtcctcaagaaaaaaagaaaatgttgattcggttgttaatattgttatgagtgaattcaaaccacacctactgttttgttggtatgtccaggacatgtctaaatgcacattcaccggacataaaacactggagaataagcacaagccattagtgctgaaggaattgagaaaactatggaacgtggaagaacaagatcttccatgggaagtgggggactattcaccttcgaatacattactagtggatgattccccttacaaagctctgcgcaatcctccgcatactgccatttttcctcactcctacagttacttaaactggaatgacgattcgctgggtcccaatggagaccttcgtgtgtatctgcagaacctagccgctgcagataatgttcagcattttgttcgtgataatccgtttggtcaacctttcattactgagagcgatccgcattggaacttctatgctcagattgctgatagagggcgtgcacccttgacatgttgcgcttgaactcccaagggtcgtgcttttttctgggagttctgtggttatccatgatcaaaagatcatgatcagtatacagtgatcttctctgagtagtttgcttgtatccctgtactgaagattacagagtttctgctatgggtttaaattgcaggctctacgaaaggtatcagaccaaatgaatgaattgtctgacattatctcagtctcaaactgtttgcagccatgcttttttttcatttgcctcacgttttaaagattaattgtgatgcctccttttgttctggtcttaaagaaa

SEQ ID NO: 52374 - DNA, 2418 bp, Zea Mays
cgggcacagttcgtacgccacgcgcccacgtccgggtccgtccattctgctctcaccctcgggtcttggccatcggggaagagcacgaggctctcaacgcgtcagcgactcagcgtcatatttctgagttctcgcttctcacttgtgcccagatgccggccctttccttttcgggatctcctcggtgacctagatcggatggacccgccgccggcgacgcgcgcggcgtccaggcggcgggaccgccgacggcgcctgcggcagcggcagcgcgcagctgcagccacgaaaacgaaggtcggtgcggccgtgctggccgtggagccgcagagcgcagcagtcacaaccccggtggcttcgatcggtcctgctgccacgccggcgtcgaggggcaggaaacggcggaggcctcgtagacggcgtggccggaacgcgggcgcggctggggtgtcggacgaaccaccggctgcgtcccccgttcccgttccagatgccccgcaagcaagttgcaatttggaagcaatggcatcgcgtctgagcgataatgtgctgcaaactatgactgagaagataatgaggtcagataaaacaagcaagagaaattttcagcacggaaatgaggcgctaaaagattctgtggctgaaggtgctgcctgctcttctcttgcccgtcgtgaacattctaccagagaaaatggagcctcaaggagtaagatacttaagagatccaatgtaaaatccccagttgatagttgcactgaacaaggaactgatatggattatcacaagatgaagagtgccgatttgctagggaacctggaagaagtgtaccaggaaagaacgtgtcttggttactgctcttcgcagaagttggaagaatattgggaaaatgaaaatgtatcttctctcaactccagcagtttacaggcgggaaaaaagagaaagaaaagaagaggcaggaaaaagcacaatcgtcgcaagaaagctaatttacaggattctccagcatcaactgctgctgataattctggtttggtgacgttttctgagaactgtacttcagcccttaaactagaggaacagaggaagaagcaagatcagaacaagacatccatgactaacttacttttaatcaacaatgcaaagagatcagaaccatttgatgtgaatttggaaggcgctattgaaaagagctgtgaactggcaaagaatagttttgacaacacattagaaaataggtatgaactggcaaagaatagttttgacaacaccttagaaaataggtatgaactggcaaagagtaattctgactacataaatatggtaagaaatggattacaagagcaagacttagcatgcttgtcaaacagtcacaatgttaactacctgaagccttcccatttggctgaggaatatacagaaaaactcaaacatgtcttttcactgggaaagtccttaaggcctccgaagaaaaagcttctcatcttagatcttaatggtttacttgtggatatcaacgaagactaccacaacgctcacatggctgatgccaagtattccgaaggccttactgcgatgattttctcaacttttgtgctctgaattttgagctaggcatatggtcctcaagaaaaaaagaaaatgttgattcggttgttaatattgttatgagtgaattcaaaccacacctactgttttgttgggacatgtctaaatgcacattcaccggacataaaacactggagaataagcacaagccattagtgctgaaggaattgagaaaactatggaacgtggaagaacaagatcttccatgggaagtgggggactattcaccttcgaatacattactagtggatgattccccttacaaagctctgcgcaatcctccgcatactgccatttttcctcactcctacagttacttaaactggaatgacgattcgctgggtcccaatggagaccttcgtgtgtatctgcagaacctagccgctgcagataatgttcagcattttgttcgtgataatccgtttggtcaacctttcattactgagagcgatccgcattggaacttctatgctcagattgctgatagagggcgtgcacccttgacatgttgcgcttgaactcccaagggtcgtgcttttttctgggagttctgtggttatccatgatcaaaagatcatgatcagtatacagtgatcttctctgagtagtttgcttgtatccctgtactgaagattacagagtttctgctatgggtttaaattgcaggctctacgaaaggtatcagaccaaatgaatgaattgtctgacattatctcagtctcaaactgtttgcagccatgcttttttttcatttgcctcacgttttaaagattaattgtgatgcctccttttgttctggtcttaaagaaa

SEQ ID NO: 52375 - DNA, 2464 bp, Zea Mays
atttaacttatgacaaattaaaataaatcaaactaaactaaacacgagtcgaacgaacttacaaacttcacctaccagacctagtcagccggaaggctgtgtcgactcgaatcattcgcttgatccctctattttacgcgaatcactcgggcacagttcgtacgccacgcgcccacgtccggatgccggccctttccttttcgggatctcctcggtgacctagatcggatggacccgccgccggcgacgcgcgcggcgtccaggcggcgggaccgccgacggcgcctgcggcagcggcagcgcgcagctgcagccacgaaaacgaaggtcggtgcggccgtgctggccgtggagccgcagagcgcagcagtcacaaccccggtggcttcgatcggtcctgctgccacgccggcgtcgaggggcaggaaacggcggaggcctcgtagacggcgtggccggaacgcgggcgcggctggggtgtcggacgaaccaccggctgcgtcccccgttcccgttccagatgccccgcaagcaagttgcaatttggaagcaatggcatcgcgtctgagcgataatgtgctgcaaactatgactgagaagataatgaggtcagataaaacaagcaagagaaattttcagcacggaaatgaggcgctaaaagattctgtggctgaaggtgctgcctgctcttctcttgcccgtcgtgaacattctaccagagaaaatggagcctcaaggagtaagatacttaagagatccaatgtaaaatccccagttgatagttgcactgaacaaggaactgatatggattatcacaagatgaagagtgccgatttgctagggaacctggaagaagtgtaccaggaaagaacgtgtcttggttactgctcttcgcagaagttggaagaatattgggaaaatgaaaatgtatcttctctcaactccagcagtttacaggcgggaaaaaagagaaagaaaagaagaggcaggaaaaagcacaatcgtcgcaagaaagctaatttacaggattctccagcatcaactgctgctgataattctggtttggtgacgttttctgagaactgtacttcagcccttaaactagaggaacagaggaagaagcaagatcagaacaagacatccatgactaacttacttttaatcaacaatgcaaagagatcagaaccatttgatgtgaatttggaaggcgctattgaaaagagctgtgaactggcaaagaatagttttgacaacacattagaaaataggtatgaactggcaaagaatagttttgacaacaccttagaaaataggtatgaactggcaaagagtaattctgactacataaatatggtaagaaatggattacaagagcaagacttagcatgcttgtcaaacagtcacaatgttaactacctgaagccttcccatttggctgaggaatatacagaaaaactcaaacatgtcttttcactgggaaagtccttaaggcctccgaagaaaaagcttctcatcttagatcttaatggtttacttgtggatatcaacgaagactaccacaacgctcacatggctgatgccaaggttcgaagaaaattagtattccgaaggccttactgcgatgattttctcaacttttgtgctctgaattttgagctaggcatatggtcctcaagaaaaaaagaaaatgttgattcggttgttaatattgttatgagtgaattcaaaccacacctactgttttgttgggacatgtctaaatgcacattcaccggacataaaacactggagaataagcacaagccattagtgctgaaggaattgagaaaactatggaacgtggaagaacaagatcttccatgggaagtgggggactattcaccttcgaatacattactagtggatgattccccttacaaagctctgcgcaatcctccgcatactgccatttttcctcactcctacagttacttaaactggaatgacgattcgctgggtcccaatggagaccttcgtgtgtatctgcagaacctagccgctgcagataatgttcagcattttgttcgtgataatccgtttggtcaacctttcattactgagagcgatccgcattggaacttctatgctcagattgctgatagagggcgtgcacccttgacatgttgcgcttgaactcccaagggtcgtgcttttttctgggagttctgtggttatccatgatcaaaagatcatgatcagtatacagtgatcttctctgagtagtttgcttgtatccctgtactgaagattacagagtttctgctatgggtttaaattgcaggctctacgaaaggtatcagaccaaatgaatgaattgtctgacattatctcagtctcaaactgtttgcagccatgcttttttttcatttgcctcacgttttaaagattaattgtgatgcctccttttgttctggtcttaaagaaa

SEQ ID NO: 52376 - DNA, 2535 bp, Zea Mays
gccgcctgtctcagtcgcggccgtcccccggcttcttggactttgtcgccgcacccgcacggcgctacgcaacaacaaaagcaggtccgctcgtcccgtctcgtgaccctcccgcggctcgtctccctctcacggtctctcacctcacaacctcacggtcctcacctcactccacctcgttcgccgcctcgctgccgcgtcgggccagtgcgtgcgtgggggcgggcgtgagtgactggctctcctcggcgcgcggacccaggggcggcggcgatggggaagaatatgcgcatcaagacggcgcccaaggcgaaccgtgtccccctcctcggcgacggggagacgtcaagggcgctctcggacctggaagagggcagcgacgtccagccagcgaacgtcggcttctgtcgggtcatcaaacttgcgaaacatgacgccggaaagctggtcctcgccacagcggctctgctcgtcgcctccctcagtaaccttctcgttgtagcccaaatatggtggcaagataattgacattgtgtcaagagatgttcggcgcccagaagataaggcgcaagccctggaggatgtgaagggcacaattttgtacattgtgacaatcgtcttagtcggttcagtttgcacggctcttcgggcatggttattcaattctgctagtgagagagtagtcgctcgactaaggaaagacttgttcagccatctcataaaccaggaaatagcgttttttgatgtgactagaacaggagagctcttaagcaggctttctgaagatacacaaataataaagaatgctgctacaaccaacctatcagaggcactgcgcaatgttactactacagctattggtcttggtttcatgttttcaacttcatggaagttaacattgctggcacttgtaattgtcccggttatatcagttgctgtgcgtagatttggacgttttcttcgtgagctttcacatcaaacacaagctgctgctgctgtagcttcatccatagctgaggaatcttttggtgccatccgcacagtaagatcctttgctcaggaatatcatgagatttcacgctatggtgaaaaagtagaggagacacttaaacttggtctcaaacaagctaaagttgttggcttgttttctggagggcttaacgctgcatcaaccatgtctgtggttattgttgttatttatggcgccaacttaaccatcaatggttacatgacaactggctctcttacatcattcatcttatacagccttacagttggttcgtcagtatctgccttgtcaggactatacacaactgtaatgaaagcctctggtgcaagccgtagggtttttcaacttttggaccgtgtttcgtcaatgacaaactctggggacaaatgtccaataaatgaaaaggatggggaagttgagcttgatgatgtctggtttgcatatccttctcgcccatctcatatgattcttaagggaataactctgaagctagcaccaggttcaaaggttgcacttgttgggccaagtggtggtggtaaaaccacaatagcaaatttgattgagcggttttatgaccctctaaagggaaggatcttgcttaatggagtaccgttggtagaaatttcacatcaatatcttcacagcaaggtaagcattgtcagccaggagcctacgctcttcaactgcaccatcgaagagaatattgcttatggactagagggcacaacgaactttgctgacgttgagagtgcagctaaaatggcgaatgcacacaacttcatatgcggctttcccgaccaatataagactgtcgtcggcgagcgggggatcaggttatccggcgggcagaagcagaggatcgccattgcgagagctttgcttatgaacccacgagtgcttctcctggacgaagccaccagtgccctggatgctgaaagcgaatatcttgtacaggatgcaatggactccttgatgaaagggaggactgtccttgtgatagcccaccggctctcgaccgtcaagagcgccgacaccgtcgccgtcatctccgacggcctaatcgtggagagcggcacgcacgacgaactcctggaccgcgacggcatatacacggccttggtgaagaggcagctgcaggggccgaagtttgaggccaccagcagcatcagcgaggcctccgaaattgaagcggaacccagcagtaatgggcaatagcggccccgattattaggaagaccacagttgatttgaatccacacaagtgtatgtaaccctgatgttgacgtatgccactgcgaatcacgcgaaaccattggatatcacatgatgctacggttgttgtaggagtaatttcccacttggttaatccaacacatatggtccagttttgtgtttatgctgttgggattattgggccaagcccgtttgaaattctgaaatagtttctagagaaacacaaaggcccattcataaattcgtgtgtgacaatattgaggagtgtggaaaacatccctcccttagttttt

SEQ ID NO: 52377 - DNA, 2619 bp, Zea Mays
ctcgttcttataataaagctgaaaaaaatccaagtgggcacgcacttaacctctagtactcgactgctaccggtaccggggacgacggcggaagccgcctgtctcagtcgcggccgtcccccggcttcttggactttgtcgccgcacccgcacggcgctacgcaacaacaaaagcaggtccgctcgtcccgtctcgtgaccctcccgcggctcgtctccctctcacggtctctcacctcacaacctcacggtcctcacctcactccacctcgttcgccgcctcgctgccgcgtcgggccagtgcgtgcgtgggggcgggcgtgagtgactggctctcctcggcgcgcggacccaggggcggcggcgatggggaagaatatgcgcatcaagacggcgcccaaggcgaaccgtgtccccctcctcggcgacggggagacgtcaagggcgctctcggacctggaagagggcagcgacgtccagccagcgaacgtcggcttctgtcgggtcatcaaacttgcgaaacatgacgccggaaagctggtcctcgccacagcggctctgctcgtcgcctccctcagtaaccttctcgttcccaaatatggtggcaagataattgacattgtgtcaagagatgttcggcgcccagaagataaggcgcaagccctggaggatgtgaagggcacaattttgtacattgtgacaatcgtcttagtcggtttgcacggctcttcgggcatggttattcaattctgctagtgagagagtagtcgctcgactaaggaaagacttgttcagccatctcataaaccaggaaatagcgttttttgatgtgactagaacaggagagctcttaagcaggctttctgaagatacacaaataataaagaatgctgctacaaccaacctatcagaggcactgcgcaatgttactactacagctattggtcttggtttcatgttttcaacttcatggaagttaacattgctggcacttgtaattgtcccggttatatcagttgctgtgcgtagatttggacgttttcttcgtgagctttcacatcaaacacaagctgctgctgctgtagcttcatccatagctgaggaatcttttggtgccatccgcacagtaagatcctttgctcaggaatatcatgagatttcacgctatggtgaaaaagtagaggagacacttaaacttggtctcaaacaagctaaagttgttggcttgttttctggagggcttaacgctgcatcaaccatgtctgtggttattgttgttatttatggcgccaacttaaccatcaatggttacatgacaactggctctcttacatcattcatcttatacagccttacagttggttcgtcagtatctgccttgtcaggactatacacaactgtaatgaaagcctctggtgcaagccgtagggtttttcaacttttggaccgtgtttcgtcaatgacaaactctggggacaaatgtccaataaatgaaaaggatggggaagttgagcttgatgatgtctggtttgcatatccttctcgcccatctcatatgattcttaagggaataactctgaagctagcaccaggttcaaaggttgcacttgttgggccaagtggtggtggtaaaaccacaatagcaaatttgattgagcggttttatgaccctctaaagggaaggatcttgcttaatggagtaccgttggtagaaatttcacatcaatatcttcacagcaaggtaagcattgtcagccaggagcctacgctcttcaactgcaccatcgaagagaatattgcttatggactagagggcacaacgaactttgctgacgttgagagtgcagctaaaatggcgaatgcacacaacttcatatgcggctttcccgaccaatataagactgtcgtcggcgagcgggggatcaggttatccggcgggcagaagcagaggatcgccattgcgagagctttgcttatgaacccacgagtgcttctcctggacgaagccaccagtgccctggatgctgaaagcgaatatcttgtacaggatgcaatggactccttgatgaaagggaggactgtccttgtgatagcccaccggctctcgaccgtcaagagcgccgacaccgtcgccgtcatctccgacggcctaatcgtggagagcggcacgcacgacgaactcctggaccgcgacggcatatacacggccttggtgaagaggcagctgcaggggccgaagtttgaggccaccagcagcatcagcgaggcctccgaaattgaagcggaacccagcagtaatgggcaatagcggccccgattattaggaagaccacagttgatttgaatccacacaagtgtatgtaaccctgatgttgacgtatgccactgcgaatcacgcgaaaccattggatatcacatgatgctacggttgttgtaggagtaatttcccacttggttaatccaacacatatggtccagttttgtgtttatgctgttgggattattgggccaagcccgtttgaaattctgaaatagtttctagagaaacacaaaggcccattcataaattcgtgtgtgacaatattgaggagtgtggaaaacatccctcccttagttttt

SEQ ID NO: 52378 - DNA, 547 bp, Zea Mays
gcgaaatctactatctcatgccaagcaccagacaagagttggagaactaggagtcttcggctgtcgctacggccttcggattgctcctgtattcttcaatggacaatccttaacacggtcacataagcacaacaagaggagaaccctgaccacagttcctagtccaagggcgacgatggcggatttgcttttattgctgaacaatgggaaccctctgtgggttgtgaaactattcctggtcagcgagaggtacgacagggatctcaactccttgaagctctccggtatccccccccacgagcttgttccttgtaagattcagtgtcctcaacttggtgcacacactgatgccaggagctatagcgccactcagatagttggttccaacatcaaaagtattaagcttcggcagcaagctggagtcgatagcaatctcaccagagagcgagtagttcctcaagctgattaccctcagcagtggacaactttacagggaagcgggcaactcaccgtccagcctattggtggccaggtttacggactctag

SEQ ID NO: 52379 - DNA, 756 bp, Zea Mays
ttcacattttgttgatgggctagcttttgttcatgacagcgcacaaaagtttagctataatacgtcataaccagcctgaagtttgggcattttgcttgggaaatggctatgctggattgaaggatgctcttggttcaaatgattctagacttcaaagttccaaattatatttcacatgcatgtcgccagccgggatgctacttcagtgagacattgaagcccatatcagaagagcaccagacaagagttggagaactaggagtcttcggctgtcgctacggccttcggattgctcctgtattcttcaatggacaatccttaacacggtcacataagcacaacaagaggagaaccctgaccacagttcctagtccaagggcgacgatggcggatttgcttttattgctgaacaatgggaaccctctgtgggttgtgaaactattcctggtcagcgagaggtacgacagggatctcaactccttgaagctctccggtatccccccccacgagcttgttccttgtaagattcagtgtcctcaacttggtgcacacactgatgccaggagctatagcgccactcagatagttggttccaacatcaaaagtattaagcttcggcagcaagctggagtcgatagcaatctcaccagagagcgagtagttcctcaagctgattaccctcagcagtggacaactttacagggaagcgggcaactcaccgtccagcctattggtggccaggtttacggactctag

SEQ ID NO: 52380 - DNA, 910 bp, Zea Mays
cagggtgtcaagcatggttctgctataatacgtcataaccagcctgaagtttgggcattttgcttgggaaatggctatgctggattgaaggatgctcttggttcaaatgattctagacttcaaagttccaaattatatttcacatgcatgtcgccagccgggatgctacttcagtgagacattgaagcccatatcagaagaggtgcgcaatctcgatgttgtactatctagatttcatttcaaggagcaccagtaaagtagttccaaaatttaaattctgcacgaatctgatggtttgtttgaattgcaatttggaccgaggcgaaatctactatctcatgccaaggtgacactggtgtttgaggttcagtaacttgagttgctaaagcaccagacaagagttggagaactaggagtcttcggctgtcgctacggccttcggattgctcctgtattcttcaatggacaatccttaacacggtcacataagcacaacaagaggagaaccctgaccacagttcctagtccaagggcgacgatggcggatttgcttttattgctgaacaatgggaaccctctgtgggttgtgaaactattcctggtcagcgagaggtacgacagggatctcaactccttgaagctctccggtatccccccccacgagcttgttccttgtaagattcagtgtcctcaacttggtgcacacactgatgccaggagctatagcgccactcagatagttggttccaacatcaaaagtattaagcttcggcagcaagctggagtcgatagcaatctcaccagagagcgagtagttcctcaagctgattaccctcagcagtggacaactttacagggaagcgggcaactcaccgtccagcctattggtggccaggtttacggactctag

SEQ ID NO: 52381 - DNA, 2227 bp, Zea Mays
cccgatttggcttgcctcccccgaaattgccggcgttctcgcccttccccgtcgcgccgcgcgatgctagccgtgattcccgcgtccgcccgcccgacgtctacaaacttgttctgcagatgcccctcccgcccatcgtcatccatcccctgcctctgccgcggacgaccttccttggccgccaccagggggcttctgcacgcgagcgcgcaggggggagctatggcccatggcgttcgacttcacgccccgtgcaacccctcctcaccgtgtcggcacgctgcccgtctttgtctcatctcgttggtgctcctccctccctcggggcctgcttcctccccatggtgtggatctagatcgtcgacgtctcaaaccacctcgattggcgacggcgacgccccctgccgtgtggatccgatcatggggcggccgccctgccactgcccgctccaacggcggcgcggacctcgccgtcttcgagcagttcgagcggacgattcagtctgttgcaagatatgtaagtatacacaatggtcttagtattgtctatgcatggagtcagggtgtcaatcatggtaatgctaaactgcatgttctcttatctcttttttctcatcttattcctaattttcattttgcaaagattagcatgttcatttatttgtttgataggccctcaaatgcatatttggtaccatttggttgcttcaaagactaattttcattttgcttagattattcttttgttttcttacatttttattgttatgtcccactgcaagctaatggtagtaattgatgctcaatattttgaaaatcaggagccagggtgtcaagcatggttctggtaatactaaacagcaggttctcttaactcttttttctcattttgttcctatttttcattttccaaagattagcatgtacatttatttgtatgatagccctgaattgcatatttagtatcatttggttgcttcaaagaggtgcatcaccggccaaggctttcattgccgagggaaagtttgctgttgatccagttgataattgttgcctcctctcctattgctttgctctttcacattttgttgatgggctagcttttgttcatgacagcgcacaaaagtttaggtattgttgtaggtgtgaattcaaattttgaagtagatagtgggcacccaattctgatatgaggtttcaatatggaatattccataattttattgtgtgtgtttggctgaagtagggcacatgattggaatatgaattgaaaaacagtttgggcattttgcagctataatacgtcatgctaacaaaacttcgtacaattgttttccagctataatacgtcataaccagcctgaagtttgggcattttgcttgggaaatggctatgctggattgaaggatgctcttggttcaaatgattctagacttcaaagttccaaattatatttcacatgcatgtcgccagccgggatgctacttcagtgagacattgaagcccatatcagaagaggtgcgcaatctcgatgttgtactatctagatttcatttcaaggagcaccagtaaagtagttccaaaatttaaattctgcacgaatctgatggtttgtttgaattgcaatttggaccgaggcgaaatctactatctcatgccaaggtgacactggtgtttgaggttcagtaacttgagttgctaaagcaccagacaagagttggagaactaggagtcttcggctgtcgctacggccttcggattgctcctgtattcttcaatggacaatccttaacacggtcacataagcacaacaagaggagaaccctgaccacagttcctagtccaagggcgacgatggcggatttgcttttattgctgaacaatgggaaccctctgtgggttgtgaaactattcctggtcagcgagaggtacgacagggatctcaactccttgaagctctccggtatccccccccacgagcttgttccttgtaagattcagtgtcctcaacttggtgcacacactgatgccaggagctatagcgccactcagatagttggttccaacatcaaaagtattaagcttcggcagcaagctggagtcgatagcaatctcaccagagagcgagtagttcctcaagctgattaccctcagcagtggacaactttacagggaagcgggcaactcaccgtccagcctattggtggccaggtttacggactctag

SEQ ID NO: 52382 - DNA, 1438 bp, Zea Mays
gccacccttctccccaccgccgccgcggttttctcgcttcccgcccacccgcggcgctcctttccatcctcgagcagtcgcggcttccttctatggcgctcctttccatcctcgaccgcggtttcctcgccactgcgctccatctctctcgccctttccagatcactgcccccgccctctctcgcttcctcttctcccaagatcccatcgctgagagcacgcaagcacatgcagggggcccttccatccatggctcgccccgtagaggcaggggtcccttctaatgatggagcacctcgccccgcactggcagggggcccttccatccatgagagcacgcaagcagctctcctccttcctccacgcaaggcagtccgctcggattatccgcaaatcgtgcctgccccacggcgcccttccatctacggtgaaatcctctccctccgcgccagctcggcagatccgcaaaccgcgtctgcaaccacgacgcacttccatccacggtccagggagggcacgatgatgaacctgtcgaatggctttgcgtaaaattcagatttttattactaaaatattactaaaattgcagattcagtctgttgcaagatatttatgtcccactgcaagctaatggtagtaatcgatgcatttttgaaaatcaggtctatgcatggagtcagggtgtcaatcatggagccagggtgtcaagcatggttctggtaatactaaacagcagctataatacgtcataaccagcctgaagtttgggcattttgcttgggaaatggctatgctggattgaaggatgctcttggttcaaatgattctagacttcaaagttccaaattatatttcacatgcatgtcgccagccgggatgctacttcagtgagacattgaagcccatatcagaagagcaccagacaagagttggagaactaggagtcttcggctgtcgctacggccttcggattgctcctgtattcttcaatggacaatccttaacacggtcacataagcacaacaagaggagaaccctgaccacagttcctagtccaagggcgacgatggcggatttgcttttattgctgaacaatgggaaccctctgtgggttgtgaaactattcctggtcagcgagaggtacgacagggatctcaactccttgaagctctccggtatccccccccacgagcttgttccttgtaagattcagtgtcctcaacttggtgcacacactgatgccaggagctatagcgccactcagatagttggttccaacatcaaaagtattaagcttcggcagcaagctggagtcgatagcaatctcaccagagagcgagtagttcctcaagctgattaccctcagcagtggacaactttacagggaagcgggcaactcaccgtccagcctattggtggccaggtttacggactctag

SEQ ID NO: 52383 - DNA, 1395 bp, Zea Mays
gccacccttctccccaccgccgccgcggttttctcgcttcccgcccacccgcggcgctcctttccatcctcgagcagtcgcggcttccttctatggcgctcctttccatcctcgaccgcggtttcctcgccactgcgctccatctctctcgccctttccagatcactgcccccgccctctctcgcttcctcttctcccaagatcccatcgctgagagcacgcaagcacatgcagggggcccttccatccatggctcgccccgtagaggcaggggtcccttctaatgatggagcacctcgccccgcactggcagggggcccttccatccatgagagcacgcaagcagctctcctccttcctccacgcaaggcagtccgctcggattatccgcaaatcgtgcctgccccacggcgcccttccatctacggtgaaatcctctccctccgcgccagctcggcagatccgcaaaccgcgtctgcaaccacgacgcacttccatccacggtccagggagggcacgatgatgaacctgtcgaatggctttgcgtaaaattcagatttttattactaaaatattactaaaattgcagattcagtctgttgcaagatatttatgtcccactgcaagctaatggtagtaatcgatgcatttttgaaaatcaggtctatgcatggagtcagggtgtcaatcatgctataatacgtcataaccagcctgaagtttgggcattttgcttgggaaatggctatgctggattgaaggatgctcttggttcaaatgattctagacttcaaagttccaaattatatttcacatgcatgtcgccagccgggatgctacttcagtgagacattgaagcccatatcagaagagcaccagacaagagttggagaactaggagtcttcggctgtcgctacggccttcggattgctcctgtattcttcaatggacaatccttaacacggtcacataagcacaacaagaggagaaccctgaccacagttcctagtccaagggcgacgatggcggatttgcttttattgctgaacaatgggaaccctctgtgggttgtgaaactattcctggtcagcgagaggtacgacagggatctcaactccttgaagctctccggtatccccccccacgagcttgttccttgtaagattcagtgtcctcaacttggtgcacacactgatgccaggagctatagcgccactcagatagttggttccaacatcaaaagtattaagcttcggcagcaagctggagtcgatagcaatctcaccagagagcgagtagttcctcaagctgattaccctcagcagtggacaactttacagggaagcgggcaactcaccgtccagcctattggtggccaggtttacggactctag

SEQ ID NO: 52384 - DNA, 1386 bp, Zea Mays
gccacccttctccccaccgccgccgcggttttctcgcttcccgcccacccgcggcgctcctttccatcctcgagcagtcgcggcttccttctatggcgctcctttccatcctcgaccgcggtttcctcgccactgcgctccatctctctcgccctttccagatcactgcccccgccctctctcgcttcctcttctcccaagatcccatcgctgagagcacgcaagcacatgcagggggcccttccatccatggctcgccccgtagaggcaggggtcccttctaatgatggagcacctcgccccgcactggcagggggcccttccatccatgagagcacgcaagcagctctcctccttcctccacgcaaggcagtccgctcggattatccgcaaatcgtgcctgccccacggcgcccttccatctacggtgaaatcctctccctccgcgccagctcggcagatccgcaaaccgcgtctgcaaccacgacgcacttccatccacggtccagggagggcacgatgatgaacctgtcgaatggctttgcgtaaaattcagatttttattactaaaatattactaaaattgcagattcagtctgttgcaagatatgtctatgcatggagtcagggtgtcaatcatggagccagggtgtcaagcatggttctggtaatactaaacagcagctataatacgtcataaccagcctgaagtttgggcattttgcttgggaaatggctatgctggattgaaggatgctcttggttcaaatgattctagacttcaaagttccaaattatatttcacatgcatgtcgccagccgggatgctacttcagtgagacattgaagcccatatcagaagagcaccagacaagagttggagaactaggagtcttcggctgtcgctacggccttcggattgctcctgtattcttcaatggacaatccttaacacggtcacataagcacaacaagaggagaaccctgaccacagttcctagtccaagggcgacgatggcggatttgcttttattgctgaacaatgggaaccctctgtgggttgtgaaactattcctggtcagcgagaggtacgacagggatctcaactccttgaagctctccggtatccccccccacgagcttgttccttgtaagattcagtgtcctcaacttggtgcacacactgatgccaggagctatagcgccactcagatagttggttccaacatcaaaagtattaagcttcggcagcaagctggagtcgatagcaatctcaccagagagcgagtagttcctcaagctgattaccctcagcagtggacaactttacagggaagcgggcaactcaccgtccagcctattggtggccaggtttacggactctag

SEQ ID NO: 52385 - DNA, 1624 bp, Zea Mays
gccacccttctccccaccgccgccgcggttttctcgcttcccgcccacccgcggcgctcctttccatcctcgagcagtcgcggcttccttctatggcgctcctttccatcctcgaccgcggtttcctcgccactgcgctccatctctctcgccctttccagatcactgcccccgccctctctcgcttcctcttctcccaagatcccatcgctgagagcacgcaagcacatgcagggggcccttccatccatggctcgccccgtagaggcaggggtcccttctaatgatggagcacctcgccccgcactggcagggggcccttccatccatgagagcacgcaagcagctctcctccttcctccacgcaaggcagtccgctcggattatccgcaaatcgtgcctgccccacggcgcccttccatctacggtgaaatcctctccctccgcgccagctcggcagatccgcaaaccgcgtctgcaaccacgacgcacttccatccacggtccagggagggcacgatgatgaacctgtcgaatggctttgcgtaaaattcagatttttattactaaaatattactaaaattgcagattcagtctgttgcaagatatttatgtcccactgcaagctaatggtagtaatcgatgcatttttgaaaatcaggtctatgcatggagtcagggtgtcaatcatggagccagggtgtcaagcatggttctggtaatactaaacagcagctataatacgtcataaccagcctgaagtttgggcattttgcttgggaaatggctatgctggattgaaggatgctcttggttcaaatgattctagacttcaaagttccaaattatatttcacatgcatgtcgccagccgggatgctacttcagtgagacattgaagcccatatcagaagaggtgcgcaatctcgatgttgtactatctagatttcatttcaaggagcaccagtaaagtagttccaaaatttaaattctgcacgaatctgatggtttgtttgaattgcaatttggaccgaggcgaaatctactatctcatgccaaggtgacactggtgtttgaggttcagtaacttgagttgctaaagcaccagacaagagttggagaactaggagtcttcggctgtcgctacggccttcggattgctcctgtattcttcaatggacaatccttaacacggtcacataagcacaacaagaggagaaccctgaccacagttcctagtccaagggcgacgatggcggatttgcttttattgctgaacaatgggaaccctctgtgggttgtgaaactattcctggtcagcgagaggtacgacagggatctcaactccttgaagctctccggtatccccccccacgagcttgttccttgtaagattcagtgtcctcaacttggtgcacacactgatgccaggagctatagcgccactcagatagttggttccaacatcaaaagtattaagcttcggcagcaagctggagtcgatagcaatctcaccagagagcgagtagttcctcaagctgattaccctcagcagtggacaactttacagggaagcgggcaactcaccgtccagcctattggtggccaggtttacggactctag

SEQ ID NO: 52386 - DNA, 868 bp, Zea Mays
atggcgttcgacttcacgccccgtgcaacccctcctcaccgtgtcggcacgctgcccgtctttgtctcatctcgttggtgctcctccctccctcggggcctgcttcctccccatggtgtggatctagatcgtcgacgtctcaaaccacctcgattggcgacggcgacgccccctgccgtgtggatccgatcatggggcggccgccctgccactgcccgctccaacggcggcgcggacctcgccgtcttcgagcagttcgagcggacgattcagtctgttgcaagatatgtaagtatacacaatggtcttagtattgtctatgcatggagtcagggtgtcaatcatgctataatacgtcataaccagcctgaagtttgggcattttgcttgggaaatggctatgctggattgaaggatgctcttggttcaaatgattctagacttcaaagttccaaattatatttcacatgcatgtcgccagccgggatgctacttcagtgagacattgaagcccatatcagaagagcaccagacaagagttggagaactaggagtcttcggctgtcgctacggccttcggattgctcctgtattcttcaatggacaatccttaacacggtcacataagcacaacaagaggagaaccctgaccacagttcctagtccaagggcgacgatggcggatttgcttttattgctgaacaatgggaaccctctgtgggtgactgcttgctcgagccattatttgaattcaagctcctcatctgtgtgaagctgacagcacattgaggcttcccaagctctgcagccacgggggaattacgccgatgagtagacagtttgtcaggatgagcacctgcattgtctc

SEQ ID NO: 52387 - DNA, 1662 bp, Zea Mays
catcaggagaggttgggaggaataggaacagactgaataatatgatgctgctgcacctcaactccagaaagtaaaacgtggaagttcagtatatgggcaacttacttagagcttgggttaccctgcgcccatctgcagagaaaaacttcgttggcctgccaacaatagcacgcccacatgtgtacccagggcctggagtcttaagagtgaaattcttcggcaccttaacagttttattggtagttccagcaagaccaacactgatctggaaggaggaagcagcatttgctgggtcctggttaaagcaatggggggtgttgcccttgaactttgagcagtcaccctgttcagtggtctgagccccaaccattgaccatataacctccttttttgcccatgtccacccaagctgccatccaggtgccccgatgtgccgaaattgttgataattgaacattgtgacaacagcctgcagcaggtcaaactgggctattcaatagaataaaccagggcctaccaagctggagatgaaagagatacagctgttagagtgggcaattctacttacgacatatccgtcaggagtccactgcatgatatcccattttatagtgatgttgccgtttggatccagcgaatcgtaggcctctgcagagagcaatcacagggttgacatcaaacaaagatcccaattatagaaagaagatggataatgaattcacgcaatatatgaagtctatgttacgttcgaggtccgctttcgaaggtccacacactgagtctggcaatggatcccttaatggtgaactacagttaagtaagatcttgaattgcttgttcactcctgaacagatctactaaataccaaggagctccgtatggagcagctcgcggcaggttgagcagacagtggcactagtttttttccccgacaggcgacagaggcaatcctcatttctattatttgcataacagaaatacagctgagttttagaagacagtggcactcgttaataagcctgagatggcatctccatctccatgtatagctgcaggaagctaagccagtaagcctacgtaattggattcgtagctgaggcaagctcgaaaggtcgatctgaattggactgcagtaggaccaaaactagaaggcaccgactctgcactggagccaccgatactgacagtaccaatcaaacggggaccgcatttgtcagcgcgcaacggaagcacccggagcggaagcaccatcgcagctctccgaactccgttgaatcagaagggcgatgggggcgacggatctaaccagctcagtaatccgcgcgcgagcgggagaggcgtagagagacggacgaggagaagcgaagaagccgaagggccgaacctgtggtggtcggtgcggagaggagcagcgcggccgcgagcagcacggcggcaaagcacgcgatggatctgccgcccgccgccattcttccttcccacccgccgccgcctaaccgacacaaccggtctcccaccaacagatagatacagacagagccgcgcccgcccgcctgtcgcccgtccgtccgtccgtctacccgccgatcttgctccggactgcggcggttgcggccgccgggtgctgggcgccggggaatgaggggcagtggtgaggagggc

SEQ ID NO: 52388 - DNA, 1133 bp, Zea Mays
gtttcttggtacagttctatactcattgtctattattaattgctgatcaagtgctgctagatagatgtttcaggcctccaacacggtatgtctaaagacgatttctaatcagcccatgggccgtgagggaaaaaataaccctagcagcccaagaagaccaccaaagcagacggcaagtaccctgtagcacccccacccctccgcctccaaacatgttcttcttccgctacaagatagcaacacaggcgaggatcccaagacccgagccgtgtaggctgctgcagtctcttcctccccggcaagccgcggcggtcgttgccccggcccctcatataatatagtcgccgcctccttgtcaccgccgattcgattaggttgatacagggaggagtcgcgaggggacgtagatgccgacgctgacaaagctgtacagcatgaaggaggctgccctccacaacacgcccgacgactgctgggtcgtcgtcgacggcaagatttatgatgtgaccaagtatttggaggaccatcctgggggcgccgatgttctgctcgaagcaaccggatgctacagaagaatttgacgatgcagggcacagcaagagtgccaaggagctaatgcaggactacttcgttggggagttggactcggacccaactcctgagattcctgagatggaggttttcagaaaggaacaggacacgggatttgccaggaagcttatggacgacgtggtgcaatattggtcgatcccagccgctgtaattgggatatcagctgttgttgccatattgtatgcgcgaaggaagtgaaagccgatgtgcatgtgccgagcttgggcagatgaccccttttagagggatcagcccatggtgcatggatatatcatatatcatatctcctgtccagaaccaaattacattatgatgttcgattcttaaacacttaatggcaaacatttgccggattgatggcattattttgtcgacacgacaatcaattgatggatttattactcttggaaccaaccatcacgcttgctggcgtaaatatgttccatgccacctttgatgcttttgaacgccatggattggcattcaatctttaacttttatctcaactgaattcggtgtta

SEQ ID NO: 52389 - DNA, 3075 bp, Zea Mays
gattagctccatggcggcttcgaaaaaatcaaaataaaaaactagcgccatggcggggagggataagaggcgacgagcggcgccgctcgaaggcgacgagcagcagttgcggcggaggctggaggaagcggcgctcctcctccgcaggatcaaagggcttgtgcgctggatcgtcgaagaggttgccgccggccgctccccgtctatagtgctccaccgtgcctgcagctacgacatccccgtcggcacggacgtcctctctctgctccacaaggactaccacacctcccgcctcaatgtgctcctgagggtgctgttcgtggtgcagcagctcctgcagcagaacaagcactgctccaagagggacatctactacatgtacccctccatcttcgtagaagtagcagttgttgaccgtgccatcaacgatatctgcatactcttcaagtgcagccggcacaatctcaacgtggttcctgtagtgaaagggtatgaactgtcatagagttgaagctctgaagatatgtccgtttgttattcttctattattttacaacgcttcatttttttataacttaaataaacccgtttttttttgttccttaatcatcctgtgtgcttctcaccattatataaagaaagatgatttggatgtgtttgatgagctagtggggttgggaacctgggataccgttctttcaatgtagtcttagccgtataggtttatgcatatgaagaggaggaagaaatgatgccatgatggatctgttgttcttcccagtgtcagttcacaactttgagatatattttttttgatacagaacatgtctgaattcatgaagagttctctttggtttatctgaataaaaaatcaatatagcataagtgttaactaaattcactataggaatttggaaattctatatgatttccgtattacacttgctgttacttgcattgtttttgctaggtttgcgatgttatattcatagaactatttgttatttattcagttgtttaattgtgtgcacatgtctattcccttcattatcctagtttggtgatgggctggataagatttatggagggcgaaaagaaagtgtattgtataacaagcgtcaatgctgctttctccattcctgttgacattgaggcaatcaaagatgttgttagtgttgcccactacatacttgtggttgagaaggagacaggtctttttttttttgcatttaataatttccgctctttgtacaatatgcttcagtagtccctttgcagtgttccagcgtttggccaatgacaagttctgtgaaagaaatcgctgcattgttattacaggaagaggctatccagatattccaacaagaaggcatgtgctctttattcattaagttcctcttgcatatttctcaaccgctatcccaattttacattctttttccatcctagattcctgcggtaccttgttgaactgctgcatctgcctgcttattgcttagtggactcagatccttatggtttcgacattctggctacctataaatttggttccttggtaggcatgatttatctgatgctgctatgctcatctatatctattgtctatgaacttaacttccttagcagattcacaggttaaaattgcaggtaacgaatccatggacatgatcatatactgcacctttcgtcctaaatcaacagcttgtctggcctctttgcatttgaaagttctattactttatgaagtcccgttagcaataaggctgtgtattagagcagttcatttttcccctcaaaataaacatgattatgctcgttttgctcatcttatcacaagcatgaccaaaatatttctttttgctctttgaaacccaagattatgacatatttacttgtgttaacttaccaacctctgctacttgcgtaatttcattcttcaagcaattggcacatgatgcaaacttgttgcgtgtccctgatatacggtggcttggagttttcacatctgattttgaagaatattgccttccagactgctgcctacttcgtttgtcacctgaagataggaggaaagctgaaggcattcttgctaggtgctatttacacagggaagccccagaatggaggtcagagttggaagcaatgctgcaaaagggtgtcaagtttgagattgaggcactatccgcaaattccatttcctttttatcgcatgagtacattccccagaaaatcaaacaagctgcttccaactactgctctcgcccattcctggagcaggcggcttgaacggatgtaaagtttttgttggtacttaattgatagtgcagtacgatggttcaggatggcgtaaaactaaaacaggtaatggtagtagtaagtagcgttatgatccccttagttattttgtttcagcctgcagttattttatatatgacctagttagtttaaaactgaactgattaggtgcatcatatataaaagaaaagagaagcatatatatatatatatatggctcacttttgtggtatcagaaagcaacactgtttgtcagcataaaagataacaaaagtagcgttattttcccgccagagcacgccaagagtcttcctatcaagcctaggacacatcactacctagaggtgctagcatagcaaacactctcctctatctaatacatatataattctagcataataatataggtcgttaaagtatgttaagtttaatttggtagacgtgctagaaaaaaactactaaaaaagttctcataataaccagaaacttttaatttggtagactctaatcatcgtcaccgataatagcaattggatctatataataaattaaattacccacctctactgctgttatgagtaatatttgagctttcacaaaccatcgccattgccactctcagtttgcggccccggctcggctcactcaccatggtggtctcgccggtcgaagtgctctcgtcagactgtccgcagcggtttcctctaaatttctccctctatatcacttttttgcgtcacatcatcaacatttcatcccctattttttcatcttccgcag

SEQ ID NO: 52390 - DNA, 2487 bp, Zea Mays
gattagctccatggcggcttcgaaaaaatcaaaataaaaaactagcgccatggcggggagggataagaggcgacgagcggcgccgctcgaaggcgacgagcagcagttgcggcggaggctggaggaagcggcgctcctcctccgcaggatcaaagggcttgtgcgctggatcgtcgaagaggttgccgccggccgctccccgtctatagtgctccaccggtaccggaactattgctcctccgccgactctgcgtccccgtccccatgtgcctgcagctacgacatccccgtcggcacggacgtcctctctctgctccacaaggactaccacacctcccgcctcaatgtgctcctgagggtgctgttcgtggtgcagcagctcctgcagcagaacaagcactgctccaagagggacatctactacatgtacccctccatcttcgtagaagtagcagttgttgaccgtgccatcaacgatatctgcatactcttcaagtgcagccggcacaatctcaacgtggttcctgtagtgaaagggtatgaactgtcatagagttgaagctctgaagatatgtccgtttgttattcttctattattttacaacgcttcatttttttataacttaaataaacccgtttttttttgttccttaatcatcctgtgtgcttctcaccattatataaagaaagatgatttggatgtgtttgatgagctagtggggttgggaacctgggataccgttctttcaatgtagtcttagccgtataggtttatgcatatgaagaggaggaagaaatgatgccatgatggatctgttgttcttcccagtgtcagttcacaactttgagatatattttttttgatacagaacatgtctgaattcatgaagagttctctttggtttatctgaataaaaaatcaatatagcataagtgttaactaaattcactataggaatttggaaattctatatgatttccgtattacacttgctgttacttgcattgtttttgctaggtttgcgatgttatattcatagaactatttgttatttattcagttgtttaattgtgtgcacatgtctattcccttcattatcctagtttggtgatgggctggataagatttatggagggcgaaaagaaagtgtattgtataacaagcgtcaatgctgctttctccattcctgttgacattgaggcaatcaaagatgttgttagtgttgcccactacatacttgtggttgagaaggagacaggtctttttttttttgcatttaataatttccgctctttgtacaatatgcttcagtagtccctttgcagtgttccagcgtttggccaatgacaagttctgtgaaagaaatcgctgcattgttattacaggaagaggctatccagatattccaacaagaagcaattggcacatgatgcaaacttgttgcgtgtccctgatatacggtggcttggagttttcacatctgattttgaagaatattgccttccagactgctgcctacttcgtttgtcacctgaagataggaggaaagctgaaggcattcttgctaggtgctatttacacagggaagccccagaatggaggtcagagttggaagcaatgctgcaaaagggtgtcaagtttgagattgagctgcttccaactactgctctcgcccattcctggagcaggcggcttgaacggatgtaaagtttttgttggtacttaattgatagtgcagtacgatggttcaggatggcgtaaaactaaaacaggtaatggtagtagtaagtagcgttatgatccccttagttattttgtttcagcctgcagttattttatatatgacctagttagtttaaaactgaactgattaggtgcatcatatataaaagaaaagagaagcatatatatatatatatatggctcacttttgtggtatcagaaagcaacactgtttgtcagcataaaagataacaaaagtagcgttattttcccgccagagcacgccaagagtcttcctatcaagcctaggacacatcactacctagaggtgctagcatagcaaacactctcctctatctaatacatatataattctagcataataatataggtcgttaaagtatgttaagtttaatttggtagacgtgctagaaaaaaactactaaaaaagttctcataataaccagaaacttttaatttggtagactctaatcatcgtcaccgataatagcaattggatctatataataaattaaattacccacctctactgctgttatgagtaatatttgagctttcacaaaccatcgccattgccactctcagtttgcggccccggctcggctcactcaccatggtggtctcgccggtcgaagtgctctcgtcagactgtccgcagcggtttcctctaaatttctccctctatatcacttttttgcgtcacatcatcaacatttcatcccctattttttcatcttccgcag

SEQ ID NO: 52391 - DNA, 1184 bp, Zea Mays
gattagctccatggcggcttcgaaaaaatcaaaataaaaaactagcgccatggcggggagggataagaggcgacgagcggcgccgctcgaaggcgacgagcagcagttgcggcggaggctggaggaagcggcgctcctcctccgcaggatcaaagggcttgtgcgctggatcgtcgaagaggttgccgccggccgctccccgtctatagtgctccaccgtgcctgcagctacgacatccccgtcggcacggacgtcctctctctgctccacaaggactaccacacctcccgcctcaatgtgctcctgagggtgctgttcgtggtgcagcagctcctgcagcagaacaagcactgctccaagagggacatctactacatgtacccctccatcttcgtagaagtagcagttgttgaccgtgccatcaacgatatctgcatactcttcaagtgcagccggcacaatctcaacgtggttcctgtagtgaaaggtttggtgatgggctggataagatttatggagggcgaaaagaaagtgtattgtataacaagcgtcaatgctgctttctccattcctgttgacattgaggcaatcaaagatgttgttagtgttgcccactacatacttgtggttgagaaggagacagtgttccagcgtttggccaatgacaagttctgtgaaagaaatcgctgcattgttattacacaattggcacatgatgcaaacttgttgcgtgtccctgatatacggtggcttggagttttcacatctgattttgaagaatattgccttccagactgctgcctacttcgtttgtcacctgaagataggaggaaagctgaaggcattcttgctaggtgctatttacacagggaagccccagaatggaggtcagagttggaagcaatgctgcaaaagggtgtcaagtttgagattgaggcactatccgcaaattccatttcctttttatcgcatgagtacattccccagaaaatcaaacaaggcatgcatttataagattggacattcttgtatccgtccaggatgtgtcatagagtacaatctttttttgtctgattatagttatatccggagacatatcatgtgcaaacactaaggatctgtttcagaacataacataatatttccttaatcctaagataatatcgtggtatttgagcataac

SEQ ID NO: 52392 - DNA, 1560 bp, Zea Mays
gattagctccatggcggcttcgaaaaaatcaaaataaaaaactagcgccatggcggggagggataagaggcgacgagcggcgccgctcgaaggcgacgagcagcagttgcggcggaggctggaggaagcggcgctcctcctccgcaggatcaaagggcttgtgcgctggatcgtcgaagaggttgccgccggccgctccccgtctatagtgctccaccgatgtgctcctgagggtgctgttcgtggtgcagcagctcctgcagcagaacaagcactgctccaagagggacatctactacatgtacccctccatcttcgtagaagtagcagttgttgaccgtgccatcaacgatatctgcatactcttcaagtgcagccggcacaatctcaacgtggttcctgtagtgaaaggtttggtgatgggctggataagatttatggagggcgaaaagaaagtgtattgtataacaagcgtcaatgctgctttctccattcctgttgacattgaggcaatcaaagatgttgttagtgttgcccactacatacttgtggttgagaaggagacagtgttccagcgtttggccaatgacaagttctgtgaaagaaatcgctgcattgttattacaggaagaggctatccagatattccaacaagaagattcctgcggtaccttgttgaactgctgcatctgcctgcttattgcttagtggactcagatccttatggtttcgacattctggctacctataaatttggttccttgattcacaggttaaaattgcaggtaacgaatccatggacatgatcatatactgcacctttcgtcctaaatcaacagcttgtctggcctctttgcatttgaaagttctattactttatgaagtcccgttagcaataaggctgtgtattagagcagttcatttttcccctcaaaataaacatgattatgctcgttttgctcatcttatcacaagcatgaccaaaatatttctttttgctctttgaaacccaagattatgacatatttacttgtgttaacttaccaacctctgctacttgcgtaatttcattcttcaagcaattggcacatgatgcaaacttgttgcgtgtccctgatatacggtggcttggagttttcacatctgattttgaagaatattgccttccagactgctgcctacttcgtttgtcacctgaagataggaggaaagctgaaggcattcttgctaggtgctatttacacagggaagccccagaatggaggtcagagttggaagcaatgctgcaaaagggtgtcaagtttgagattgaggcactatccgcaaattccatttcctttttatcgcatgagtacattccccagaaaatcaaacaaggcatgcatttataagattggacattcttgtatccgtccaggatgtgtcatagagtacaatctttttttgtctgattatagttatatccggagacatatcatgtgcaaacactaaggatctgtttcagaacataacataatatttccttaatcctaagataatatcgtggtatttgagcataac

SEQ ID NO: 52393 - DNA, 1859 bp, Zea Mays
gattagctccatggcggcttcgaaaaaatcaaaataaaaaactagcgccatggcggggagggataagaggcgacgagcggcgccgctcgaaggcgacgagcagcagttgcggcggaggctggaggaagcggcgctcctcctccgcaggatcaaagggcttgtgcgctggatcgtcgaagaggttgccgccggccgctccccgtctatagtgctccaccggtaccggaactattgctcctccgccgactctgcgtccccgtccccatgaccctgggcgcgcgctcgtgcgtgattgcagtgcctgcagctacgacatccccgtcggcacggacgtcctctctctgctccacaaggactaccacacctcccgcctcaatgtgctcctgagggtgctgttcgtggtgcagcagctcctgcagcagaacaagcactgctccaagagggacatctactacatgtacccctccatcttcgtagaagtagcagttgttgaccgtgccatcaacgatatctgcatactcttcaagtgcagccggcacaatctcaacgtggttcctgtagtgaaaggtttggtgatgggctggataagatttatggagggcgaaaagaaagtgtattgtataacaagcgtcaatgctgctttctccattcctgttgacattgaggcaatcaaagatgttgttagtgttgcccactacatacttgtggttgagaaggagacagcgtttggccaatgacaagttctgtgaaagaaatcgctgcattgttattacaggaagaggctatccagatattccaacaagaaggcatgtgctctttattcattaagttcctcttgcatatttctcaaccgctatcccaattttacattctttttccatcctagattcctgcggtaccttgttgaactgctgcatctgcctgcttattgcttagtggactcagatccttatggtttcgacattctggctacctataaatttggttccttggtaggcatgatttatctgatgctgctatgctcatctatatctattgtctatgaacttaacttccttagcagattcacaggttaaaattgcaggtaacgaatccatggacatgatcatatactgcacctttcgtcctaaatcaacagcttgtctggcctctttgcatttgaaagttctattactttatgaagtcccgttagcaataaggctgtgtattagagcagttcatttttcccctcaaaataaacatgattatgctcgttttgctcatcttatcacaagcatgaccaaaatatttctttttgctctttgaaacccaagattatgacatatttacttgtgttaacttaccaacctctgctacttgcgtaatttcattcttcaagcaattggcacatgatgcaaacttgttgcgtgtccctgatatacggtggcttggagttttcacatctgattttgaagaatattgccttccagactgctgcctacttcgtttgtcacctgaagataggaggaaagctgaaggcattcttgctaggtgctatttacacagggaagccccagaatggaggtcagagttggaagcaatgctgcaaaagggtgtcaagtttgagattgaggcactatccgcaaattccatttcctttttatcgcatgagtacattccccagaaaatcaaacaaggcatgcatttataagattggacattcttgtatccgtccaggatgtgtcatagagtacaatctttttttgtctgattatagttatatccggagacatatcatgtgcaaacactaaggatctgtttcagaacataacataatatttccttaatcctaagataatatcgtggtatttgagcataac

SEQ ID NO: 52394 - DNA, 1685 bp, Zea Mays
gattagctccatggcggcttcgaaaaaatcaaaataaaaaactagcgccatggcggggagggataagaggcgacgagcggcgccgctcgaaggcgacgagcagcagttgcggcggaggctggaggaagcggcgctcctcctccgcaggatcaaagggcttgtgcgctggatcgtcgaagaggttgccgccggccgctccccgtctatagtgctccaccggtaccggaactattgctcctccgccgactctgcgtccccgtccccatgtgcctgcagctacgacatccccgtcggcacggacgtcctctctctgctccacaaggactaccacacctcccgcctcaatgtgctcctgagggtgctgttcgtggtgcagcagctcctgcagcagaacaagcactgctccaagagggacatctactacatgtacccctccatcttcgtagaagtagcagttgttgaccgtgccatcaacgatatctgcatactcttcaagtgcagccggcacaatctcaacgtggttcctgtagtgaaaggtttggtgatgggctggataagatttatggagggcgaaaagaaagtgtattgtataacaagcgtcaatgctgctttctccattcctgttgacattgaggcaatcaaagatgttgttagtgttgcccactacatacttgtggttgagaaggagacagtgttccagcgtttggccaatgacaagttctgtgaaagaaatcgctgcattgttattacaggaagaggctatccagatattccaacaagaagattcctgcggtaccttgttgaactgctgcatctgcctgcttattgcttagtggactcagatccttatggtttcgacattctggctacctataaatttggttccttgattcacaggttaaaattgcaggtaacgaatccatggacatgatcatatactgcacctttcgtcctaaatcaacagcttgtctggcctctttgcatttgaaagttctattactttatgaagtcccgttagcaataaggctgtgtattagagcagttcatttttcccctcaaaataaacatgattatgctcgttttgctcatcttatcacaagcatgaccaaaatatttctttttgctctttgaaacccaagattatgacatatttacttgtgttaacttaccaacctctgctacttgcgtaatttcattcttcaagcaattggcacatgatgcaaacttgttgcgtgtccctgatatacggtggcttggagttttcacatctgattttgaagaatattgccttccagactgctgcctacttcgtttgtcacctgaagataggaggaaagctgaaggcattcttgctaggtgctatttacacagggaagccccagaatggaggtcagagttggaagcaatgctgcaaaagggtgtcaagtttgagattgaggcactatccgcaaattccatttcctttttatcgcatgagtacattccccagaaaatcaaacaaggcatgcatttataagattggacattcttgtatccgtccaggatgtgtcatagagtacaatctttttttgtctgattatagttatatccggagacatatcatgtgcaaacactaaggatctgtttcagaacataacataatatttccttaatcctaagataatatcgtggtatttgagcataac

SEQ ID NO: 52395 - DNA, 3870 bp, Zea Mays
cgcattgcagttgctcccttcggtttctttcgtgttccccctcctcaagagcagggcaacgcccaagagtatcgtcgctgccgctgccgctgcctcgcccgcgcgcaggccgctcgctgaaattccctcttcttcctcagtgcttatccgcggcggaatccaatcacctccctcatcacgtccttctcccgagcaaagcctcccctcgcttttggcgtatgcccccgctggcgcgcccatgattcccgccgattcctccgcccgttcggtccagcaaaccttgctgctgctgctgcgctgcggctagttcggtggcggggaaagaggaggagggatcttggagtagggcgaagcggaaatgtcgtcgccgtcgaacaaccgtgggacgtgctcccggagcagctctgcgcggtccaagcacagcgcgcgggtggtggcgcagacgcccgtggacgcgcagctgcacgccgatttcgagggctcccagcgccacttcgactactcatcctcggtgggcgccgccaaccgcccgtcggccagcacgagcaccgtctccacctacctccagaacatgcagcggggccgctacatccagcccttcggctgcctgctcgccgtccacccggacaccttcgcgctgctcgcctacagcgagaacgcgccggagatgctcgacctcacgccacacgcggtcccaaccatcgaccagcgggacgcgctcaccatcggcgccgacgtgcgcacgctcttccgctcgcagagctccgtcgcgcttcacaaggccgccaccttcggggaggtcaacctgctcaaccccatcctcgtgcacgccaggacgtcggggaagcccttctacgccatattgcaccggatcgacgtcggccttgtcatcgaccttgagccgttcaacccagcagacgtgccagtcacggccgcgggcgcgcttaagtcgtacaagctcgccgccaaggccatctccaggctgcagtcgctgcccagcgggaacctgtcgttgctgtgcgatgtgcttgtccgtgaggtgagcgagctcacgggctatgaccgggtcatggcgtacaagttccatgaggatgagcacggtgaggtcatttctgagtgcaggaggtccgatctggagccgtatcttggcctgcactacccagccaccgacatcccgcaggcgtccaggtttctgtttatgaagaacaaaatgcggatgatatgtgatttctctgccactccagtgctgatcattcaggatggcagccttgcacagcccgtcagcctctgtggttctaccctcagggcttcccatggttgccatgcacagtacatggcaaacatgggttctgttgcatcgcttgtgatgtcagtcactataaacgacgatgaggaggaagatggggataccgacagtgaccaacaaccgaaaggcaggaagctgtgggggctggtcgtctgccatcatacaagcccgaggtttgtccctttcccgctaaggtacgcttgcgagtttctcttgcaagtatttggcatacagctcagcaaggaggtggaactggctgctcaggcaaaggagaggcacatcctcagaacgcaaacccttctttgtgatatgctcctgcgggatgctcttgttgggatatttacccagtcacctaatgtgatggatctagtaaagtgcgatggagctgcattgtattatcagaaccaggttttggtgctcggatcaacaccgtccgagtcagagattaagagcattgccacatggctgcaggagaaccatgatggttcaactgggctgagtactgacagcttagtggaagcgggttatcctggtgctgctgcactccgtgaagtcgtgtgtggcatggtggccattaagatctcttccaaaaattttatcttctggttccgatcacacacaacaaaggagatcaagtggagtggggctaagcatgaaccgtttgacgcagatgacaatggcaggaagatgcatccacgatcttcattcaaggccttcttggaggtggttaaatggagaagtgttccctgggaggatgttgaaatggatgctatccattctttgcagttaatattacgtgactccctgcaaggtgaagatgccaacagaaacaacatcaggtccattgtaaaagctccatctgatgatatgaagaagttacaggggctacttgaactaagaacagttacaaacgagatggtccgcttaattgagacagcaactgcccctgtcttggctgttgacattgccggtaacataaatggatggaacaaaaaagctgcagaactaacagggttacctgtaatggaagccatagggaggcctctgatagatcttgttgttgctgattctgttgaagtggttaagcagattttggactcagctttacaaggaattgaagagcaaaatctggaaatcaagcttaaaacattccatgaacaggagtgttgtggtccagttatcttgatgattaactcctgctgtagtcgggatctttcagagaaagtcattggagtttgctttgtagcacaagatttgaccaggcagaagatgattatggataagtatactaggatacaaggagactatgttgccataataaagaaccccagtgagctcatccctcccatatttatgatcaatgatcttggttcctgcttagagtggaataaagctatgcagaagattactggtatgaagagggaagacgcgataaataagttgttaattggggaggtcttcacgctccatgattatggctgtagggtgaaagatcatgctactctaacgaaacttagcatactgatgaatgcagtgatttctggtcaggatccagagaagctcctgtttggtttcttcggcacaggtgggaagtatattgaatccttgctgacagtgaacaagagaacaaatgctgagggtaaaatcactggcgctctttgctttctgcatgtggctagcccagagcttcagcatgctcttgaggtccagaaaatgtctgaacaagctgctacaaacagctttaaagaattaacttacattcgtcaagaattaaggaacccactcaatggaccagctgaaaaagattttacatgacactgatcttgaaagcattgaacagtgctatatggagacgaacacagtagagttcaaccttgaggaagctctgaatacggtcctgatgcaaggcattcctttgggcaaggaaaaacgtatttctattgaacgtgattggcctgtggaagtgtcacacatgtacatttacggggacaatataaggcttcagcaggtcattcccaagaaggaaaacattgggtctggcatgcagattgctcatttggaattcaggattgtccatccagctccaggcgttccagaggccctgatacaggagatgttccagcacaacccaggggtgtccagggagggtctcggcctgtacataagccagaagctggtgaaaacgatgagcggcacgttgcagtacctacgagaagccgacacctcttcgttcatcatcctgatagagttcccggtcgcccagctcagcagcaagcggtccaagccttcgccaagtaaattctgacactgatgctcctggaactgcagtgacggttcggccgtgtcaaattctcgggtgtagggtgtacctctggccaagtgactgatattctgaaaaacatacggacttctagtataggagaagaggaatcctaatcctagtaattatatcttagtagatatgtgcttagtctcttgttaattttttgtcttgagaggactatatatactgataaagtgataatttattcagagaataaagaatgggctccatgctttgtcta

SEQ ID NO: 52396 - DNA, 1973 bp, Zea Mays
tgttcattctctagttgctcttcgttcttccccagcgtttgtcatcgccacggcttctccagagtctgttgactgtgccggaccgacgagataagtcatcagatgacgtgagaagcagtcaggcgttggtgcttgcttatatagctgcgctgcctgcgcattcacgccacagcgtcctcccctccccgtcctccctcttcttcacaccactcacagctcacaggtcctccccctcctcctcccgggctgccattgctgccgcccggccagctgattcaagatgccgaccatcatcgtctcggtggacctggaatgcagccgctgccgtgccaagatcgagaaggtgctcaacaggatccaaggtgtgtttgcgcttgcagctccgctctgttcgtactgccttgccttcctccacctgtggactggtggtgtcgcgctggttccgttgatggcaactgatactgactgagcggtgggtgtttctttctttctttctttcttgggacgatatggatgccgccgcggttccgtcgttgctgtgcgcaccgtgggtccgcgccgcggccagagaagggtgagttctgcatcgacgacatcgacttggacgagaagagcaacaaggtgaaggtgacggggcccttcgacccggacaagctcgccgacaagctgtgctgcaaggcgtgcaagatcatcaagcagatcgagatcgtggagccgccgccgccgccgccggagaagcccaagaaggaggaacccgccccgccgccgccgaagaagaaggaggagccggccccgccgccgccggcgaaggtcgagccgccaccgaaggagaagcccccgccaccagcaccgaaggaggagccaaagcccgccccggcgccggcgccgccgcccaaggtggtggaggtcccctacccgtggccgtacccgtgcccgtacccgtacccggcgtggccgtccgactgctgctgccaccacgggcacggcggctgccactgctgctcctgcggcaaggcccccgaggccccggcgccgcccccgatgccgcagtacgtgccccagccgtacccctgcggcggcggcggcggctaccggatcgtctgcgatgaggacccctcctacgcctgcgccatcatgtgattcattgtcccgttacgcgcccacaacccaccacaccagtgtcagtcatctcgtcatgccgtgccgtgccgtgcctcccgtataatcgccgtacagattcatcatacacacacacacactcatattatatatatatacacagcatcatgtataccgtacgtacgtccgtacctgtaccgtctccttagcttgcgtgttatgttgtgcttcaattaagtacggagtatcatatagtagtacatatatgttaggcaaagtgagagaataaaataagcgatgatgatgttggttttccgtgtataaagaagaagaaaaaaaaaaagacaaggcgagagtgagagagttggcgtgttggtggcagcagaaatgtcaattttgcgcagcagcctccctttctttatgttgcgccaagaggtggtgaaaaaacggggggggggtcctttttatcgacgctttcgacgacctccactttcgttatctcgcttccatttccatctgtggggacgagcgatgtgacgtggccatttctgtttagatcatgtaaagataggaggaagacgatgttgaaggggtgcatgactgggcgggcgttgctaggctaggctaagggcctgtttgtttacccccatggattatataatctggattatttttggaggattatataatctggattatataatctggattatataatctcggtagtcctgtttgtttacccagattatttgagttgttaatatgattcttttgtatgagaaagacaagaatgccctctatatttgtactaggttgaaactcatatatgaaaaaaaaaatcaattgacattgac

SEQ ID NO: 52397 - DNA, 1826 bp, Zea Mays
cagccctgcaactgcgaaccgcggctgcaccatcagcgtcacgaaacgaaccgtgtgtatctgttgttcattctctagttgctcttcgttcttccccagcgtttgtcatcgccacggcttctccagagtctgttgactgtgccggaccgacgagataagtcatcagatgacgtgagaagcagtcaggcgttggtgcttgcttatatagctgcgctgcctgcgcattcacgccacagcgtcctcccctccccgtcctccctcttcttcacaccactcacagctcacaggtcctccccctcctcctcccgggctgccattgctgccgcccggccagctgattcaagatgccgaccatcatcgtctcggtggacctggaatgcagccgctgccgtgccaagatcgagaaggtgctcaacaggatccaagggtgagttctgcatcgacgacatcgacttggacgagaagagcaacaaggtgaaggtgacggggcccttcgacccggacaagctcgccgacaagctgtgctgcaaggcgtgcaagatcatcaagcagatcgagatcgtggagccgccgccgccgccgccggagaagcccaagaaggaggaacccgccccgccgccgccgaagaagaaggaggagccggccccgccgccgccggcgaaggtcgagccgccaccgaaggagaagcccccgccaccagcaccgaaggaggagccaaagcccgccccggcgccggcgccgccgcccaaggtggtggaggtcccctacccgtggccgtacccgtgcccgtacccgtacccggcgtggccgtccgactgctgctgccaccacgggcacggcggctgccactgctgctcctgcggcaaggcccccgaggccccggcgccgcccccgatgccgcagtacgtgccccagccgtacccctgcggcggcggcggcggctaccggatcgtctgcgatgaggacccctcctacgcctgcgccatcatgtgattcattgtcccgttacgcgcccacaacccaccacaccagtgtcagtcatctcgtcatgccgtgccgtgccgtgcctcccgtataatcgccgtacagattcatcatacacacacacacactcatattatatatatatacacagcatcatgtataccgtacgtacgtccgtacctgtaccgtctccttagcttgcgtgttatgttgtgcttcaattaagtacggagtatcatatagtagtacatatatgttaggcaaagtgagagaataaaataagcgatgatgatgttggttttccgtgtataaagaagaagaaaaaaaaaaagacaaggcgagagtgagagagttggcgtgttggtggcagcagaaatgtcaattttgcgcagcagcctccctttctttatgttgcgccaagaggtggtgaaaaaacggggggggggtcctttttatcgacgctttcgacgacctccactttcgttatctcgcttccatttccatctgtggggacgagcgatgtgacgtggccatttctgtttagatcatgtaaagataggaggaagacgatgttgaaggggtgcatgactgggcgggcgttgctaggctaggctaagggcctgtttgtttacccccatggattatataatctggattatttttggaggattatataatctggattatataatctggattatataatctcggtagtcctgtttgtttacccagattatttgagttgttaatatgattcttttgtatgagaaagacaagaatgccctctatatttgtactaggttgaaactcatatatgaaaaaaaaaatcaattgacattgac

SEQ ID NO: 52398 - DNA, 423 bp, Zea Mays
tttttttttaatactaatggatcgtttgagcacaagtttgaagtttcagcatttgcagctcccacagggacgaaatatgaaaaacctaagcacaatcaccgatccctttggcttcaccttcctaagcagcagctgccggcgtggcccatgcaagacaatggctggcagtagaataatctaatccacaagaccacaagggccagtttcgcttccgtaaaaagtgtcgatccagcgcaagtgcacggtcgcttgtacgatacccaaggctgctcctgttgccatgcatgctgcactgactggcagtctggcacaacatcaccaagaacggcggggcgggaactccaagaacaggccgagtgatcgttggcagttttgctattggcagcgcatggacgaggagctggagctggaggagacgctgcg

SEQ ID NO: 52399 - DNA, 2562 bp, Zea Mays
gtcctagacccgagtggacccgagtggctgagtccacctctgatgctctgacctccgcctcctcctttctctcgtcgtcgtctccacgacacctcaaccccaatcagaacccggacccagatctctaaaaaatccccaatcccaatctgccgtacgccgttgcgatcatacctccaaatccgcccccaagtctgttcgatgcgaatagcacctgcgatttagcgaaccgtgcgctcgctaggtttagggtttcgagggtttgcgttagggtttgggcgcacgatggggcggtcgcgaggggtgctgagttccggcgacgacgacaccgggcacaggtcgaagcggaggagagtctcgtcgggcggggatgcgacggactccatttcagcctccatcgggggagctggagagggagggggcaagaaggcgctctatcactgcaactactgcaacaaggacatctccgggaagatacggatcaagtgctccaagtgccctgacttcgacctttgcgtggagtgtttctctgtcggcgctgaagtcaccccgcaccgcagcaaccatccttacaaagtcatggacaacttgtctttcccacttatttgcccggattggaatgcagatgaagaaattctcctccttgagggaattgaaatgtatggtctgggaaactggcttgaagttgcagagcatgttggtaccaagtctaagttacagtgtattgatcattacacatcagcatacatgaactcaccttgttatcccctcccggatatgtctcatgttaatggcaagaataggaaggaacttctagctatggctaaagtacagggtgagagtaaaaaagggactttgctgttacctggagaactcactcctaaggttgaatctcaattttctccctccagggtcaaggtggaagatgcacttggagaaggtccagcaggtcgatcaccttcacacatggctgttggtgcaaataaaaaagcttcaaatgtgggacatattaaggatggcgctactgtatcaaaagtcgaagatgttcatgtagatagaagtgttggtgtgaagaagcccagatattctgcagatgaaggcccttcgttgactgaactgagtggatacaatgcaaagagacatgagtttgacccagaatacgataatgatgccgaacaagctcttgctgagatggaatttaaagaaactgattcggaaactgatcgtgaactgaaactccgtgtgctgcgtatttacctctccaggcttgatgaaagaaaaagaagaaaggagttcatattggaaagaaatttgttgttccctaatcccttggagaaggatcttacgagtgaagacagggaactttaccatcgctataaagtcttcatgcgttttctttctaaggaggaacatgaagccctcgttaggagtgttattgaggagcgaaaaattcggaggagaattcaagaactccaggaatgccgttctgctggatgccgcacactggctgaagcaaagatacacatagagcaaaagaggaaaaaagaatacgagctgaatgcgcaaaaagctaaggatagcagtcaacttaatgcaaataataaatcagtacaaaagatgaatcgacctatgaaaattgagtccgatgggaatttggatccaaagaaaggtggtgctggcttggattctcctaagacaacaggacctacaagtgttaagcagtgggatgactgggatatagttggtcttcctggggcagagctattaagtgctagcgaaaagcttctatgctgtcagaacagattgctacccagccattacctgagaatgcaggaggtgctgatgcaggagatattcaagggtagcgtcctaaagaaggaagacgcccacgtcttatttaaggaatttcatgcagttagttttctctggggatccctctgggagactcttgaagtttaacccacagacaaaggaaacaacagtactgcatcgtaacctccaatttcccaatggtgtgtccatgagcaaggacggttcgttcttcgttttctacgaaggatcgcgtggcaggttgagcagatactggttgaaaggtgagaaggctggcactgtggatcttttcgctatcttgcctggattcccagacgaacgagaagggcgagttctgggtggcgatccactgccggagaagcctatcggtggcaagctccacgcggtgatcatcaagtacagcccagagggtcaggtgcttgatatcttggaggacaccaagggagaggtcaggagaaggacgggaagctctggatagggtccgtcctgatgccgttcatcgctgtctttgatctcacgatgagtggttagggtgagtggttagggtgtatttggttggatgtatatagtgggatgagagagactgaccatagtttttatagtgtttgaatgagagttacataaggacgatgttaacaccggagtagtttttggtggcgacgtgatctaaaaaatcaagacaacactcgtcctatctcattttgacctcaaaccaaatacatcctcagccgcgtc

SEQ ID NO: 52400 - DNA, 3582 bp, Zea Mays
attcgaatttcgaacgccgccggtcgctccctgttccctagctctctcctccgcggctccgcctccggcctccacggtttcgcaggcagagatgaagaaggcgtccgcggcgtcgcgctacgcggcctacgactccccgtccccttcgccgcgccgcgcggcgccttccgcggccgccgcgaccccgggagcagcgcacggcagcagccgcgccctggtggtcgcggggagatccggccgcgatctactgggcgccaagccgcaagcccacggcaacctaggctccgtgctacggcggctcatctccatggacaagaagccgccttcctccaagaaccagctcccggttccccctgccgccgccgccgcagcagcagcagcagcgaagaacaacggtggcgggaagctgccggggctgtcgcggaagttgttccagaaagcctcgtccaccgaggcggcggcgcccaggaagacgaaggccctgatggaagtcaagaacagcggcaacaacgccaacacgcggacgctcggcatggtgctgcgcagcgagcgggagctcctggcgcagaccagggcgcaggaggacgagatcgccgcgctccgcctgcagctcgagaacaaggaccgggaggtggagcggctcaaggacctatgcctgcggcagcgggaggagatcaggacgctcaaagacgccgtcctgttcccggacgtggagccggagccagagcccgaccgccgcctccgacacgagatttccacgctcaccgaccagatccagtgcctcgcgcaggaggtcgcccaggttaaggccgagaagcactcggcaaggtcgtgctttgacgaggatggatacttctcttcccctaggacgcctgggtttaacgaggagaccgctttctctctggagtgcagcattggggaagctgagacgccgaactacggtagcccagacgaaatgttcagcaaggatcttaatccttgcttgaccccgtgcattgccaagagcagatctgatgtatccgcacaattccagtcgtcttcctcccagttcacaaaggaatctagcggttctcgtcgcagcagcggcaaggaaagagcagaccgctcttatggttcttttggcaggccaatgtcaaagagctctgaccatcacaagccggccgcctcaggaagcagcaacaagcgacgagtatacagatccgatcaagacaaaatcaatcagaacctgttttgagttcaccatcgtcatcagcttgccagtgaaggtagcctccagcttctactaggtgaaatatttataagcatgtggactttttatggtccgtcgataccggtgctcgtgatctgtcagtgaatgaaacctttggtttgtgctttttttgtgttatgctctagcttgcccagctatttggaatggaatgccagtttggctctgctatgtcatcgataggtgaatatttggcttctcatgttctccgttctctcacgaatcacgatggcggctccaacatccgtcggtgcgagtgcgcggtcgtcgggtcgaagcggaggagagtctcgtcgggcggggatgcgacggactccatttcagcctccatcgggggagctggagagggagggggcaagaaggcgctctatcactgcaactactgcaacaaggacatctccgggaagatacggatcaagtgctccaagtgccctgacttcgacctttgcgtggagtgtttctctgtcggcgctgaagtcaccccgcaccgcagcaaccatccttacaaagtcatggacaacttgtctttcccacttatttgcccggattggaatgcagatgaagaaattctcctccttgagggaattgaaatgtatggtctgggaaactggcttgaagttgcagagcatgttggtaccaagtctaagttacagtgtattgatcattacacatcagcatacatgaactcaccttgttatcccctcccggatatgtctcatgttaatggcaagaataggaaggaacttctagctatggctaaagtacagggtgagagtaaaaaagggactttgctgttacctggagaactcactcctaaggttgaatctcaattttctccctccagggtcaaggtggaagatgcacttggagaaggtccagcaggtcgatcaccttcacacatggctgttggtgcaaataaaaaagcttcaaatgtgggacatattaaggatggcgctactgtatcaaaagtcgaagatgttcatgtagatagaagtgttggtgtgaagaagcccagatattctgcagatgaaggcccttcgttgactgaactgagtggatacaatgcaaagagacatgagtttgacccagaatacgataatgatgccgaacaagctcttgctgagatggaatttaaagaaactgattcggaaactgatcgtgaactgaaactccgtgtgctgcgtatttacctctccaggcttgatgaaagaaaaagaagaaaggagttcatattggaaagaaatttgttgttccctaatcccttggagaaggatcttacgagtgaagacagggaactttaccatcgctataaagtcttcatgcgttttctttctaaggaggaacatgaagccctcgttaggagtgttattgaggagcgaaaaattcggaggagaattcaagaactccaggaatgccgttctgctggatgccgcacactggctgaagcaaagatacacatagagcaaaagaggaaaaaagaatacgagctgaatgcgcaaaaagctaaggatagcagtcaacttaatgcaaataataaatcagtacaaaagatgaatcgacctatgaaaattgagtccgatgggaatttggatccaaagaaaggtggtgctggcttggattctcctaagacaacaggacctacaagtgttaagcagtgggatgactgggatatagttggtcttcctggggcagagctattaagtgctagcgaaaagcttctatgctgtcagaacagattgctacccagccattacctgagaatgcaggaggtgctgatgcaggagatattcaagggtagcgtcctaaagaaggaagacgcccacgtcttatttaaggtcgatcctaccaaagtagatagtgtttatgatatggtatctaaaaaactgggcaaccatgaggaggccccaaccgtctagcttacgcttttgagcttgcctgctgtgacatgccgaaggaaacaaatcttggtctggcccttcgcagcgtgtctgaatcagggctgaaggtggtggaaccatactaaatcgaatcggccatagttagctgaaattcatatcagctgtcagtagcacagtaaggcattcccgccaagctgtaaaattattgccccgacgagaatgtgtagcatgaatttgaatttcttttctgctattgctgtgtactgttgcagggtagtgccttattgtagtatatgtataggtgcctgagttttatgtatcatcgtgtatgtaccatttgggcgctctatttatgccattgtaccaaccccaaacatcgattattataattcatctcgcagccaaattcttgtctct

SEQ ID NO: 52401 - DNA, 3666 bp, Zea Mays
attcgaatttcgaacgccgccggtcgctccctgttccctagctctctcctccgcggctccgcctccggcctccacggtttcgcaggcagagatgaagaaggcgtccgcggcgtcgcgctacgcggcctacgactccccgtccccttcgccgcgccgcgcggcgccttccgcggccgccgcgaccccgggagcagcgcacggcagcagccgcgccctggtggtcgcggggagatccggccgcgatctactgggcgccaagccgcaagcccacggcaacctaggctccgtgctacggcggctcatctccatggacaagaagccgccttcctccaagaaccagctcccggttccccctgccgccgccgccgcagcagcagcagcagcgaagaacaacggtggcgggaagctgccggggctgtcgcggaagttgttccagaaagcctcgtccaccgaggcggcggcgcccaggaagacgaaggccctgatggaagtcaagaacagcggcaacaacgccaacacgcggacgctcggcatggtgctgcgcagcgagcgggagctcctggcgcagaccagggcgcaggaggacgagatcgccgcgctccgcctgcagctcgagaacaaggaccgggaggtggagcggctcaaggacctatgcctgcggcagcgggaggagatcaggacgctcaaagacgccgtcctgttcccggacgtggagccggagccagagcccgaccgccgcctccgacacgagatttccacgctcaccgaccagatccagtgcctcgcgcaggaggtcgcccaggttaaggccgagaagcactcggcaaggtcgtgctttgacgaggatggatacttctcttcccctaggacgcctgggtttaacgaggagaccgctttctctctggagtgcagcattggggaagctgagacgccgaactacggtagcccagacgaaatgttcagcaaggatcttaatccttgcttgaccccgtgcattgccaagagcagatctgatgtatccgcacaattccagtcgtcttcctcccagttcacaaaggaatctagcggttctcgtcgcagcagcggcaaggaaagagcagaccgctcttatggttcttttggcaggccaatgtcaaagagctctgaccatcacaagccggccgcctcaggaagcagcaacaagcgacgagtatacagatccgatcaagacaaaatcaatcagaacctgttttgagttcaccatcgtcatcagcttgccagtgaaggtagcctccagcttctactaggtgaaatatttataagcatgtggactttttatggtccgtcgataccggtgctcgtgatctgtcagtgaatgaaacctttggtttgtgctttttttgtgttatgctctagcttgcccagctatttggaatggaatgccagtttggctctgctatgtcatcgataggtgaatatttggcttctcatgttctccgttctctcacgaatcacgatggcggctccaacatccgtcggtgcgagtgcgcggtcgtcgggtcgaagcggaggagagtctcgtcgggcggggatgcgacggactccatttcagcctccatcgggggagctggagagggagggggcaagaaggcgctctatcactgcaactactgcaacaaggacatctccgggaagatacggatcaagtgctccaagtgccctgacttcgacctttgcgtggagtgtttctctgtcggcgctgaagtcaccccgcaccgcagcaaccatccttacaaagtcatggacaacttgtctttcccacttatttgcccggattggaatgcagatgaagaaattctcctccttgagggaattgaaatgtatggtctgggaaactggcttgaagttgcagagcatgttggtaccaagtctaagttacagtgtattgatcattacacatcagcatacatgaactcaccttgttatcccctcccggatatgtctcatgttaatggcaagaataggaaggaacttctagctatggctaaagtacagggtgagagtaaaaaagggactttgctgttacctggagaactcactcctaaggttgaatctcaattttctccctccagggtcaaggtggaagatgcacttggagaaggtccagcaggtcgatcaccttcacacatggctgttggtgcaaataaaaaagcttcaaatgtgggacatattaaggatggcgctactgtatcaaaagtcgaagagatatgctttctcaagaacgtctttttctgtaatttgagttctattaagaaatgaaatggtgatagtctcacgttacgacatgatgttcatgtagatagaagtgttggtgtgaagaagcccagatattctgcagatgaaggcccttcgttgactgaactgagtggatacaatgcaaagagacatgagtttgacccagaatacgataatgatgccgaacaagctcttgctgagatggaatttaaagaaactgattcggaaactgatcgtgaactgaaactccgtgtgctgcgtatttacctctccaggcttgatgaaagaaaaagaagaaaggagttcatattggaaagaaatttgttgttccctaatcccttggagaaggatcttacgagtgaagacagggaactttaccatcgctataaagtcttcatgcgttttctttctaaggaggaacatgaagccctcgttaggagtgttattgaggagcgaaaaattcggaggagaattcaagaactccaggaatgccgttctgctggatgccgcacactggctgaagcaaagatacacatagagcaaaagaggaaaaaagaatacgagctgaatgcgcaaaaagctaaggatagcagtcaacttaatgcaaataataaatcagtacaaaagatgaatcgacctatgaaaattgagtccgatgggaatttggatccaaagaaaggtggtgctggcttggattctcctaagacaacaggacctacaagtgttaagcagtgggatgactgggatatagttggtcttcctggggcagagctattaagtgctagcgaaaagcttctatgctgtcagaacagattgctacccagccattacctgagaatgcaggaggtgctgatgcaggagatattcaagggtagcgtcctaaagaaggaagacgcccacgtcttatttaaggtcgatcctaccaaagtagatagtgtttatgatatggtatctaaaaaactgggcaaccatgaggaggccccaaccgtctagcttacgcttttgagcttgcctgctgtgacatgccgaaggaaacaaatcttggtctggcccttcgcagcgtgtctgaatcagggctgaaggtggtggaaccatactaaatcgaatcggccatagttagctgaaattcatatcagctgtcagtagcacagtaaggcattcccgccaagctgtaaaattattgccccgacgagaatgtgtagcatgaatttgaatttcttttctgctattgctgtgtactgttgcagggtagtgccttattgtagtatatgtataggtgcctgagttttatgtatcatcgtgtatgtaccatttgggcgctctatttatgccattgtaccaaccccaaacatcgattattataattcatctcgcagccaaattcttgtctct

SEQ ID NO: 52402 - DNA, 2792 bp, Zea Mays
tttttctattagatattcagaaaattatcggatcagctcacccaacggtgatagcttggaaaactagatcgtacagtattttttttgtcttgtatagaagtattaaaaaaagattagcaacgtctatctcgcgttgcatctgccattgtgtcctactactgaccgttggctgcctcgccgaaaagccgccgaccactgaaaagaaaaacgaggcagcagcgcgacatggcgctcacgttgtctcccatccccacctaaccccgttgccggacggatcccggccgtcggttcctcgacgggcggcgggacgcgtcccccgattcgaacgttggggggtttattggtattctattcaacgagccgccctggcgcacactctgctctgctcagctgctcccgcttgtccgttgccgcggccgtccccggagccggagcccgcccgttccttcgtctccggctataaaatcactgcgtccgccatggcgtctcccaccaccacctgctgcagcgctctcctccccctccgcttcttcgtcttcctcggtcctccgtccgccattgttgcttgcgcaagcaggtccggaggcgcctcgtcccgctcctacgccgccacaggatggcgctgctcacggcgccggcggtggccgcgctgctgctcttcttctggtccgcggccgcgcagggcgtgccgccgtacaaggacgccagcaaggacgtggaggtccgcgtcagggacctcctggcccggatgacgctggccgagaaggtcggccagatgacgcagatcgagcggctcgttgcgtcgccgcaggtgctcagggactactacatcggcagcctgctgagcggcggcgggagcgtgccgcggaagcaggccacggcggcggagtgggtcgccatggtcggcgacttccagagggcctgcctgtccacgcgcctcggcatcccgatgatctacggcatagacgccgtgcacggccacaacaacgtgtacggcgccaccatcttcccccacaacgtcggcctcggagccaccagggatcctaatctggtgaagaggatcggcgccgccaccgcgcttgaagtgagggccaccggcatccagtacgcgttcgctccttgcattgctgtgtgccgtgatccgaggtggggccggtgctacgagagctacagcgaggaccgccgtctcgtgcagaacatgactgagctcatcccgggactgcagggcgacgtcccgcagaatttcaccagcggcatgcccttcgccgccggaaagaacaaggtggcggcgtgcgccaagcacttcgtcggcgacggtggcacccacgacggcatcaacgagaacaacaccatcatcgaccgcaagggcctgatgagcatccatatgccggcctacctggacgcgctccgcaagggcgtctccacggtcatgatctcctactccagctggaacgggctcaagatgcacgccaaccacaacctcatcacaggcttcctcaagggcgagcacaagttccagggcttcacgatctcggactgggaaggcatcgacaggatcaccagccctccaggggcgaactactcctactctgtgcaggcttcaattcttgctggcattgacatgatcatggtgccaaacaactaccaagacttcatcaccatcctgaccggtcacgtgaacagcggcctgatcccgatgagcaggatcgacgacgccgtgacgaggattctgcgcgtcaagttcaccatgggcctgttcgagaaccccatgccggaccctagcctcgccgaccagctggggaagcaggagcacagggacctggcgcgggaggcggtgaggaagtcgctggtgctcctcaagaacggcaagcctggcgacgcgccgctgctgcccctgcccaagaaggccgccaagatcctggtcgccgggagccacgccgacaacctggggtaccagtgcggcgggtggacgatcgagtggcagggcgacacgggccgcatcaccgtcggcaccacgctcctggacgccgtgaaggcggccgtggacccgtcgacggcggtggtgttcgcggagaaccccgacgcgggcttcgtcaggaacggcggcttctcgtacgccatcgtggccgtgggcgagcacccgtacacggagaccaagggcgatagcatgaacctgacgatcccggagcccgggccgagcaccatccagacggtgtgcggcgccgtgccctgcgcgaccgtgctcatcagcggccgccccgtggtgatacagccgttccttggcaccgtgcacgcgctcgtggcggcctggctgccgggaagcgaaggccagggcatcaccgacgtgctcttcggggactacggcttcacggggacgctgccgcggacgtggttcaagtcggtggaccagctgccgatgaactacggcgacgagcactacgacccgctgttcccgctcgggttcgggctcaccacacagggcaagaaggggtgctagaagaagacggggtggggggtggtacttggtagagataggaaattggattaaacagtgctctggcgaggggacatgaactggggagttcttgtttccttgttttatgtcgattaattttgttgtatgctcctcacttgcgctaataagttttttttttggttatataccggagttcaaattatttaccgccgtgttatccgaattagaaacatttcaatcctcttaaacatatcttgacaagtgtatgagcaaaagtcgagtttttgagcaaaagaacaaaaagtaaataaaaaat

SEQ ID NO: 52403 - DNA, 1787 bp, Zea Mays
gttcgctgctgctgttcgcctctgcccaccaactgttcgttattttcccagagaggatactaatggatagattcgttgatgacaaaatgatagctactgttccatagatatgtggcgctgaaggtgcagaagagcgctcaacactacacagaagcagccatggatgaggtcaagatcttgaagcagattgctgatggtgatcctgacgactcaaaatgtgttgttaagcttcttgatcacttcaagcactcggggcctaatggtaaccatgtgtgcatggtttttgagtttctcggtgataacctgttgaccctgataaagtacacggactatcgtggaattccccttccgatggttaaggagatatgccgccatgtgctcattggccttgattacctccaccgtacactttctattattcacactgaccttaaaccagagaacatattgcttgtgtctaccattgatcccacaaaggaccctcggaaatcaggcgtacccctagttccgccttcaatgaggacagacgagccacctcctaaggtgcctgcacaatcaggaaatggtggcctcaccaagaaccagaagaagaagatccggaagaaagctaaacgtgcagttgctgcaacttcagaaggaagtagtgctgtggcatctgcggacacagatgggtcagatgaccgaggagatctgggtacaacaaatgagggtagtcctagacaggatggagctaagaagcgggtgacacgagataggcgcggtagcaaaggggccaagaagatgatggcaatgaaggctgatctaaaatgcaagctggttgactttggaaacgcatgttggacatacaagcagttcacaaacgacattcaaacaaggcagtacagatgtcctgaggttatacttggttccaagtattctacatctgctgacatgtggtcctttgcatgcatttgctttgagcttgccactggggatgtgctattcgatccacatagtggcgataattttgacagagatgaggatcacctcgcgctgatgatggagctgctaggaatgatgcctcgaaagattgcgttgggtggtcggtattcacgtgatttcttcaatcggtatggggatttgcggcacatccgacgcttgcggttctggcctctcaacaaggtgctgatggagaagtacgagttcactgaaataaatgctaatgggatggcagattttcttgtcccaatacttgattttgttcctgagaagcgccctacagctgctcaattgcttcagcatccatggcttgatgttggtcccctccgacagcaacctaaaacacggccagagtcagcacggagtccaggtgatggtgtttcagagaagcaaaagaaagagaaagaagaaagagaggcaatggccgtagagttagggaacattgccatagatggtgcttcttccaggatggcaaatgacccccaatcaagcacaaataaaacaaccgctacctcttctaagaagtgagctgcatttgatttcatgagttaagctgtaaaacttgttttcattcgagaattgctccatgagtgggaaacatatgtttttttttaggtttgagatatgttaggatagctaccgagggaaaagaacagtaggctaaatatttgttgtatggggttgggtggacaaggttagatttgtcggggttgcagtaaccctagcccttttctttgagaacatattcttttgtacaattagaatccgcgatttgtttaatggtagcattgagcaactggaaacccgag

SEQ ID NO: 52404 - DNA, 2181 bp, Zea Mays
ggaagaccctacgatacgaccactgagagccgactcctgctcctattatccgcctcgctcctcagggcggagaggaggcaaagaggaaggaagcgccgcgggagcgccagacagacagacgaaccgagcaccaccgccactagaaaaagccagcccaaaaccctagctccggcgcgccaccgcgcagatccagtgctcccgcgcgatgtcggaggcggaagcggcggggtcgttgtcgaggcggcgaatggaggacgaggagggggcggcggcgatggaggcggatgcggcgcacagcgggaggggcgaggcggaggatgaggaggtcgagagcagcgactacacgtcggaggacgagggcaccgaggactaccgtcgtggtggataccatgccgtccgcgtgggagactccttcaagcagggcgcctacgttgtgcagtacaagctcggatggggccacttctccaccgtatggcttgcctgggacacagtccactccagatatgtggcgctgaaggtgcagaagagcgctcaacactacacagaagcagccatggatgaggtcaagatcttgaagcagattgctgatggtgatcctgacgactcaaaatgtgttgttaagcttcttgatcacttcaagcactcggggcctaatggtaaccatgtgtgcatggtttttgagtttctcggtgataacctgttgaccctgataaagtacacggactatcgtggaattccccttccgatggttaaggagatatgccgccatgtgctcattggccttgattacctccaccgtacactttctattattcacactgaccttaaaccagagaacatattgcttgtgtctaccattgatcccacaaaggaccctcggaaatcaggcgtacccctagttccgccttcaatgaggacagacgagccacctcctaaggtgcctgcacaatcaggaaatggtggcctcaccaagaaccagaagaagaagatccggaagaaagctaaacgtgcagttgctgcaacttcagaaggaagtagtgctgtggcatctgcggacacagatgggtcagatgaccgaggagatctgggtacaacaaatgagggtagtcctagacaggatggagctaagaagcgggtgacacgagataggcgcggtagcaaaggggccaagaagatgatggcaatgaaggctgatctaaaatgcaagctggttgactttggaaacgcatgttggacatacaagcagttcacaaacgacattcaaacaaggcagtacagatgtcctgaggttatacttggttccaagtattctacatctgctgacatgtggtcctttgcatgcatttgctttgagcttgccactggggatgtgctattcgatccacatagtggcgataattttgacagagatgaggatcacctcgcgctgatgatggagctgctaggaatgatgcctcgaaagattgcgttgggtggtcggtattcacgtgatttcttcaatcggtatggggatttgcggcacatccgacgcttgcggttctggcctctcaacaaggtgctgatggagaagtacgagttcactgaaataaatgctaatgggatggcagattttcttgtcccaatacttgattttgttcctgagaagcgccctacagctgctcaattgcttcagcatccatggcttgatgttggtcccctccgacagcaacctaaaacacggccagagtcagcacggagtccaggtgatggtgtttcagagaagcaaaagaaagagaaagaagaaagagaggcaatggccgtagagttagggaacattgccatagatggtgcttcttccaggatggcaaatgacccccaatcaagcacaaataaaacaaccgctacctcttctaagaagtgagctgcatttgatttcatgagttaagctgtaaaacttgttttcattcgagaattgctccatgagtgggaaacatatgtttttttttaggtttgagatatgttaggatagctaccgagggaaaagaacagtaggctaaatatttgttgtatggggttgggtggacaaggttagatttgtcggggttgcagtaaccctagcccttttctttgagaacatattcttttgtacaattagaatccgcgatttgtttaatggtagcattgagcaactggaaacccgag

SEQ ID NO: 52405 - DNA, 3102 bp, Zea Mays
agcccaggcacacacgactagaaccaggcaaccagctgcggagggaggaaacctagcggaacactgtgcaggtgacggcggcgcgctaccggtgacaggggatacggcggcatcgtcccctcctccatccccggcgcggcggcgccagcagccggcctgcaggcacacaagtggccacccttccaatggcggtggagaagtccagcagcggcacatcaactccctccaccacctccaccatggaccggtttcagaagattgtcctaagctgggattacctccgtctcatcgctgaatccaagggcggcaagcaggccaaggtgctgcagcatgtgaagaacacatacgtctcggtggctgagtaccttggtgtctttgagccactgctctttgaggaggtcaaggcacagatcatccagggacgcagtaacgacgaggaagaatctgggatggactggaggaggggagcagtggggtcgtgcacggagtctgaggggttccacaagctctctgtggcggtggaagacaattttcaggataatgtgtcagagaatgatctactgcttatctccaaggagaaatttgaggagggatcgacccctaatgcatatgcatttgcattagtggagcagcgaggtggtggcatacatatttcacttagaacttttgtggcaggtgaaattcaaaatctgaatgttgcaaagcctgtgaagtctacaaggctgcaacattttgcttccattattgcaagtcaaaacagcttgctgtggatactgaaggtctgcagcttgtctacaataatgcgggagttcacagctatgcattccgtagcttctctaccttttaaggatttgattctttcagctaccgaggcgcacaaggatggtgatgatcaaagtcgtgcgtggaatgtccctgagccacttatggattatctcaaagtgaatcttaatgattcccagctagaagcagttaatgcaggtctttcacgcagatcctttgttcttattcagggccctccaggaacaggaaagacacaaactattcttggactccttagtgccgttctccattctgctcctgcaagaatgcagatcaaaggaggatttgatgttctaaaacatgggccagaactggacattgatggcaagcgtgcacactggataaaggcatctccttggttacttggtgcaaatcctcgagatctgattatgcctgttgatggtgatgatggattttacccaacgggaaatgaactggaattcgagatgaaaataacaacacttataaccctaaaattgtgcgcattggagtgaaggcccttcattctgttaaagcagtttctatggattatcttattcaacaaaaactttctggtgtagatcgcacattagatggtgggagacgaggtgctggtgaatatgatcggattagagcttcaatactggacgaagcagccattgtattttctactctgagtttcagtggatcatcaatttttagcaggatgacccgtgcttttgatgttgttataattgatgaagctgcacaagcggtggaacctgcaactcttattcctttgatccatggctgcagacaaatttttcttgttggtgacccagttcagttgcctgcaactgtcatttcacagactgcacagaagttgggatatggaacgagcttgttcaaaagatttcaagctgccggttttccagtgcaaatgcttaaaatccaatatcgcatgcatccagagattagtacattcccttcaaaagaattttatgaaggggtactacaagatggggagggcctgagcaggaaacgtccatggcattcctacagctgcttcggaccattttgtttctttgacgttgatggcattgaatcccaaccatctggaagtggttcttgggtaaaccaggatgaagtggaattcataactctcctgtaccaccaattggcattgcgctatccagagctcaaatctagtcctgaagtgggtgttatatcaccatacaggcatcaagtaaaactattgaaggacagttttcgatcaacctttggggatcaatcaagggaattgatagatgtaagcacagttgatggattccagggacgtgaaaaagaaatagtcattttttcatgtgtaagatgcaataaggaacaaaagattggctttgtttctgattttcgacgaatgaatgttgccattacaagagcaaaatctgctgtactggttgtaggttctgcttcaacattgaagcaagataaacactggaacaaccttgttgagagtgccaaggagcgaaactgcttattcaaggtccccaagccattgaccgcattctttgcagaggataacctgaagactatgaaggtggaaaggcgtcctccgccagagctgaatgctcgagtactggaagagatcaaccaagaagttgtaaggcaggagctcatgaatgtcgatgatgctgccgaccatgcagacgcaggggacgacgatgatgctgatatggatgctgacgatggaggcggcgatgattgattgtaagattcaaaggcttgggtggcctaggtagagcatttacgtagactactggtatacaagaggagtcggttttcttgggtagacgtagtgattgctgagggttgaaaaaaaatggaagcgatgattcttttctcttatctaattatggggagaagctgactatcgtagagtgcaccaccaaaattattttttgtgaaactgcagaggtgacaaatatgtcgcttatgtctgttttccacggttcacagttaaattgatggggctggagcctggaggttcaccagctccagtatttgtcttcacggattgagttgaggcagtgaagaacgtaagcatgtggataccagctagggaaaacaggcaacagcgttgatccaagcagcgttttacagttacatgcggaaaattgtgtgggttgtatcttacaaacacatattcatctcccaaacacggaaatctctgacttcgaaggagataaacttgtcgtttcaaccagaacgtctctgtgtagtacgaaaataacaaaaaccagctccgtggtgtcattttagaca

SEQ ID NO: 52406 - DNA, 2886 bp, Zea Mays
agcccaggcacacacgactagaaccaggcaaccagctgcggagggaggaaacctagcggaacactgtgcaggtgacggcggcgcgctaccggtgacaggggatacggcggcatcgtcccctcctccatccccggcgcggcggcgccagcagccggcctgcaggcacacaagtggccacccttccaatggcggtggagaagtccagcagcggcacatcaactccctccaccacctccaccatggaccggtttcagaagattgtcctaagctgggattacctccgtctcatcgctgaatccaagggcggcaagcaggccaaggtgctgcagcatgtgaagaacacatacgtctcggtggctgagtaccttggtgtctttgagccactgctctttgaggaggtcaaggcacagatcatccagggacgcagtaacgacgaggaagaatctgggatggactggaggaggggagcagtggggtcgtgcacggagtctgaggggttccacaagctctctgtggcggtggaagacaattttcaggataatgtgtcagagaatgatctactgcttatctccaaggagaaagtgaaattcaaaatctgaatgttgcaaagcctgtgaagtctacaaggctgcaacattttgcttccattattgcaagtcaaaacagcttgctgtggatactgaaggtctgcagcttgtctacaataatgcgggagttcacagctatgcattccgtagcttctctaccttttaaggatttgattctttcagctaccgaggcgcacaaggatggtgatgatcaaagtcgtgcgtggaatgtccctgagccacttatggattatctcaaagtgaatcttaatgattcccagctagaagcagttaatgcaggtctttcacgcagatcctttgttcttattcagggccctccaggaacaggaaagacacaaactattcttggactccttagtgccgttctccattctgctcctgcaagaatgcagatcaaaggaggatttgatgttctaaaacatgggccagaactggacattgatggcaagcgtgcacactggataaaggcatctccttggttacttggtgcaaatcctcgagatctgattatgcctgttgatggtgatgatggattttacccaacgggaaatgaactgaaacccgaaatcgtaagttccaatcgcaagtatcgggctcatgtgttggtgtgtgctccatccaactcagcactcgatgagatcgtgttgcgtgttcttaagacaggaattcgagatgaaaataacaacacttataaccctaaaattgtgcgcattggagtgaaggcccttcattctgttaaagcagtttctatggattatcttattcaacaaaaactttctggtgtagatcgcacattagatggtgggagacgaggtgctggtgaatatgatcggattagagcttcaatactggacgaagcagccattgtattttctactctgagtttcagtggatcatcaatttttagcaggatgacccgtgcttttgatgttgttataattgatgaagctgcacaagcggtggaacctgcaactcttattcctttgatccatggctgcagacaaatttttcttgttggtgacccagttcagttgcctgcaactgtcatttcacagactgcacagaagttgggatatggaacgagcttgttcaaaagatttcaagctgccggttttccagtgcaaatgcttaaaatccaatatcgcatgcatccagagattagtacattcccttcaaaagaattttatgaaggggtactacaagatggggagggcctgagcaggaaacgtccatggcattcctacagctgcttcggaccattttgtttctttgacgttgatggcattgaatcccaaccatctggaagtggttcttgggtaaaccaggatgaagtggaattcataactctcctgtaccaccaattggcattgcgctatccagagctcaaatctagtcctgaagtgggtgttatatcaccatacaggcatcaagtaaaactattgaaggacagttttcgatcaacctttggggatcaatcaagggaattgatagatgtaagcacagttgatggattccagggacgtgaaaaagaaatagtcattttttcatgtgtaagatgcaataaggaacaaaagattggctttgtttctgattttcgacgaatgaatgttgccattacaagagcaaaatctgctgtactgaagggcaggcctggtgtagtggttgtaggttctgcttcaacattgaagcaagataaacactggaacaaccttgttgagagtgccaaggagcgaaactgcttattcaaggtccccaagccattgaccgcattctttgcagaggataacctgaagactatgaaggtggaaaggcgtcctccgccagagctgaatgctcgagtactggaagagatcaaccaagaagttgtaaggcaggagctcatgaatgtcgatgatgctgccgaccatgcagacgcaggggacgacgatgatgctgatatggatgctgacgatggaggcggcgatgattgattttaaattgatggggctggagcctggaggttcaccagctccagtatttgtcttcacggattgagttgaggcagtgaagaacgtaagcatgtggataccagctagggaaaacaggcaacagcgttgatccaagcagcgttttacagttacatgcggaaaattgtgtgggttgtatcttacaaacacatattcatctcccaaacacggaaatctctgacttcgaaggagataaacttgtcgtttcaaccagaacgtctctgtgtagtacgaaaataacaaaaaccagctccgtggtgtcattttagaca

SEQ ID NO: 52407 - DNA, 2936 bp, Zea Mays
agcccaggcacacacgactagaaccaggcaaccagctgcggagggaggaaacctagcggaacactgtgcaggtgacggcggcgcgctaccggtgacaggggatacggcggcatcgtcccctcctccatccccggcgcggcggcgccagcagccggcctgcaggcacacaagtggccacccttccaatggcggtggagaagtccagcagcggcacatcaactccctccaccacctccaccatggaccggtttcagaagattgtcctaagctgggattacctccgtctcatcgctgaatccaagggcggcaagcaggccaaggtgctgcagcatgtgaagaacacatacgtctcggtggctgagtaccttggtgtctttgagccactgctctttgaggaggtcaaggcacagatcatccagggacgcagtaacgacgaggaagaatctgggatggactggaggaggggagcagtggggtcgtgcacggagtctgaggggttccacaagctctctgtggcggtggaagacaattttcaggataatgtgtcagagaatgatctactgcttatctccaaggagaaatttgaggagggatcgacccctaatgcatatgcatttgcattagtggagcagcgaggtggtggcatacatatttcacttagaacttttgtggcaggtgaaattcaaaatctgaatgttgcaaagcctgtgaagtctacaaggctgcaacattttgcttccattattgcaagtcaaaacagcttgctgtggatactgaaggtctgcagcttgtctacaataatgcgggagttcacagctatgcattccgtagcttctctaccttttaaggatttgattctttcagctaccgaggcgcacaaggatggtgatgatcaaagtcgtgcgtggaatgtccctgagccacttatggattatctcaaagtgaatcttaatgattcccagctagaagcagttaatgcaggtctttcacgcagatcctttgttcttattcagggccctccaggaacaggaaagacacaaactattcttggactccttagtgccgttctccattctgctcctgcaagaatgcagatcaaaggaggatttgatgttctaaaacatgggccagaactggacattgatggcaagcgtgcacactggataaaggcatctccttggttacttggtgcaaatcctcgagatctgattatgcctgttgatggtgatgatggattttacccaacgggaaatgaactgaaacccgaaatcgtaagttccaatcgcaagtatcgggctcatgtgttggtgtgtgctccatccaactcagcactcgatgagatcgtgttgcgtgttcttaagacaggaattcgagatgaaaataacaacacttataaccctaaaattgtgcgcattggagtgaaggcccttcattctgttaaagcagtttctatggattatcttattcaacaaaaactttctggtgtagatcgcacattagatggtgggagacgaggtgctggtgaatatgatcggattagagcttcaatactggacgaagcagccattgatgacccgtgcttttgatgttgttataattgatgaagctgcacaagcggtggaacctgcaactcttattcctttgatccatggctgcagacaaatttttcttgttggtgacccagttcagttgcctgcaactgtcatttcacagactgcacagaagttgggatatggaacgagcttgttcaaaagatttcaagctgccggttttccagtgcaaatgcttaaaatccaatatcgcatgcatccagagattagtacattcccttcaaaagaattttatgaaggggtactacaagatggggagggcctgagcaggaaacgtccatggcattcctacagctgcttcggaccattttgtttctttgacgttgatggcattgaatcccaaccatctggaagtggttcttgggtaaaccaggatgaagtggaattcataactctcctgtaccaccaattggcattgcgctatccagagctcaaatctagtcctgaagtgggtgttatatcaccatacaggcatcaagtaaaactattgaaggacagttttcgatcaacctttggggatcaatcaagggaattgatagatgtaagcacagttgatggattccagggacgtgaaaaagaaatagtcattttttcatgtgtaagatgcaataaggaacaaaagattggctttgtttctgattttcgacgaatgaatgttgccattacaagagcaaaatctgctgtactgaagggcaggcctggtgtagtggttgtaggttctgcttcaacattgaagcaagataaacactggaacaaccttgttgagagtgccaaggagcgaaactgcttattcaaggtccccaagccattgaccgcattctttgcagaggataacctgaagactatgaaggtggaaaggcgtcctccgccagagctgaatgctcgagtactggaagagatcaaccaagaagttgtaaggcaggagctcatgaatgtcgatgatgctgccgaccatgcagacgcaggggacgacgatgatgctgatatggatgctgacgatggaggcggcgatgattgattttaaattgatggggctggagcctggaggttcaccagctccagtatttgtcttcacggattgagttgaggcagtgaagaacgtaagcatgtggataccagctagggaaaacaggcaacagcgttgatccaagcagcgttttacagttacatgcggaaaattgtgtgggttgtatcttacaaacacatattcatctcccaaacacggaaatctctgacttcgaaggagataaacttgtcgtttcaaccagaacgtctctgtgtagtacgaaaataacaaaaaccagctccgtggtgtcattttagaca

SEQ ID NO: 52408 - DNA, 3268 bp, Zea Mays
agcccaggcacacacgactagaaccaggcaaccagctgcggagggaggaaacctagcggaacactgtgcaggtgacggcggcgcgctaccggtgacaggggatacggcggcatcgtcccctcctccatccccggcgcggcggcgccagcagccggcctgcaggcacacaagtggccacccttccaatggcggtggagaagtccagcagcggcacatcaactccctccaccacctccaccatggaccggtttcagaagattgtcctaagctgggattacctccgtctcatcgctgaatccaagggcggcaagcaggccaaggtgctgcagcatgtgaagaacacatacgtctcggtggctgagtaccttggtgtctttgagccactgctctttgaggaggtcaaggcacagatcatccagggacgcagtaacgacgaggaagaatctgggatggactggaggaggggagcagtggggtcgtgcacggagtctgaggggttccacaagctctctgtggcggtggaagacaattttcaggataatgtgtcagagaatgatctactgcttatctccaaggagaaatttgaggagggatcgacccctaatgcatatgcatttgcattagtggagcagcgaggtggtggcatacatatttcacttagaacttttgtggcaggtgaaattcaaaatctgaatgttgcaaagcctgtgaagtctacaaggctgcaacattttgcttccattattgcaagtcaaaacagcttgctgtggatactgaaggtctgcagcttgtctacaataatgcgggagttcacagctatgcattccgtagcttctctaccttttaaggatttgattctttcagctaccgaggcgcacaaggatggtgatgatcaaagtcgtgcgtggaatgtccctgagccacttatggattatctcaaagtgaatcttaatgattcccagctagaagcagttaatgtctttcacgcagatcctttgttcttattcagggccctccaggaacaggaaagacacaaactattcttggactccttagtgccgttctccattctgctcctgcaagaatgcagatcaaaggaggatttgatgttctaaaacatgggccagaactggacattgatggcaagcgtgcacactggataaaggcatctccttggttacttggtgcaaatcctcgagatctgattatgcctgttgatggtgatgatggattttacccaacgggaaatgaactggtactcttctatattggtatacttgctaaaatttacccaggttcttggactatttaccccttacatggaaaagaaaaaaatctttatagaaacccgaaatcgtaagttccaatcgcaagtatcgggctcatgtgttggtgtgtgctccatccaactcagcactcgatgagatcgtgttgcgtgttcttaagacaggaattcgagatgaaaataacaacacttataaccctaaaattgtgcgcattggagtgaaggcccttcattctgttaaagcagtttctatggattatcttatcgcacattagatggtgggagacgaggtgctggtgaatatgatcggattagagcttcaatactggacgaagcagccattgtattttctactctgagtttcagtggatcatcaatttttagcaggatgacccgtgcttttgatgttgttataattgatgaagctgcacaagcggtggaacctgcaactcttattcctttgatccatggctgcagacaaatttttcttgttggtgacccagttcagttgcctgcaactgtcatttcacagactgcacagaagttgggatatggaacgagcttgttcaaaagatttcaagctgccggttttccagtgcaaatgcttaaaatccaatatcgcatgcatccagagattagtacattcccttcaaaagaattttatgaaggggtactacaagatggggagggcctgagcaggaaacgtccatggcattcctacagctgcttcggaccattttgtttctttgacgttgatggcattgaatcccaaccatctggaagtggttcttgggtaaaccaggatgaagtggaattcataactctcctgtaccaccaattggcattgcgctatccagagctcaaatctagtcctgaagtgggtgttatatcaccatacaggcatcaagtaaaactattgaaggacagttttcgatcaacctttggggatcaatcaagggaattgatagatgtaagcacagttgatggattccagggacgtgaaaaagaaatagtcattttttcatgtgtaagatgcaataaggaacaaaagattggctttgtttctgattttcgacgaatgaatgttgccattacaagagcaaaatctgctgtactggttgtaggttctgcttcaacattgaagcaagataaacactggaacaaccttgttgagagtgccaaggagcgaaactgcttattcaaggtccccaagccattgaccgcattctttgcagaggataacctgaagactatgaaggtggaaaggcgtcctccgccagagctgaatgctcgagtactggaagagatcaaccaagaagttgtaaggcaggagctcatgaatgtcgatgatgctgccgaccatgcagacgcaggggacgacgatgatgctgatatggatgctgacgatggaggcggcgatgattgattgtaagattcaaaggcttgggtggcctaggtagagcatttacgtagactactggtatacaagaggagtcggttttcttgggtagacgtagtgattgctgagggttgaaaaaaaatggaagcgatgattcttttctcttatctaattatggggagaagctgactatcgtagagtgcaccaccaaaattattttttgtgaaactgcagaggtgacaaatatgtcgcttatgtctgttttccacggttcacagttaaattgatggggctggagcctggaggttcaccagctccagtatttgtcttcacggattgagttgaggcagtgaagaacgtaagcatgtggataccagctagggaaaacaggcaacagcgttgatccaagcagcgttttacagttacatgcggaaaattgtgtgggttgtatcttacaaacacatattcatctcccaaacacggaaatctctgacttcgaaggagataaacttgtcgtttcaaccagaacgtctctgtgtagtacgaaaataacaaaaaccagctccgtggtgtcattttagaca

SEQ ID NO: 52409 - DNA, 3093 bp, Zea Mays
agcccaggcacacacgactagaaccaggcaaccagctgcggagggaggaaacctagcggaacactgtgcaggtgacggcggcgcgctaccggtgacaggggatacggcggcatcgtcccctcctccatccccggcgcggcggcgccagcagccggcctgcaggcacacaagtggccacccttccaatggcggtggagaagtccagcagcggcacatcaactccctccaccacctccaccatggaccggtttcagaagattgtcctaagctgggattacctccgtctcatcgctgaatccaagggcggcaagcaggccaaggtgctgcagcatgtgaagaacacatacgtctcggtggctgagtaccttggtgtctttgagccactgctctttgaggaggtcaaggcacagatcatccagggacgcagtaacgacgaggaagaatctgggatggactggaggaggggagcagtggggtcgtgcacggagtctgaggggttccacaagctctctgtggcggtggaagacaattttcaggataatgtgtcagagaatgatctactgcttatctccaaggagaaagtgaaattcaaaatctgaatgttgcaaagcctgtgaagtctacaaggctgcaacattttgcttccattattgcaagtcaaaacagcttgctgtggatactgaagctaccgaggcgcacaaggatggtgatgatcaaagtcgtgcgtggaatgtccctgagccacttatggattatctcaaagtgaatcttaatgattcccagctagaagcagttaatgcaggtctttcacgcagatcctttgttcttattcagggccctccaggaacaggaaagacacaaactattcttggactccttagtgccgttctccattctgctcctgcaagaatgcagatcaaaggaggatttgatgttctaaaacatgggccagaactggacattgatggcaagcgtgcacactggataaaggcatctccttggttacttggtgcaaatcctcgagatctgattatgcctgttgatggtgatgatggattttacccaacgggaaatgaactggtactcttctatattggtatacttgctaaaatttacccaggttcttggactatttaccccttacatggaaaagaaaaaaatctttatagaaacccgaaatcgtaagttccaatcgcaagtatcgggctcatgtgttggtgtgtgctccatccaactcagcactcgatgagatcgtgttgcgtgttcttaagacaggaattcgagatgaaaataacaacacttataaccctaaaattgtgcgcattggagtgaaggcccttcattctgttaaagcagtttctatggattatcttatcgcacattagatggtgggagacgaggtgctggtgaatatgatcggattagagcttcaatactggacgaagcagccattgtattttctactctgagtttcagtggatcatcaatttttagcaggatgacccgtgcttttgatgttgttataattgatgaagctgcacaagcggtggaacctgcaactcttattcctttgatccatggctgcagacaaatttttcttgttggtgacccagttcagttgcctgcaactgtcatttcacagactgcacagaagttgggatatggaacgagcttgttcaaaagatttcaagctgccggttttccagtgcaaatgcttaaaatccaatatcgcatgcatccagagattagtacattcccttcaaaagaattttatgaaggggtactacaagatggggagggcctgagcaggaaacgtccatggcattcctacagctgcttcggaccattttgtttctttgacgttgatggcattgaatcccaaccatctggaagtggttcttgggtaaaccaggatgaagtggaattcataactctcctgtaccaccaattggcattgcgctatccagagctcaaatctagtcctgaagtgggtgttatatcaccatacaggcatcaagtaaaactattgaaggacagttttcgatcaacctttggggatcaatcaagggaattgatagatgtaagcacagttgatggattccagggacgtgaaaaagaaatagtcattttttcatgtgtaagatgcaataaggaacaaaagattggctttgtttctgattttcgacgaatgaatgttgccattacaagagcaaaatctgctgtactggttgtaggttctgcttcaacattgaagcaagataaacactggaacaaccttgttgagagtgccaaggagcgaaactgcttattcaaggtccccaagccattgaccgcattctttgcagaggataacctgaagactatgaaggtggaaaggcgtcctccgccagagctgaatgctcgagtactggaagagatcaaccaagaagttgtaaggcaggagctcatgaatgtcgatgatgctgccgaccatgcagacgcaggggacgacgatgatgctgatatggatgctgacgatggaggcggcgatgattgattgtaagattcaaaggcttgggtggcctaggtagagcatttacgtagactactggtatacaagaggagtcggttttcttgggtagacgtagtgattgctgagggttgaaaaaaaatggaagcgatgattcttttctcttatctaattatggggagaagctgactatcgtagagtgcaccaccaaaattattttttgtgaaactgcagaggtgacaaatatgtcgcttatgtctgttttccacggttcacagttaaattgatggggctggagcctggaggttcaccagctccagtatttgtcttcacggattgagttgaggcagtgaagaacgtaagcatgtggataccagctagggaaaacaggcaacagcgttgatccaagcagcgttttacagttacatgcggaaaattgtgtgggttgtatcttacaaacacatattcatctcccaaacacggaaatctctgacttcgaaggagataaacttgtcgtttcaaccagaacgtctctgtgtagtacgaaaataacaaaaaccagctccgtggtgtcattttagaca

SEQ ID NO: 52410 - DNA, 3110 bp, Zea Mays
agcccaggcacacacgactagaaccaggcaaccagctgcggagggaggaaacctagcggaacactgtgcaggtgacggcggcgcgctaccggtgacaggggatacggcggcatcgtcccctcctccatccccggcgcggcggcgccagcagccggcctgcaggcacacaagtggccacccttccaatggcggtggagaagtccagcagcggcacatcaactccctccaccacctccaccatggaccggtttcagaagattgtcctaagctgggattacctccgtctcatcgctgaatccaagggcggcaagcaggccaaggtgctgcagcatgtgaagaacacatacgtctcggtggctgagtaccttggtgtctttgagccactgctctttgaggaggtcaaggcacagatcatccagggacgcagtaacgacgaggaagaatctgggatggactggaggaggggagcagtggggtcgtgcacggagtctgaggggttccacaagctctctgtggcggtggaagacaattttcaggataatgtgtcagagaatgatctactgcttatctccaaggagaaagtgaaattcaaaatctgaatgttgcaaagcctgtgaagtctacaaggctgcaacattttgcttccattattgcaagtcaaaacagcttgctgtggatactgaaggtctgcagcttgtctacaataatgcgggagttcacagctatgcattccgtagcttctctaccttttaaggatttgattctttcagctaccgaggcgcacaaggatggtgatgatcaaagtcgtgcgtggaatgtccctgagccacttatggattatctcaaagtgaatcttaatgattcccagctagaagcagttaatgtctttcacgcagatcctttgttcttattcagggccctccaggaacaggaaagacacaaactattcttggactccttagtgccgttctccattctgctcctgcaagaatgcagatcaaaggaggatttgatgttctaaaacatgggccagaactggacattgatggcaagcgtgcacactggataaaggcatctccttggttacttggtgcaaatcctcgagatctgattatgcctgttgatggtgatgatggattttacccaacgggaaatgaactgaaacccgaaatcgtaagttccaatcgcaagtatcgggctcatgtgttggtgtgtgctccatccaactcagcactcgatgagatcgtgttgcgtgttcttaagacaggaattcgagatgaaaataacaacacttataaccctaaaattgtgcgcattggagtgaaggcccttcattctgttaaagcagtttctatggattatcttattcaacaaaaactttctggtgtagatcgcacattagatggtgggagacgaggtgctggtgaatatgatcggattagagcttcaatactggacgaagcagccattgtattttctactctgagtttcagtggatcatcaatttttagcaggatgacccgtgcttttgatgttgttataattgatgaagctgcacaagcggtggaacctgcaactcttattcctttgatccatggctgcagacaaatttttcttgttggtgacccagttcagttgcctgcaactgtcatttcacagactgcacagaagttgggatatggaacgagcttgttcaaaagatttcaagctgccggttttccagtgcaaatgcttaaaatccaatatcgcatgcatccagagattagtacattcccttcaaaagaattttatgaaggggtactacaagatggggagggcctgagcaggaaacgtccatggcattcctacagctgcttcggaccattttgtttctttgacgttgatggcattgaatcccaaccatctggaagtggttcttgggtaaaccaggatgaagtggaattcataactctcctgtaccaccaattggcattgcgctatccagagctcaaatctagtcctgaagtgggtgttatatcaccatacaggcatcaagtaaaactattgaaggacagttttcgatcaacctttggggatcaatcaagggaattgatagatgtaagcacagttgatggattccagggacgtgaaaaagaaatagtcattttttcatgtgtaagatgcaataaggaacaaaagattggctttgtttctgattttcgacgaatgaatgttgccattacaagagcaaaatctgctgtactggttgtaggttctgcttcaacattgaagcaagataaacactggaacaaccttgttgagagtgccaaggagcgaaactgcttattcaaggtccccaagccattgaccgcattctttgcagaggataacctgaagactatgaaggtggaaaggcgtcctccgccagagctgaatgctcgagtactggaagagatcaaccaagaagttgtaaggcaggagctcatgaatgtcgatgatgctgccgaccatgcagacgcaggggacgacgatgatgctgatatggatgctgacgatggaggcggcgatgattgattgtaagattcaaaggcttgggtggcctaggtagagcatttacgtagactactggtatacaagaggagtcggttttcttgggtagacgtagtgattgctgagggttgaaaaaaaatggaagcgatgattcttttctcttatctaattatggggagaagctgactatcgtagagtgcaccaccaaaattattttttgtgaaactgcagaggtgacaaatatgtcgcttatgtctgttttccacggttcacagttaaattgatggggctggagcctggaggttcaccagctccagtatttgtcttcacggattgagttgaggcagtgaagaacgtaagcatgtggataccagctagggaaaacaggcaacagcgttgatccaagcagcgttttacagttacatgcggaaaattgtgtgggttgtatcttacaaacacatattcatctcccaaacacggaaatctctgacttcgaaggagataaacttgtcgtttcaaccagaacgtctctgtgtagtacgaaaataacaaaaaccagctccgtggtgtcattttagaca

SEQ ID NO: 52411 - DNA, 3062 bp, Zea Mays
agcccaggcacacacgactagaaccaggcaaccagctgcggagggaggaaacctagcggaacactgtgcaggtgacggcggcgcgctaccggtgacaggggatacggcggcatcgtcccctcctccatccccggcgcggcggcgccagcagccggcctgcaggcacacaagtggccacccttccaatggcggtggagaagtccagcagcggcacatcaactccctccaccacctccaccatggaccggtttcagaagattgtcctaagctgggattacctccgtctcatcgctgaatccaagggcggcaagcaggccaaggtgctgcagcatgtgaagaacacatacgtctcggtggctgagtaccttggtgtctttgagccactgctctttgaggaggtcaaggcacagatcatccagggacgcagtaacgacgaggaagaatctgggatggactggaggaggggagcagtggggtcgtgcacggagtctgaggggttccacaagctctctgtggcggtggaagacaattttcaggataatgtgtcagagaatgatctactgcttatctccaaggagaaatttgaggagggatcgacccctaatgcatatgcatttgcattagtggagcagcgaggtggtggcatacatatttcacttagaacttttgtggcaggtgaaattcaaaatctgaatgttgcaaagcctgtgaagtctacaaggctgcaacattttgcttccattattgcaagtcaaaacagcttgctgtggatactgaaggtctgcagcttgtctacaataatgcgggagttcacagctatgcattccgtagcttctctaccttttaaggatttgattctttcagctaccgaggcgcacaaggatggtgatgatcaaagtcgtgcgtggaatgtccctgagccacttatggattatctcaaagtgaatcttaatgattcccagctagaagcagttaatgcaggtctttcacgcagatcctttgttcttattcagggccctccaggaacaggaaagacacaaactattcttggactccttagtgccgttctccattctgctcctgcaagaatgcagatcaaaggaggatttgatgttctaaaacatgggccagaactggacattgatggcaagcgtgcacactggataaaggcatctccttggttacttggtgcaaatcctcgagatctgattatgcctgttgatggtgatgatggattttacccaacgggaaatgaactggttcttggactatttaccccttacatggaaaagaaaaaaatctttatagaaacccgaaatcgtaagttccaatcgcaagtatcgggctcatgtgttggtgtgtgctccatccaactcagcactcgatgagatcgtgttgcgtgttcttaagacaggaattcgagatgaaaataacaacacttataaccctaaaattgtgcgcattggagtgaaggcccttcattctgttaaagcagtttctatggattatcttattcaacaaaaactttctggtgtagatcgcacattagatggtgggagacgaggtgctggtgaatatgatcggattagagcttcaatactggacgaagcagccattgtacatcttcttattaattataaatgttcattgattatacctattacagtattctcactgccaagtaaaatttgcaggatgacccgtgcttttgatgttgttataattgatgaagctgcacaagcggtggaacctgcaactcttattcctttgatccatggctgcagacaaatttttcttgttggtgacccagttcagttgcctgcaactgtcatttcacagactgcacagaagttgggatatggaacgagcttgttcaaaagatttcaagctgccggttttccagtgcaaatgcttaaaatccaatatcgcatgcatccagagattagtacattcccttcaaaagaattttatgaaggggtactacaagatggggagggcctgagcaggaaacgtccatggcattcctacagctgcttcggaccattttgtttctttgacgttgatggcattgaatcccaaccatctggaagtggttcttgggtaaaccaggatgaagtggaattcataactctcctgtaccaccaattggcattgcgctatccagagctcaaatctagtcctgaagtgggtgttatatcaccatacaggcatcaagtaaaactattgaaggacagttttcgatcaacctttggggatcaatcaagggaattgatagatgtaagcacagttgatggattccagggacgtgaaaaagaaatagtcattttttcatgtgtaagatgcaataaggaacaaaagattggctttgtttctgattttcgacgaatgaatgttgccattacaagagcaaaatctgctgtactgaagggcaggcctggtgtagtggttgtaggttctgcttcaacattgaagcaagataaacactggaacaaccttgttgagagtgccaaggagcgaaactgcttattcaaggtccccaagccattgaccgcattctttgcagaggataacctgaagactatgaaggtggaaaggcgtcctccgccagagctgaatgctcgagtactggaagagatcaaccaagaagttgtaaggcaggagctcatgaatgtcgatgatgctgccgaccatgcagacgcaggggacgacgatgatgctgatatggatgctgacgatggaggcggcgatgattgattttaaattgatggggctggagcctggaggttcaccagctccagtatttgtcttcacggattgagttgaggcagtgaagaacgtaagcatgtggataccagctagggaaaacaggcaacagcgttgatccaagcagcgttttacagttacatgcggaaaattgtgtgggttgtatcttacaaacacatattcatctcccaaacacggaaatctctgacttcgaaggagataaacttgtcgtttcaaccagaacgtctctgtgtagtacgaaaataacaaaaaccagctccgtggtgtcattttagaca

SEQ ID NO: 52412 - DNA, 3204 bp, Zea Mays
agcccaggcacacacgactagaaccaggcaaccagctgcggagggaggaaacctagcggaacactgtgcaggtgacggcggcgcgctaccggtgacaggggatacggcggcatcgtcccctcctccatccccggcgcggcggcgccagcagccggcctgcaggcacacaagtggccacccttccaatggcggtggagaagtccagcagcggcacatcaactccctccaccacctccaccatggaccggtttcagaagattgtcctaagctgggattacctccgtctcatcgctgaatccaagggcggcaagcaggccaaggtgctgcagcatgtgaagaacacatacgtctcggtggctgagtaccttggtgtctttgagccactgctctttgaggaggtcaaggcacagatcatccagggacgcagtaacgacgaggaagaatctgggatggactggaggaggggagcagtggggtcgtgcacggagtctgaggggttccacaagctctctgtggcggtggaagacaattttcaggataatgtgtcagagaatgatctactgcttatctccaaggagaaatttgaggagggatcgacccctaatgcatatgcatttgcattagtggagcagcgaggtggtggcatacatatttcacttagaacttttgtggcaggtgaaattcaaaatctgaatgttgcaaagcctgtgaagtctacaaggctgcaacattttgcttccattattgcaagtcaaaacagcttgctgtggatactgaaggtctgcagcttgtctacaataatgcgggagttcacagctatgcattccgtagcttctctaccttttaaggatttgattctttcagctaccgaggcgcacaaggatggtgatgatcaaagtcgtgcgtggaatgtccctgagccacttatggattatctcaaagtgaatcttaatgattcccagctagaagcagttaatgtctttcacgcagatcctttgttcttattcagggccctccaggaacaggaaagacacaaactattcttggactccttagtgccgttctccattctgctcctgcaagaatgcagatcaaaggaggatttgatgttctaaaacatgggccagaactggacattgatggcaagcgtgcacactggataaaggcatctccttggttacttggtgcaaatcctcgagatctgattatgcctgttgatggtgatgatggattttacccaacgggaaatgaactgaaacccgaaatcgtaagttccaatcgcaagtatcgggctcatgtgttggtgtgtgctccatccaactcagcactcgatgagatcgtgttgcgtgttcttaagacaggaattcgagatgaaaataacaacacttataaccctaaaattgtgcgcattggagtgaaggcccttcattctgttaaagcagtttctatggattatcttattcaacaaaaactttctggtgtagatcgcacattagatggtgggagacgaggtgctggtgaatatgatcggattagagcttcaatactggacgaagcagccattgtattttctactctgagtttcagtggatcatcaatttttagcaggatgacccgtgcttttgatgttgttataattgatgaagctgcacaagcggtggaacctgcaactcttattcctttgatccatggctgcagacaaatttttcttgttggtgacccagttcagttgcctgcaactgtcatttcacagactgcacagaagttgggatatggaacgagcttgttcaaaagatttcaagctgccggttttccagtgcaaatgcttaaaatccaatatcgcatgcatccagagattagtacattcccttcaaaagaattttatgaaggggtactacaagatggggagggcctgagcaggaaacgtccatggcattcctacagctgcttcggaccattttgtttctttgacgttgatggcattgaatcccaaccatctggaagtggttcttgggtaaaccaggatgaagtggaattcataactctcctgtaccaccaattggcattgcgctatccagagctcaaatctagtcctgaagtgggtgttatatcaccatacaggcatcaagtaaaactattgaaggacagttttcgatcaacctttggggatcaatcaagggaattgatagatgtaagcacagttgatggattccagggacgtgaaaaagaaatagtcattttttcatgtgtaagatgcaataaggaacaaaagattggctttgtttctgattttcgacgaatgaatgttgccattacaagagcaaaatctgctgtactggttgtaggttctgcttcaacattgaagcaagataaacactggaacaaccttgttgagagtgccaaggagcgaaactgcttattcaaggtccccaagccattgaccgcattctttgcagaggataacctgaagactatgaaggtggaaaggcgtcctccgccagagctgaatgctcgagtactggaagagatcaaccaagaagttgtaaggcaggagctcatgaatgtcgatgatgctgccgaccatgcagacgcaggggacgacgatgatgctgatatggatgctgacgatggaggcggcgatgattgattgtaagattcaaaggcttgggtggcctaggtagagcatttacgtagactactggtatacaagaggagtcggttttcttgggtagacgtagtgattgctgagggttgaaaaaaaatggaagcgatgattcttttctcttatctaattatggggagaagctgactatcgtagagtgcaccaccaaaattattttttgtgaaactgcagaggtgacaaatatgtcgcttatgtctgttttccacggttcacagttaaattgatggggctggagcctggaggttcaccagctccagtatttgtcttcacggattgagttgaggcagtgaagaacgtaagcatgtggataccagctagggaaaacaggcaacagcgttgatccaagcagcgttttacagttacatgcggaaaattgtgtgggttgtatcttacaaacacatattcatctcccaaacacggaaatctctgacttcgaaggagataaacttgtcgtttcaaccagaacgtctctgtgtagtacgaaaataacaaaaaccagctccgtggtgtcattttagaca

SEQ ID NO: 52413 - DNA, 3114 bp, Zea Mays
agcccaggcacacacgactagaaccaggcaaccagctgcggagggaggaaacctagcggaacactgtgcaggtgacggcggcgcgctaccggtgacaggggatacggcggcatcgtcccctcctccatccccggcgcggcggcgccagcagccggcctgcaggcacacaagtggccacccttccaatggcggtggagaagtccagcagcggcacatcaactccctccaccacctccaccatggaccggtttcagaagattgtcctaagctgggattacctccgtctcatcgctgaatccaagggcggcaagcaggccaaggtgctgcagcatgtgaagaacacatacgtctcggtggctgagtaccttggtgtctttgagccactgctctttgaggaggtcaaggcacagatcatccagggacgcagtaacgacgaggaagaatctgggatggactggaggaggggagcagtggggtcgtgcacggagtctgaggggttccacaagctctctgtggcggtggaagacaattttcaggataatgtgtcagagaatgatctactgcttatctccaaggagaaagtgaaattcaaaatctgaatgttgcaaagcctgtgaagtctacaaggctgcaacattttgcttccattattgcaagtcaaaacagcttgctgtggatactgaaggtctgcagcttgtctacaataatgcgggagttcacagctatgcattccgtagcttctctaccttttaaggatttgattctttcagctaccgaggcgcacaaggatggtgatgatcaaagtcgtgcgtggaatgtccctgagccacttatggattatctcaaagtgaatcttaatgattcccagctagaagcagttaatgcaggtctttcacgcagatcctttgttcttattcagggccctccaggaacaggaaagacacaaactattcttggactccttagtgccgttctccattctgctcctgcaagaatgcagatcaaaggaggatttgatgttctaaaacatgggccagaactggacattgatggcaagcgtgcacactggataaaggcatctccttggttacttggtgcaaatcctcgagatctgattatgcctgttgatggtgatgatggattttacccaacgggaaatgaactgaaacccgaaatcgtaagttccaatcgcaagtatcgggctcatgtgttggtgtgtgctccatccaactcagcactcgatgagatcgtgttgcgtgttcttaagacaggaattcgagatgaaaataacaacacttataaccctaaaattgtgcgcattggagtgaaggcccttcattctgttaaagcagtttctatggattatcttattcaacaaaaactttctggtgtagatcgcacattagatggtgggagacgaggtgctggtgaatatgatcggattagagcttcaatactggacgaagcagccattgtattttctactctgagtttcagtggatcatcaatttttagcaggatgacccgtgcttttgatgttgttataattgatgaagctgcacaagcggtggaacctgcaactcttattcctttgatccatggctgcagacaaatttttcttgttggtgacccagttcagttgcctgcaactgtcatttcacagactgcacagaagttgggatatggaacgagcttgttcaaaagatttcaagctgccggttttccagtgcaaatgcttaaaatccaatatcgcatgcatccagagattagtacattcccttcaaaagaattttatgaaggggtactacaagatggggagggcctgagcaggaaacgtccatggcattcctacagctgcttcggaccattttgtttctttgacgttgatggcattgaatcccaaccatctggaagtggttcttgggtaaaccaggatgaagtggaattcataactctcctgtaccaccaattggcattgcgctatccagagctcaaatctagtcctgaagtgggtgttatatcaccatacaggcatcaagtaaaactattgaaggacagttttcgatcaacctttggggatcaatcaagggaattgatagatgtaagcacagttgatggattccagggacgtgaaaaagaaatagtcattttttcatgtgtaagatgcaataaggaacaaaagattggctttgtttctgattttcgacgaatgaatgttgccattacaagagcaaaatctgctgtactggttgtaggttctgcttcaacattgaagcaagataaacactggaacaaccttgttgagagtgccaaggagcgaaactgcttattcaaggtccccaagccattgaccgcattctttgcagaggataacctgaagactatgaaggtggaaaggcgtcctccgccagagctgaatgctcgagtactggaagagatcaaccaagaagttgtaaggcaggagctcatgaatgtcgatgatgctgccgaccatgcagacgcaggggacgacgatgatgctgatatggatgctgacgatggaggcggcgatgattgattgtaagattcaaaggcttgggtggcctaggtagagcatttacgtagactactggtatacaagaggagtcggttttcttgggtagacgtagtgattgctgagggttgaaaaaaaatggaagcgatgattcttttctcttatctaattatggggagaagctgactatcgtagagtgcaccaccaaaattattttttgtgaaactgcagaggtgacaaatatgtcgcttatgtctgttttccacggttcacagttaaattgatggggctggagcctggaggttcaccagctccagtatttgtcttcacggattgagttgaggcagtgaagaacgtaagcatgtggataccagctagggaaaacaggcaacagcgttgatccaagcagcgttttacagttacatgcggaaaattgtgtgggttgtatcttacaaacacatattcatctcccaaacacggaaatctctgacttcgaaggagataaacttgtcgtttcaaccagaacgtctctgtgtagtacgaaaataacaaaaaccagctccgtggtgtcattttagaca

SEQ ID NO: 52414 - DNA, 3257 bp, Zea Mays
agcccaggcacacacgactagaaccaggcaaccagctgcggagggaggaaacctagcggaacactgtgcaggtgacggcggcgcgctaccggtgacaggggatacggcggcatcgtcccctcctccatccccggcgcggcggcgccagcagccggcctgcaggcacacaagtggccacccttccaatggcggtggagaagtccagcagcggcacatcaactccctccaccacctccaccatggaccggtttcagaagattgtcctaagctgggattacctccgtctcatcgctgaatccaagggcggcaagcaggccaaggtgctgcagcatgtgaagaacacatacgtctcggtggctgagtaccttggtgtctttgagccactgctctttgaggaggtcaaggcacagatcatccagggacgcagtaacgacgaggaagaatctgggatggactggaggaggggagcagtggggtcgtgcacggagtctgaggggttccacaagctctctgtggcggtggaagacaattttcaggataatgtgtcagagaatgatctactgcttatctccaaggagaaatttgaggagggatcgacccctaatgcatatgcatttgcattagtggagcagcgaggtggtggcatacatatttcacttagaacttttgtggcaggtgaaattcaaaatctgaatgttgcaaagcctgtgaagtctacaaggctgcaacattttgcttccattattgcaagtcaaaacagcttgctgtggatactgaaggtctgcagcttgtctacaataatgcgggagttcacagctatgcattccgtagcttctctaccttttaaggatttgattctttcagctaccgaggcgcacaaggatggtgatgatcaaagtcgtgcgtggaatgtccctgagccacttatggattatctcaaagtgaatcttaatgattcccagctagaagcagttaatgcaggtctttcacgcagatcctttgttcttattcagggccctccaggaacaggaaagacacaaactattcttggactccttagtgccgttctccattctgctcctgcaagaatgcagatcaaaggaggatttgatgttctaaaacatgggccagaactggacattgatggcaagcgtgcacactggataaaggcatctccttggttacttggtgcaaatcctcgagatctgattatgcctgttgatggtgatgatggattttacccaacgggaaatgaactggttcttggactatttaccccttacatggaaaagaaaaaaatctttatagaaacccgaaatcgtaagttccaatcgcaagtatcgggctcatgtgttggtgtgtgctccatccaactcagcactcgatgagatcgtgttgcgtgttcttaagacaggaattcgagatgaaaataacaacacttataaccctaaaattgtgcgcattggagtgaaggcccttcattctgttaaagcagtttctatggattatcttattcaacaaaaactttctggtgtagatcgcacattagatggtgggagacgaggtgctggtgaatatgatcggattagagcttcaatactggacgaagcagccattgtattttctactctgagtttcagtggatcatcaatttttagcaggatgacccgtgcttttgatgttgttataattgatgaagctgcacaagcggtggaacctgcaactcttattcctttgatccatggctgcagacaaatttttcttgttggtgacccagttcagttgcctgcaactgtcatttcacagactgcacagaagttgggatatggaacgagcttgttcaaaagatttcaagctgccggttttccagtgcaaatgcttaaaatccaatatcgcatgcatccagagattagtacattcccttcaaaagaattttatgaaggggtactacaagatggggagggcctgagcaggaaacgtccatggcattcctacagctgcttcggaccattttgtttctttgacgttgatggcattgaatcccaaccatctggaagtggttcttgggtaaaccaggatgaagtggaattcataactctcctgtaccaccaattggcattgcgctatccagagctcaaatctagtcctgaagtgggtgttatatcaccatacaggcatcaagtaaaactattgaaggacagttttcgatcaacctttggggatcaatcaagggaattgatagatgtaagcacagttgatggattccagggacgtgaaaaagaaatagtcattttttcatgtgtaagatgcaataaggaacaaaagattggctttgtttctgattttcgacgaatgaatgttgccattacaagagcaaaatctgctgtactggttgtaggttctgcttcaacattgaagcaagataaacactggaacaaccttgttgagagtgccaaggagcgaaactgcttattcaaggtccccaagccattgaccgcattctttgcagaggataacctgaagactatgaaggtggaaaggcgtcctccgccagagctgaatgctcgagtactggaagagatcaaccaagaagttgtaaggcaggagctcatgaatgtcgatgatgctgccgaccatgcagacgcaggggacgacgatgatgctgatatggatgctgacgatggaggcggcgatgattgattgtaagattcaaaggcttgggtggcctaggtagagcatttacgtagactactggtatacaagaggagtcggttttcttgggtagacgtagtgattgctgagggttgaaaaaaaatggaagcgatgattcttttctcttatctaattatggggagaagctgactatcgtagagtgcaccaccaaaattattttttgtgaaactgcagaggtgacaaatatgtcgcttatgtctgttttccacggttcacagttaaattgatggggctggagcctggaggttcaccagctccagtatttgtcttcacggattgagttgaggcagtgaagaacgtaagcatgtggataccagctagggaaaacaggcaacagcgttgatccaagcagcgttttacagttacatgcggaaaattgtgtgggttgtatcttacaaacacatattcatctcccaaacacggaaatctctgacttcgaaggagataaacttgtcgtttcaaccagaacgtctctgtgtagtacgaaaataacaaaaaccagctccgtggtgtcattttagaca

SEQ ID NO: 52415 - DNA, 3228 bp, Zea Mays
agcccaggcacacacgactagaaccaggcaaccagctgcggagggaggaaacctagcggaacactgtgcaggtgacggcggcgcgctaccggtgacaggggatacggcggcatcgtcccctcctccatccccggcgcggcggcgccagcagccggcctgcaggcacacaagtggccacccttccaatggcggtggagaagtccagcagcggcacatcaactccctccaccacctccaccatggaccggtttcagaagattgtcctaagctgggattacctccgtctcatcgctgaatccaagggcggcaagcaggccaaggtgctgcagcatgtgaagaacacatacgtctcggtggctgagtaccttggtgtctttgagccactgctctttgaggaggtcaaggcacagatcatccagggacgcagtaacgacgaggaagaatctgggatggactggaggaggggagcagtggggtcgtgcacggagtctgaggggttccacaagctctctgtggcggtggaagacaattttcaggataatgtgtcagagaatgatctactgcttatctccaaggagaaatttgaggagggatcgacccctaatgcatatgcatttgcattagtggagcagcgaggtggtggcatacatatttcacttagaacttttgtggcaggtgaaattcaaaatctgaatgttgcaaagcctgtgaagtctacaaggctgcaacattttgcttccattattgcaagtcaaaacagcttgctgtggatactgaaggtctgcagcttgtctacaataatgcgggagttcacagctatgcattccgtagcttctctaccttttaaggatttgattctttcagctaccgaggcgcacaaggatggtgatgatcaaagtcgtgcgtggaatgtccctgagccacttatggattatctcaaagtgaatcttaatgattcccagctagaagcagttaatgcaggtctttcacgcagatcctttgttcttattcagggccctccaggaacaggaaagacacaaactattcttggactccttagtgccgttctccattctgctcctgcaagaatgcagatcaaaggaggatttgatgttctaaaacatgggccagaactggacattgatggcaagcgtgcacactggataaaggcatctccttggttacttggtgcaaatcctcgagatctgattatgcctgttgatggtgatgatggattttacccaacgggaaatgaactggtactcttctatattggtatacttgctaaaatttacccaggttcttggactatttaccccttacatggaaaagaaaaaaatctttatagaaacccgaaatcgtaagttccaatcgcaagtatcgggctcatgtgttggtgtgtgctccatccaactcagcactcgatgagatcgtgttgcgtgttcttaagacaggaattcgagatgaaaataacaacacttataaccctaaaattgtgcgcattggagtgaaggcccttcattctgttaaagcagtttctatggattatcttatcgcacattagatggtgggagacgaggtgctggtgaatatgatcggattagagcttcaatactggacgaagcagccattgatgacccgtgcttttgatgttgttataattgatgaagctgcacaagcggtggaacctgcaactcttattcctttgatccatggctgcagacaaatttttcttgttggtgacccagttcagttgcctgcaactgtcatttcacagactgcacagaagttgggatatggaacgagcttgttcaaaagatttcaagctgccggttttccagtgcaaatgcttaaaatccaatatcgcatgcatccagagattagtacattcccttcaaaagaattttatgaaggggtactacaagatggggagggcctgagcaggaaacgtccatggcattcctacagctgcttcggaccattttgtttctttgacgttgatggcattgaatcccaaccatctggaagtggttcttgggtaaaccaggatgaagtggaattcataactctcctgtaccaccaattggcattgcgctatccagagctcaaatctagtcctgaagtgggtgttatatcaccatacaggcatcaagtaaaactattgaaggacagttttcgatcaacctttggggatcaatcaagggaattgatagatgtaagcacagttgatggattccagggacgtgaaaaagaaatagtcattttttcatgtgtaagatgcaataaggaacaaaagattggctttgtttctgattttcgacgaatgaatgttgccattacaagagcaaaatctgctgtactggttgtaggttctgcttcaacattgaagcaagataaacactggaacaaccttgttgagagtgccaaggagcgaaactgcttattcaaggtccccaagccattgaccgcattctttgcagaggataacctgaagactatgaaggtggaaaggcgtcctccgccagagctgaatgctcgagtactggaagagatcaaccaagaagttgtaaggcaggagctcatgaatgtcgatgatgctgccgaccatgcagacgcaggggacgacgatgatgctgatatggatgctgacgatggaggcggcgatgattgattgtaagattcaaaggcttgggtggcctaggtagagcatttacgtagactactggtatacaagaggagtcggttttcttgggtagacgtagtgattgctgagggttgaaaaaaaatggaagcgatgattcttttctcttatctaattatggggagaagctgactatcgtagagtgcaccaccaaaattattttttgtgaaactgcagaggtgacaaatatgtcgcttatgtctgttttccacggttcacagttaaattgatggggctggagcctggaggttcaccagctccagtatttgtcttcacggattgagttgaggcagtgaagaacgtaagcatgtggataccagctagggaaaacaggcaacagcgttgatccaagcagcgttttacagttacatgcggaaaattgtgtgggttgtatcttacaaacacatattcatctcccaaacacggaaatctctgacttcgaaggagataaacttgtcgtttcaaccagaacgtctctgtgtagtacgaaaataacaaaaaccagctccgtggtgtcattttagaca

SEQ ID NO: 52416 - DNA, 3150 bp, Zea Mays
aacagcccaggcacacacgactagaaccaggcaaccagctgcggagggaggaaacctagcggaacactgtgcaggtgacggcggcgcgctaccggtgacaggggatacggcggcatcgtcccctcctccatccccggcgcggcggcgccagcagccggcctgcaggcacacaagtggccacccttccaatggcggtggagaagtccagcagcggcacatcaactccctccaccacctccaccatggaccggtttcagaagattgtcctaagctgggattacctccgtctcatcgctgaatccaagggcggcaagcaggccaaggtgctgcagcatgtgaagaacacatacgtctcggtggctgagtaccttggtgtctttgagccactgctctttgaggaggtcaaggcacagatcatccagggacgcagtaacgacgaggaagaatctgggatggactggaggaggggagcagtggggtcgtgcacggagtctgaggggttccacaagctctctgtggcggtggaagacaattttcaggataatgtgtcagagaatgatctactgcttatctccaaggagaaagtgaaattcaaaatctgaatgttgcaaagcctgtgaagtctacaaggctgcaacattttgcttccattattgcaagtcaaaacagcttgctgtggatactgaaggtctgcagcttgtctacaataatgcgggagttcacagctatgcattccgtagcttctctaccttttaaggatttgattctttcagctaccgaggcgcacaaggatggtgatgatcaaagtcgtgcgtggaatgtccctgagccacttatggattatctcaaagtgaatcttaatgattcccagctagaagcagttaatgcaggtctttcacgcagatcctttgttcttattcagggccctccaggaacaggaaagacacaaactattcttggactccttagtgccgttctccattctgctcctgcaagaatgcagatcaaaggaggatttgatgttctaaaacatgggccagaactggacattgatggcaagcgtgcacactggataaaggcatctccttggttacttggtgcaaatcctcgagatctgattatgcctgttgatggtgatgatggattttacccaacgggaaatgaactggtactcttctatattggtatacttgctaaaatttacccaggttcttggactatttaccccttacatggaaaagaaaaaaatctttatagaaacccgaaatcgtaagttccaatcgcaagtatcgggctcatgtgttggtgtgtgctccatccaactcagcactcgatgagatcgtgttgcgtgttcttaagacaggaattcgagatgaaaataacaacacttataaccctaaaattgtgcgcattggagtgaaggcccttcattctgttaaagcagtttctatggattatcttatcgcacattagatggtgggagacgaggtgctggtgaatatgatcggattagagcttcaatactggacgaagcagccattgtattttctactctgagtttcagtggatcatcaatttttagcaggatgacccgtgcttttgatgttgttataattgatgaagctgcacaagcggtggaacctgcaactcttattcctttgatccatggctgcagacaaatttttcttgttggtgacccagttcagttgcctgcaactgtcatttcacagactgcacagaagttgggatatggaacgagcttgttcaaaagatttcaagctgccggttttccagtgcaaatgcttaaaatccaatatcgcatgcatccagagattagtacattcccttcaaaagaattttatgaaggggtactacaagatggggagggcctgagcaggaaacgtccatggcattcctacagctgcttcggaccattttgtttctttgacgttgatggcattgaatcccaaccatctggaagtggttcttgggtaaaccaggatgaagtggaattcataactctcctgtaccaccaattggcattgcgctatccagagctcaaatctagtcctgaagtgggtgttatatcaccatacaggcatcaagtaaaactattgaaggacagttttcgatcaacctttggggatcaatcaagggaattgatagatgtaagcacagttgatggattccagggacgtgaaaaagaaatagtcattttttcatgtgtaagatgcaataaggaacaaaagattggctttgtttctgattttcgacgaatgaatgttgccattacaagagcaaaatctgctgtactggttgtaggttctgcttcaacattgaagcaagataaacactggaacaaccttgttgagagtgccaaggagcgaaactgcttattcaagaggataacctgaagactatgaaggtggaaaggcgtcctccgccagagctgaatgctcgagtactggaagagatcaaccaagaagttgtaaggcaggagctcatgaatgtcgatgatgctgccgaccatgcagacgcaggggacgacgatgatgctgatatggatgctgacgatggaggcggcgatgattgattgtaagattcaaaggcttgggtggcctaggtagagcatttacgtagactactggtatacaagaggagtcggttttcttgggtagacgtagtgattgctgagggttgaaaaaaaatggaagcgatgattcttttctcttatctaattatggggagaagctgactatcgtagagtgcaccaccaaaattattttttgtgaaactgcagaggtgacaaatatgtcgcttatgtctgttttccacggttcacagttaaattgatggggctggagcctggaggttcaccagctccagtatttgtcttcacggattgagttgaggcagtgaagaacgtaagcatgtggataccagctagggaaaacaggcaacagcgttgatccaagcagcgttttacagttacatgcggaaaattgtgtgggttgtatcttacaaacacatattcatctcccaaacacggaaatctctgacttcgaaggagataaacttgtcgtttcaaccagaacgtctctgtgtagtacgaaaataacaaaaaccagctccgtggtgtcattttagaca

SEQ ID NO: 52417 - DNA, 2959 bp, Zea Mays
caacagcccaggcacacacgactagaaccaggcaaccagctgcggagggaggaaacctagcggaacactgtgcaggtgacggcggcgcgctaccggtgacaggggatacggcggcatcgtcccctcctccatccccggcgcggcggcgccagcagccggcctgcaggcacacaagtggccacccttccaatggcggtggagaagtccagcagcggcacatcaactccctccaccacctccaccatggaccggtttcagaagattgtcctaagctgggattacctccgtctcatcgctgaatccaagggcggcaagcaggccaaggtgctgcagcatgtgaagaacacatacgtctcggtggctgagtaccttggtgtctttgagccactgctctttgaggaggtcaaggcacagatcatccagggacgcagtaacgacgaggaagaatctgggatggactggaggaggggagcagtggggtcgtgcacggagtctgaggggttccacaagctctctgtggcggtggaagacaattttcaggataatgtgtcagagaatgatctactgcttatctccaaggagaaatttgaggagggatcgacccctaatgcatatgcatttgcattagtggagcagcgaggtggtggcatacatatttcacttagaacttttgtggcaggtgaaattcaaaatctgaatgttgcaaagcctgtgaagtctacaaggctgcaacattttgcttccattattgcaagtcaaaacagcttgctgtggatactgaaggtctgcagcttgtctacaataatgcgggagttcacagctatgcattccgtagcttctctaccttttaaggatttgattctttcagctaccgaggcgcacaaggatggtgatgatcaaagtcgtgcgtggaatgtccctgagccacttatggattatctcaaagtgaatcttaatgattcccagctagaagcagttaatgcaggtctttcacgcagatcctttgttcttattcagggccctccaggaacaggaaagacacaaactattcttggactccttagtgccgttctccattctgctcctgcaagaatgcagatcaaaggaggatttgatgttctaaaacatgggccagaactggacattgatggcaagcgtgcacactggataaaggcatctccttggttacttggtgcaaatcctcgagatctgattatgcctgttgatggtgatgatggattttacccaacgggaaatgaactgaaacccgaaatcgtaagttccaatcgcaagtatcgggctcatgtgttggtgtgtgctccatccaactcagcactcgatgagatcgtgttgcgtgttcttaagacaggaattcgagatgaaaataacaacacttataaccctaaaattgtgcgcattggagtgaaggcccttcattctgttaaagcagtttctatggattatcttatcgcacattagatggtgggagacgaggtgctggtgaatatgatcggattagagcttcaatactggacgaagcagccattgtattttctactctgagtttcagtggatcatcaatttttagcaggatgacccgtgcttttgatgttgttataattgatgaagctgcacaagcggtggaacctgcaactcttattcctttgatccatggctgcagacaaatttttcttgttggtgacccagttcagttgcctgcaactgtcatttcacagactgcacagaagttgggatatggaacgagcttgttcaaaagatttcaagctgccggttttccagtgcaaatgcttaaaatccaatatcgcatgcatccagagattagtacattcccttcaaaagaattttatgaaggggtactacaagatggggagggcctgagcaggaaacgtccatggcattcctacagctgcttcggaccattttgtttctttgacgttgatggcattgaatcccaaccatctggaagtggttcttgggtaaaccaggatgaagtggaattcataactctcctgtaccaccaattggcattgcgctatccagagctcaaatctagtcctgaagtgggtgttatatcaccatacaggcatcaagtaaaactattgaaggacagttttcgatcaacctttggggatcaatcaagggaattgatagatgtaagcacagttgatggattccagggacgtgaaaaagaaatagtcattttttcatgtgtaagatgcaataaggaacaaaagattggctttgtttctgattttcgacgaatgaatgttgccattacaagagcaaaatctgctgtactgaagggcaggcctggtgtagtggttgtaggttctgcttcaacattgaagcaagataaacactggaacaaccttgttgagagtgccaaggagcgaaactgcttattcaaggtccccaagccattgaccgcattctttgcagaggataacctgaagactatgaaggtggaaaggcgtcctccgccagagctgaatgctcgagtactggaagagatcaaccaagaagttgtaaggcaggagctcatgaatgtcgatgatgctgccgaccatgcagacgcaggggacgacgatgatgctgatatggatgctgacgatggaggcggcgatgattgattttaaattgatggggctggagcctggaggttcaccagctccagtatttgtcttcacggattgagttgaggcagtgaagaacgtaagcatgtggataccagctagggaaaacaggcaacagcgttgatccaagcagcgttttacagttacatgcggaaaattgtgtgggttgtatcttacaaacacatattcatctcccaaacacggaaatctctgacttcgaaggagataaacttgtcgtttcaaccagaacgtctctgtgtagtacgaaaataacaaaaaccagctccgtggtgtcattttagaca

SEQ ID NO: 52418 - DNA, 3187 bp, Zea Mays
caacagcccaggcacacacgactagaaccaggcaaccagctgcggagggaggaaacctagcggaacactgtgcaggtgacggcggcgcgctaccggtgacaggggatacggcggcatcgtcccctcctccatccccggcgcggcggcgccagcagccggcctgcaggcacacaagtggccacccttccaatggcggtggagaagtccagcagcggcacatcaactccctccaccacctccaccatggaccggtttcagaagattgtcctaagctgggattacctccgtctcatcgctgaatccaagggcggcaagcaggccaaggtgctgcagcatgtgaagaacacatacgtctcggtggctgagtaccttggtgtctttgagccactgctctttgaggaggtcaaggcacagatcatccagggacgcagtaacgacgaggaagaatctgggatggactggaggaggggagcagtggggtcgtgcacggagtctgaggggttccacaagctctctgtggcggtggaagacaattttcaggataatgtgtcagagaatgatctactgcttatctccaaggagaaatttgaggagggatcgacccctaatgcatatgcatttgcattagtggagcagcgaggtggtggcatacatatttcacttagaacttttgtggcaggtgaaattcaaaatctgaatgttgcaaagcctgtgaagtctacaaggctgcaacattttgcttccattattgcaagtcaaaacagcttgctgtggatactgaaggtctgcagcttgtctacaataatgcgggagttcacagctatgcattccgtagcttctctaccttttaaggatttgattctttcagctaccgaggcgcacaaggatggtgatgatcaaagtcgtgcgtggaatgtccctgagccacttatggattatctcaaagtgaatcttaatgattcccagctagaagcagttaatgcaggtctttcacgcagatcctttgttcttattcagggccctccaggaacaggaaagacacaaactattcttggactccttagtgccgttctccattctgctcctgcaagaatgcagatcaaaggaggatttgatgttctaaaacatgggccagaactggacattgatggcaagcgtgcacactggataaaggcatctccttggttacttggtgcaaatcctcgagatctgattatgcctgttgatggtgatgatggattttacccaacgggaaatgaactgaaacccgaaatcgtaagttccaatcgcaagtatcgggctcatgtgttggtgtgtgctccatccaactcagcactcgatgagatcgtgttgcgtgttcttaagacaggaattcgagatgaaaataacaacacttataaccctaaaattgtgcgcattggagtgaaggcccttcattctgttaaagcagtttctatggattatcttatcgcacattagatggtgggagacgaggtgctggtgaatatgatcggattagagcttcaatactggacgaagcagccattgtattttctactctgagtttcagtggatcatcaatttttagcaggatgacccgtgcttttgatgttgttataattgatgaagctgcacaagcggtggaacctgcaactcttattcctttgatccatggctgcagacaaatttttcttgttggtgacccagttcagttgcctgcaactgtcatttcacagactgcacagaagttgggatatggaacgagcttgttcaaaagatttcaagctgccggttttccagtgcaaatgcttaaaatccaatatcgcatgcatccagagattagtacattcccttcaaaagaattttatgaaggggtactacaagatggggagggcctgagcaggaaacgtccatggcattcctacagctgcttcggaccattttgtttctttgacgttgatggcattgaatcccaaccatctggaagtggttcttgggtaaaccaggatgaagtggaattcataactctcctgtaccaccaattggcattgcgctatccagagctcaaatctagtcctgaagtgggtgttatatcaccatacaggcatcaagtaaaactattgaaggacagttttcgatcaacctttggggatcaatcaagggaattgatagatgtaagcacagttgatggattccagggacgtgaaaaagaaatagtcattttttcatgtgtaagatgcaataaggaacaaaagattggctttgtttctgattttcgacgaatgaatgttgccattacaagagcaaaatctgctgtactggttgtaggttctgcttcaacattgaagcaagataaacactggaacaaccttgttgagagtgccaaggagcgaaactgcttattcaaggtccccaagccattgaccgcattctttgcagaggataacctgaagactatgaaggtggaaaggcgtcctccgccagagctgaatgctcgagtactggaagagatcaaccaagaagttgtaaggcaggagctcatgaatgtcgatgatgctgccgaccatgcagacgcaggggacgacgatgatgctgatatggatgctgacgatggaggcggcgatgattgattgtaagattcaaaggcttgggtggcctaggtagagcatttacgtagactactggtatacaagaggagtcggttttcttgggtagacgtagtgattgctgagggttgaaaaaaaatggaagcgatgattcttttctcttatctaattatggggagaagctgactatcgtagagtgcaccaccaaaattattttttgtgaaactgcagaggtgacaaatatgtcgcttatgtctgttttccacggttcacagttaaattgatggggctggagcctggaggttcaccagctccagtatttgtcttcacggattgagttgaggcagtgaagaacgtaagcatgtggataccagctagggaaaacaggcaacagcgttgatccaagcagcgttttacagttacatgcggaaaattgtgtgggttgtatcttacaaacacatattcatctcccaaacacggaaatctctgacttcgaaggagataaacttgtcgtttcaaccagaacgtctctgtgtagtacgaaaataacaaaaaccagctccgtggtgtcattttagaca

SEQ ID NO: 52419 - DNA, 3412 bp, Zea Mays
caacagcccaggcacacacgactagaaccaggcaaccagctgcggagggaggaaacctagcggaacactgtgcaggtgacggcggcgcgctaccggtgacaggggatacggcggcatcgtcccctcctccatccccggcgcggcggcgccagcagccggcctgcaggcacacaagtggccacccttccaatggcggtggagaagtccagcagcggcacatcaactccctccaccacctccaccatggaccggtttcagaagattgtcctaagctgggattacctccgtctcatcgctgaatccaagggcggcaagcaggccaaggtgctgcagcatgtgaagaacacatacgtctcggtggctgagtaccttggtgtctttgagccactgctctttgaggaggtcaaggcacagatcatccagggacgcagtaacgacgaggaagaatctgggatggactggaggaggggagcagtggggtcgtgcacggagtctgaggggttccacaagctctctgtggcggtggaagacaattttcaggataatgtgtcagagaatgatctactgcttatctccaaggagaaatttgaggagggatcgacccctaatgcatatgcatttgcattagtggagcagcgaggtggtggcatacatatttcacttagaacttttgtggcaggtgaaattcaaaatctgaatgttgcaaagcctgtgaagtctacaaggctgcaacattttgcttccattattgcaagtcaaaacagcttgctgtggatactgaaggtctgcagcttgtctacaataatgcgggagttcacagctatgcattccgtagcttctctaccttttaaggatttgattctttcagctaccgaggcgcacaaggatggtgatgatcaaagtcgtgcgtggaatgtccctgagccacttatggattatctcaaagtgaatcttaatgattcccagctagaagcagttaatgtctttcacgcagatcctttgttcttattcagggccctccaggaacaggaaagacacaaactattcttggactccttagtgccgttctccattctgctcctgcaagaatgcagatcaagtaacaaagccacttggttattctttatattttggtgtatggagtagtaattttatttttgaggatagaaaaacttcatgtttatcatatacgagagagtaattatactgcagttcttggaagcttaaattttgcgcatgtacctcatatgctttgtgatggttgatgcagaggaggatttgatgttctaaaacatgggccagaactggacattgatggcaagcgtgcacactggataaaggcatctccttggttacttggtgcaaatcctcgagatctgattatgcctgttgatggtgatgatggattttacccaacgggaaatgaactggtactcttctatattggtatacttgctaaaatttacccaggttcttggactatttaccccttacatggaaaagaaaaaaatctttatagaaacccgaaatcgtaagttccaatcgcaagtatcgggctcatgtgttggtgtgtgctccatccaactcagcactcgatgagatcgtgttgcgtgttcttaagacaggaattcgagatgaaaataacaacacttataaccctaaaattgtgcgcattggagtgaaggcccttcattctgttaaagcagtttctatggattatcttatcgcacattagatggtgggagacgaggtgctggtgaatatgatcggattagagcttcaatactggacgaagcagccattgtattttctactctgagtttcagtggatcatcaatttttagcaggatgacccgtgcttttgatgttgttataattgatgaagctgcacaagcggtggaacctgcaactcttattcctttgatccatggctgcagacaaatttttcttgttggtgacccagttcagttgcctgcaactgtcatttcacagactgcacagaagttgggatatggaacgagcttgttcaaaagatttcaagctgccggttttccagtgcaaatgcttaaaatccaatatcgcatgcatccagagattagtacattcccttcaaaagaattttatgaaggggtactacaagatggggagggcctgagcaggaaacgtccatggcattcctacagctgcttcggaccattttgtttctttgacgttgatggcattgaatcccaaccatctggaagtggttcttgggtaaaccaggatgaagtggaattcataactctcctgtaccaccaattggcattgcgctatccagagctcaaatctagtcctgaagtgggtgttatatcaccatacaggcatcaagtaaaactattgaaggacagttttcgatcaacctttggggatcaatcaagggaattgatagatgtaagcacagttgatggattccagggacgtgaaaaagaaatagtcattttttcatgtgtaagatgcaataaggaacaaaagattggctttgtttctgattttcgacgaatgaatgttgccattacaagagcaaaatctgctgtactggttgtaggttctgcttcaacattgaagcaagataaacactggaacaaccttgttgagagtgccaaggagcgaaactgcttattcaagaggataacctgaagactatgaaggtggaaaggcgtcctccgccagagctgaatgctcgagtactggaagagatcaaccaagaagttgtaaggcaggagctcatgaatgtcgatgatgctgccgaccatgcagacgcaggggacgacgatgatgctgatatggatgctgacgatggaggcggcgatgattgattgtaagattcaaaggcttgggtggcctaggtagagcatttacgtagactactggtatacaagaggagtcggttttcttgggtagacgtagtgattgctgagggttgaaaaaaaatggaagcgatgattcttttctcttatctaattatggggagaagctgactatcgtagagtgcaccaccaaaattattttttgtgaaactgcagaggtgacaaatatgtcgcttatgtctgttttccacggttcacagttaaattgatggggctggagcctggaggttcaccagctccagtatttgtcttcacggattgagttgaggcagtgaagaacgtaagcatgtggataccagctagggaaaacaggcaacagcgttgatccaagcagcgttttacagttacatgcggaaaattgtgtgggttgtatcttacaaacacatattcatctcccaaacacggaaatctctgacttcgaaggagataaacttgtcgtttcaaccagaacgtctctgtgtagtacgaaaataacaaaaaccagctccgtggtgtcattttagaca

SEQ ID NO: 52420 - DNA, 3253 bp, Zea Mays
caacagagcaacagcccaggcacacacgactagaaccaggcaaccagctgcggagggaggaaacctagcggaacactgtgcaggtgacggcggcgcgctaccggtgacaggggatacggcggcatcgtcccctcctccatccccggcgcggcggcgccagcagccggcctgcaggcacacaagtggccacccttccaatggcggtggagaagtccagcagcggcacatcaactccctccaccacctccaccatggaccggtttcagaagattgtcctaagctgggattacctccgtctcatcgctgaatccaagggcggcaagcaggccaaggtgctgcagcatgtgaagaacacatacgtctcggtggctgagtaccttggtgtctttgagccactgctctttgaggaggtcaaggcacagatcatccagggacgcagtaacgacgaggaagaatctgggatggactggaggaggggagcagtggggtcgtgcacggagtctgaggggttccacaagctctctgtggcggtggaagacaattttcaggataatgtgtcagagaatgatctactgcttatctccaaggagaaatttgaggagggatcgacccctaatgcatatgcatttgcattagtggagcagcgaggtggtggcatacatatttcacttagaacttttgtggcaggtgaaattcaaaatctgaatgttgcaaagcctgtgaagtctacaaggctgcaacattttgcttccattattgcaagtcaaaacagcttgctgtggatactgaaggtctgcagcttgtctacaataatgcgggagttcacagctatgcattccgtagcttctctaccttttaaggatttgattctttcagctaccgaggcgcacaaggatggtgatgatcaaagtcgtgcgtggaatgtccctgagccacttatggattatctcaaagtgaatcttaatgattcccagctagaagcagttaatgcaggtctttcacgcagatcctttgttcttattcagggccctccaggaacaggaaagacacaaactattcttggactccttagtgccgttctccattctgctcctgcaagaatgcagatcaaaggaggatttgatgttctaaaacatgggccagaactggacattgatggcaagcgtgcacactggataaaggcatctccttggttacttggtgcaaatcctcgagatctgattatgcctgttgatggtgatgatggattttacccaacgggaaatgaactggtactcttctatattggtatacttgctaaaatttacccaggttcttggactatttaccccttacatggaaaagaaaaaaatctttatagaaacccgaaatcgtaagttccaatcgcaagtatcgggctcatgtgttggtgtgtgctccatccaactcagcactcgatgagatcgtgttgcgtgttcttaagacaggaattcgagatgaaaataacaacacttataaccctaaaattgtgcgcattggagtgaaggcccttcattctgttaaagcagtttctatggattatcttatcgcacattagatggtgggagacgaggtgctggtgaatatgatcggattagagcttcaatactggacgaagcagccattgtattttctactctgagtttcagtggatcatcaatttttagcaggatgacccgtgcttttgatgttgttataattgatgaagctgcacaagcggtggaacctgcaactcttattcctttgatccatggctgcagacaaatttttcttgttggtgacccagttcagttgcctgcaactgtcatttcacagactgcacagaagttgggatatggaacgagcttgttcaaaagatttcaagctgccggttttccagtgcaaatgcttaaaatccaatatcgcatgcatccagagattagtacattcccttcaaaagaattttatgaaggggtactacaagatggggagggcctgagcaggaaacgtccatggcattcctacagctgcttcggaccattttgtttctttgacgttgatggcattgaatcccaaccatctggaagtggttcttgggtaaaccaggatgaagtggaattcataactctcctgtaccaccaattggcattgcgctatccagagctcaaatctagtcctgaagtgggtgttatatcaccatacaggcatcaagtaaaactattgaaggacagttttcgatcaacctttggggatcaatcaagggaattgatagatgtaagcacagttgatggattccagggacgtgaaaaagaaatagtcattttttcatgtgtaagatgcaataaggaacaaaagattggctttgtttctgattttcgacgaatgaatgttgccattacaagagcaaaatctgctgtactggttgtaggttctgcttcaacattgaagcaagataaacactggaacaaccttgttgagagtgccaaggagcgaaactgcttattcaagaggataacctgaagactatgaaggtggaaaggcgtcctccgccagagctgaatgctcgagtactggaagagatcaaccaagaagttgtaaggcaggagctcatgaatgtcgatgatgctgccgaccatgcagacgcaggggacgacgatgatgctgatatggatgctgacgatggaggcggcgatgattgattgtaagattcaaaggcttgggtggcctaggtagagcatttacgtagactactggtatacaagaggagtcggttttcttgggtagacgtagtgattgctgagggttgaaaaaaaatggaagcgatgattcttttctcttatctaattatggggagaagctgactatcgtagagtgcaccaccaaaattattttttgtgaaactgcagaggtgacaaatatgtcgcttatgtctgttttccacggttcacagttaaattgatggggctggagcctggaggttcaccagctccagtatttgtcttcacggattgagttgaggcagtgaagaacgtaagcatgtggataccagctagggaaaacaggcaacagcgttgatccaagcagcgttttacagttacatgcggaaaattgtgtgggttgtatcttacaaacacatattcatctcccaaacacggaaatctctgacttcgaaggagataaacttgtcgtttcaaccagaacgtctctgtgtagtacgaaaataacaaaaaccagctccgtggtgtcattttagaca

SEQ ID NO: 52421 - DNA, 2950 bp, Zea Mays
agccaacagagcaacagcccaggcacacacgactagaaccaggcaaccagctgcggagggaggaaacctagcggaacactgtgcaggtgacggcggcgcgctaccggtgacaggggatacggcggcatcgtcccctcctccatccccggcgcggcggcgccagcagccggcctgcaggcacacaagtggccacccttccaatggcggtggagaagtccagcagcggcacatcaactccctccaccacctccaccatggaccggtttcagaagattgtcctaagctgggattacctccgtctcatcgctgaatccaagggcggcaagcaggccaaggtgctgcagcatgtgaagaacacatacgtctcggtggctgagtaccttggtgtctttgagccactgctctttgaggaggtcaaggcacagatcatccagggacgcagtaacgacgaggaagaatctgggatggactggaggaggggagcagtggggtcgtgcacggagtctgaggggttccacaagctctctgtggcggtggaagacaattttcaggataatgtgtcagagaatgatctactgcttatctccaaggagaaatttgaggagggatcgacccctaatgcatatgcatttgcattagtggagcagcgaggtggtggcatacatatttcacttagaacttttgtggcaggtgaaattcaaaatctgaatgttgcaaagcctgtgaagtctacaaggctgcaacattttgcttccattattgcaagtcaaaacagcttgctgtggatactgaaggtctgcagcttgtctacaataatgcgggagttcacagctatgcattccgtagcttctctaccttttaaggatttgattctttcagctaccgaggcgcacaaggatggtgatgatcaaagtcgtgcgtggaatgtccctgagccacttatggattatctcaaagtgaatcttaatgattcccagctagaagcagttaatgcaggtctttcacgcagatcctttgttcttattcagggccctccaggaacaggaaagacacaaactattcttggactccttagtgccgttctccattctgctcctgcaagaatgcagatcaaaggaggatttgatgttctaaaacatgggccagaactggacattgatggcaagcgtgcacactggataaaggcatctccttggttacttggtgcaaatcctcgagatctgattatgcctgttgatggtgatgatggattttacccaacgggaaatgaactggttcttggactatttaccccttacatggaaaagaaaaaaatctttatagaaacccgaaatcgaattcgagatgaaaataacaacacttataaccctaaaattgtgcgcattggagtgaaggcccttcattctgttaaagcagtttctatggattatcttattcaacaaaaactttctggtgtagatcgcacattagatggtgggagacgaggtgctggtgaatatgatcggattagagcttcaatactggacgaagcagccattgtattttctactctgagtttcagtggatcatcaatttttagcaggatgacccgtgcttttgatgttgttataattgatgaagctgcacaagcggtggaacctgcaactcttattcctttgatccatggctgcagacaaatttttcttgttggtgacccagttcagttgcctgcaactgtcatttcacagactgcacagaagttgggatatggaacgagcttgttcaaaagatttcaagctgccggttttccagtgcaaatgcttaaaatccaatatcgcatgcatccagagattagtacattcccttcaaaagaattttatgaaggggtactacaagatggggagggcctgagcaggaaacgtccatggcattcctacagctgcttcggaccattttgtttctttgacgttgatggcattgaatcccaaccatctggaagtggttcttgggtaaaccaggatgaagtggaattcataactctcctgtaccaccaattggcattgcgctatccagagctcaaatctagtcctgaagtgggtgttatatcaccatacaggcatcaagtaaaactattgaaggacagttttcgatcaacctttggggatcaatcaagggaattgatagatgtaagcacagttgatggattccagggacgtgaaaaagaaatagtcattttttcatgtgtaagatgcaataaggaacaaaagattggctttgtttctgattttcgacgaatgaatgttgccattacaagagcaaaatctgctgtactgaagggcaggcctggtgtagtggttgtaggttctgcttcaacattgaagcaagataaacactggaacaaccttgttgagagtgccaaggagcgaaactgcttattcaaggtccccaagccattgaccgcattctttgcagaggataacctgaagactatgaaggtggaaaggcgtcctccgccagagctgaatgctcgagtactggaagagatcaaccaagaagttgtaaggcaggagctcatgaatgtcgatgatgctgccgaccatgcagacgcaggggacgacgatgatgctgatatggatgctgacgatggaggcggcgatgattgattttaaattgatggggctggagcctggaggttcaccagctccagtatttgtcttcacggattgagttgaggcagtgaagaacgtaagcatgtggataccagctagggaaaacaggcaacagcgttgatccaagcagcgttttacagttacatgcggaaaattgtgtgggttgtatcttacaaacacatattcatctcccaaacacggaaatctctgacttcgaaggagataaacttgtcgtttcaaccagaacgtctctgtgtagtacgaaaataacaaaaaccagctccgtggtgtcattttagaca

SEQ ID NO: 52422 - DNA, 3228 bp, Zea Mays
ccaagagccaacagagcaacagcccaggcacacacgactagaaccaggcaaccagctgcggagggaggaaacctagcggaacactgtgcaggtgacggcggcgcgctaccggtgacaggggatacggcggcatcgtcccctcctccatccccggcgcggcggcgccagcagccggcctgcaggcacacaagtggccacccttccaatggcggtggagaagtccagcagcggcacatcaactccctccaccacctccaccatggaccggtttcagaagattgtcctaagctgggattacctccgtctcatcgctgaatccaagggcggcaagcaggccaaggtgctgcagcatgtgaagaacacatacgtctcggtggctgagtaccttggtgtctttgagccactgctctttgaggaggtcaaggcacagatcatccagggacgcagtaacgacgaggaagaatctgggatggactggaggaggggagcagtggggtcgtgcacggagtctgaggggttccacaagctctctgtggcggtggaagacaattttcaggataatgtgtcagagaatgatctactgcttatctccaaggagaaatttgaggagggatcgacccctaatgcatatgcatttgcattagtggagcagcgaggtggtggcatacatatttcacttagaacttttgtggcaggtgaaattcaaaatctgaatgttgcaaagcctgtgaagtctacaaggctgcaacattttgcttccattattgcaagtcaaaacagcttgctgtggatactgaaggtctgcagcttgtctacaataatgcgggagttcacagctatgcattccgtagcttctctaccttttaaggatttgattctttcagctaccgaggcgcacaaggatggtgatgatcaaagtcgtgcgtggaatgtccctgagccacttatggattatctcaaagtgaatcttaatgattcccagctagaagcagttaatgcaggtctttcacgcagatcctttgttcttattcagggccctccaggaacaggaaagacacaaactattcttggactccttagtgccgttctccattctgctcctgcaagaatgcagatcaaaggaggatttgatgttctaaaacatgggccagaactggacattgatggcaagcgtgcacactggataaaggcatctccttggttacttggtgcaaatcctcgagatctgattatgcctgttgatggtgatgatggattttacccaacgggaaatgaactgaaacccgaaatcgtaagttccaatcgcaagtatcgggctcatgtgttggtgtgtgctccatccaactcagcactcgatgagatcgtgttgcgtgttcttaagacaggaattcgagatgaaaataacaacacttataaccctaaaattgtgcgcattggagtgaaggcccttcattctgttaaagcagtttctatggattatcttattcaacaaaaactttctggtgtagatcgcacattagatggtgggagacgaggtgctggtgaatatgatcggattagagcttcaatactggacgaagcagccattgtattttctactctgagtttcagtggatcatcaatttttagcaggatgacccgtgcttttgatgttgttataattgatgaagctgcacaagcggtggaacctgcaactcttattcctttgatccatggctgcagacaaatttttcttgttggtgacccagttcagttgcctgcaactgtcatttcacagactgcacagaagttgggatatggaacgagcttgttcaaaagatttcaagctgccggttttccagtgcaaatgcttaaaatccaatatcgcatgcatccagagattagtacattcccttcaaaagaattttatgaaggggtactacaagatggggagggcctgagcaggaaacgtccatggcattcctacagctgcttcggaccattttgtttctttgacgttgatggcattgaatcccaaccatctggaagtggttcttgggtaaaccaggatgaagtggaattcataactctcctgtaccaccaattggcattgcgctatccagagctcaaatctagtcctgaagtgggtgttatatcaccatacaggcatcaagtaaaactattgaaggacagttttcgatcaacctttggggatcaatcaagggaattgatagatgtaagcacagttgatggattccagggacgtgaaaaagaaatagtcattttttcatgtgtaagatgcaataaggaacaaaagattggctttgtttctgattttcgacgaatgaatgttgccattacaagagcaaaatctgctgtactggttgtaggttctgcttcaacattgaagcaagataaacactggaacaaccttgttgagagtgccaaggagcgaaactgcttattcaaggtccccaagccattgaccgcattctttgcagaggataacctgaagactatgaaggtggaaaggcgtcctccgccagagctgaatgctcgagtactggaagagatcaaccaagaagttgtaaggcaggagctcatgaatgtcgatgatgctgccgaccatgcagacgcaggggacgacgatgatgctgatatggatgctgacgatggaggcggcgatgattgattgtaagattcaaaggcttgggtggcctaggtagagcatttacgtagactactggtatacaagaggagtcggttttcttgggtagacgtagtgattgctgagggttgaaaaaaaatggaagcgatgattcttttctcttatctaattatggggagaagctgactatcgtagagtgcaccaccaaaattattttttgtgaaactgcagaggtgacaaatatgtcgcttatgtctgttttccacggttcacagttaaattgatggggctggagcctggaggttcaccagctccagtatttgtcttcacggattgagttgaggcagtgaagaacgtaagcatgtggataccagctagggaaaacaggcaacagcgttgatccaagcagcgttttacagttacatgcggaaaattgtgtgggttgtatcttacaaacacatattcatctcccaaacacggaaatctctgacttcgaaggagataaacttgtcgtttcaaccagaacgtctctgtgtagtacgaaaataacaaaaaccagctccgtggtgtcattttagaca

SEQ ID NO: 52423 - DNA, 3197 bp, Zea Mays
ccaagagccaacagagcaacagcccaggcacacacgactagaaccaggcaaccagctgcggagggaggaaacctagcggaacactgtgcaggtgacggcggcgcgctaccggtgacaggggatacggcggcatcgtcccctcctccatccccggcgcggcggcgccagcagccggcctgcaggcacacaagtggccacccttccaatggcggtggagaagtccagcagcggcacatcaactccctccaccacctccaccatggaccggtttcagaagattgtcctaagctgggattacctccgtctcatcgctgaatccaagggcggcaagcaggccaaggtgctgcagcatgtgaagaacacatacgtctcggtggctgagtaccttggtgtctttgagccactgctctttgaggaggtcaaggcacagatcatccagggacgcagtaacgacgaggaagaatctgggatggactggaggaggggagcagtggggtcgtgcacggagtctgaggggttccacaagctctctgtggcggtggaagacaattttcaggataatgtgtcagagaatgatctactgcttatctccaaggagaaatttgaggagggatcgacccctaatgcatatgcatttgcattagtggagcagcgaggtggtggcatacatatttcacttagaacttttgtggcaggtgaaattcaaaatctgaatgttgcaaagcctgtgaagtctacaaggctgcaacattttgcttccattattgcaagtcaaaacagcttgctgtggatactgaaggtctgcagcttgtctacaataatgcgggagttcacagctatgcattccgtagcttctctaccttttaaggatttgattctttcagctaccgaggcgcacaaggatggtgatgatcaaagtcgtgcgtggaatgtccctgagccacttatggattatctcaaagtgaatcttaatgattcccagctagaagcagttaatgcaggtctttcacgcagatcctttgttcttattcagggccctccaggaacaggaaagacacaaactattcttggactccttagtgccgttctccattctgctcctgcaagaatgcagatcaaaggaggatttgatgttctaaaacatgggccagaactggacattgatggcaagcgtgcacactggataaaggcatctccttggttacttggtgcaaatcctcgagatctgattatgcctgttgatggtgatgatggattttacccaacgggaaatgaactgaaacccgaaatcgtaagttccaatcgcaagtatcgggctcatgtgttggtgtgtgctccatccaactcagcactcgatgagatcgtgttgcgtgttcttaagacaggaattcgagatgaaaataacaacacttataaccctaaaattgtgcgcattggagtgaaggcccttcattctgttaaagcagtttctatggattatcttattcaacaaaaactttctggtgtagatcgcacattagatggtgggagacgaggtgctggtgaatatgatcggattagagcttcaatactggacgaagcagccattgtattttctactctgagtttcagtggatcatcaatttttagcaggatgacccgtgcttttgatgttgttataattgatgaagctgcacaagcggtggaacctgcaactcttattcctttgatccatggctgcagacaaatttttcttgttggtgacccagttcagttgcctgcaactgtcatttcacagactgcacagaagttgggatatggaacgagcttgttcaaaagatttcaagctgccggttttccagtgcaaatgcttaaaatccaatatcgcatgcatccagagattagtacattcccttcaaaagaattttatgaaggggtactacaagatggggagggcctgagcaggaaacgtccatggcattcctacagctgcttcggaccattttgtttctttgacgttgatggcattgaatcccaaccatctggaagtggttcttgggtaaaccaggatgaagtggaattcataactctcctgtaccaccaattggcattgcgctatccagagctcaaatctagtcctgaagtgggtgttatatcaccatacaggcatcaagtaaaactattgaaggacagttttcgatcaacctttggggatcaatcaagggaattgatagatgtaagcacagttgatggattccagggacgtgaaaaagaaatagtcattttttcatgtgtaagatgcaataaggaacaaaagattggctttgtttctgattttcgacgaatgaatgttgccattacaagagcaaaatctgctgtactggttgtaggttctgcttcaacattgaagcaagataaacactggaacaaccttgttgagagtgccaaggagcgaaactgcttattcaagaggataacctgaagactatgaaggtggaaaggcgtcctccgccagagctgaatgctcgagtactggaagagatcaaccaagaagttgtaaggcaggagctcatgaatgtcgatgatgctgccgaccatgcagacgcaggggacgacgatgatgctgatatggatgctgacgatggaggcggcgatgattgattgtaagattcaaaggcttgggtggcctaggtagagcatttacgtagactactggtatacaagaggagtcggttttcttgggtagacgtagtgattgctgagggttgaaaaaaaatggaagcgatgattcttttctcttatctaattatggggagaagctgactatcgtagagtgcaccaccaaaattattttttgtgaaactgcagaggtgacaaatatgtcgcttatgtctgttttccacggttcacagttaaattgatggggctggagcctggaggttcaccagctccagtatttgtcttcacggattgagttgaggcagtgaagaacgtaagcatgtggataccagctagggaaaacaggcaacagcgttgatccaagcagcgttttacagttacatgcggaaaattgtgtgggttgtatcttacaaacacatattcatctcccaaacacggaaatctctgacttcgaaggagataaacttgtcgtttcaaccagaacgtctctgtgtagtacgaaaataacaaaaaccagctccgtggtgtcattttagaca

SEQ ID NO: 52424 - DNA, 7038 bp, Zea Mays
  misc_feature (3342)..(3349): n is a, c, g, or t
gtgcaggggactccggtgaacatcatcgtcggctcgcacgtgtggctggaggaccccggcgaggcgtgggtcgacggcgtcgtcaccgagatcaaaggcggcgacgccaccatcgccaccaccaacggcaaaacggtcgtggcgagccttggcagcgtataccccaaggacacggaggcgccgccggcaggagtggacgacatgaccaagctagcctacctccacgagccgggcgtcctgcacaacctctcctgccgaggctgccgcatctgtacgacgtgcacatgatggagcagtacaagggcgccagcttcggggagctcagccctcatctcttcgccatcgcggacgcctgctacagggcgctcatcaatgaccaggcgagccaagcgatcctggtgagcggcgagagtggcgctggcaagacggagaccaccaagatgctcatgaggtacctcgcattcatgggaggacggtccggcaccgagggacgcaccgttgagcagcaggttctagagtctaacccggtacttgaagcatttggtaacgccaagacagtgaagaacaacaactcaagtcgattcggcaagttcgtggagatccagttcgacaagcatggcaagatatccggggctgccgttcgcacgtatctcctcgagcgatcgcgagtgtgtcaggtctccgatcctgagaggaactaccactgcttctacatgctctgctccgcgccccccgaggacgtgaagaggttcaaggtgggagacccaaggtcgttccattacctgaaccagacgaactgctatgaggtggccaacgtggacgacgcgagagagtacatagaaactagaaacgctatggatatcgttggcatcgatcaagaggaacaggacgcgatcttcagagtagtagcggcgatcctccacctaggaaacatcaacttttccaaagggcaggagatcgactcgtccaagctgagagacgataaatcggtccatcaccttaaaacagttgcggaactgctaatgtgtgacgagaaggccctcgaagactccctctgccagcgtgttattgttacgcctgatgggaacatcacgaagccccttgatccaggctctgcggcgttaagccgtgatgccttggcaaagacagtgtattcacgactgtttgactggatcgtagacaagatcaataactcgattggccaggatccagatgcgaccaatataataggcgtgcttgatatctatggatttgagagcttcaagatcaacagtttcgagcaattatgcatcaatttgacaaacgagaagctgcagcagcacttcaatcagcatgtgtttaagatggagcaagaagaatacacaagggaggaaatagactggagctatgttgaatttgtagacaatcaggatgtgctggacctgattgaaaagaaacctggaggaataattgcactcctggatgaggcatgcatgtttccaaagtctacacatgagacatttgctcaaaagatgtaccaaacgtataaggtccataagcgcttcagcaagcccaagctagctcggacagcctttacgatcaaccattatgcaggggatgtgacgtatcaagcggatcagttccttgataagaacaaagactatgtggtagccgaacaccaggccctactaaattcttcaaggtgcccttttgttgcaaacctcttccctccattacctgaggaaacctctaaacagtccaaattctcttcaattggtactcgctttaagcaacaactgcaatccctcatggaaacactgaatactacagaacctcactacatcagatgtgtcaagcctaatgctgtactcaaacccggcattttcgagaactacaacgtcttgaatcagttgagatgtgggggtgtcctggaagcaattcggatcagctgtgctggttatccaacgaagaggacatttgatgagttcattgatcggtttggaatgcttgcaccggagcttgtcgacagcagcgatgagaaggccgcctgtgcagcgatatgtgatagaatgggtttgaaaggatatcagatagggaaaactaaggtattcctaagagctggtcagatggcagagctggatgctcgaagagcagaaattttggctaatgctgcgcgactaatccaaaggcgtattaagacacatcttatgcgaaaggaattcatcaaattaagaaaagcctcagttcaatctcagaagttctggagagcacgactagctaaaaagatttttgagtatatgaggagagacgctgcttcaattaggatacaaaagcacgtgcgtgcgcattctgccagaaaagcgtacctgcaagtatatgaatcagctacagcaatacaaacaggattacgagcaatggcagctcgcaacgaacacagattccgaagagagaccagggcatccataattatccagactcggtggcgccaacacagagcttatactgcttacaaacagcaacagaaagcttctttgattctccaatgcttgtggagggcacgcattgcaagaaaggaacttcggaaactgagaatggaagcaagagagaccggcgcactgaaagaagcaaaagacaagctagaaaagagagtagaagaactcacatggcggttagacgtcgagaagcgtttgagggctgaccttgaagaagcaaagagccatgaaattgaaaagttgcaatctgcactacaaaaaatgcaagaaaatctcgaggaagcccatgcagcaatagtaaatgagaaagaggctgcaaagttagcgattgaacaggcaccaccaaagatagtagaagtgccggttattgacaatgcgaaacttgaggagttgacaactcaaaataaagaacttgaggatgaactaagtacgtttaaacagaaggctgaggatcttgaaaataagcttattgagttccaaaaacagtctgatgaactgtcacaagagacacaagaacaagcatccaaagttactgaacttcaagagctggtcgaaaggcttgaagcaagtttatccaatatggaatctgaatacccttttctacgacacatactcatgtcctatgagaaagtctcataaactaaaaataataatacatttagcttggaaagcaagatcgccaccttggagtcagagatagagttgctccacagcaattctgcactagctattcaggccgtggttactcctgaaatgaatcagacaacagtaatcgaggaatttgacaagggacaccagcttgaagaagtaaaacggtcaatgtatttgctattatttttacctggcaaacatttatacagtttaagataannnnnnnngcttccacaggaaaaccacgacgccctgattaaaagtatggtagaagacaggagatttgacgacaaaaaatccgctgcagcatgcattgtctacaaatcactcctacactggcattcatttgaagcggagaagactaacatatttgatcgaatcatccaaataattaggtcatcagttgagggagcagaaagttctggagagctagcctattggttgtcgacaacatcaactctcctctacttgttacaaaacactctcaaagctagcagttcattaagtaaaggaacaaatcgcagccggaccacaacaggcagtctgttcagtagaatggtgcagagtgcccggacatcatcaggcttaggcatagctagtggatacagtggaatggtgggaaggcctgacactgatgcatcgatggtagaggcaaaatatccagcacttcggttcaagcaacacttgacagcatatgtcgagaagatatacgggataatcagagataacctgaagaaggaaataagtccgttcttgacaatgtgcatacaggctccaagagctaaccgtgtgaggccatcacggggatcactaaaaagcatacactctaatgcactagctaggcaagcatcaagtctgcattggcaaaacattgtcaagtgcctggatcatacactggaaacgatgaaaaaaaactatgtagctccggtgataatcaggaaaacatttaaccaagtatttgcatacttgaatgtgcaactcttcaacagcttactgcttcgtcgggaatgctgctcttttagcaatggggagttcttaaaggctggtttacaagacctggagcagtggtgctctaggacaactgaagagtatgtagggacgtcctgggatgaactgcaacacattaggcaggcagtcgggttcctggttttgcatcagaaatcacacaaaatcctggaggaaattacgaatgagatttgccctgttttgagcataactcaaatataccgcatagcaacgatgttctgggacgacaagtacggtgcacaaggcgtatctcaagaggtcattggaaggatgagaacgatgacaacggacgactcagtaactactccaaacagttcgttcttgctggacgacgactcaagcataccgatatcgttggatgacatagctcggctgatgcttcacatcgatccgtccgatgtggaaccgcccccgctactgaggcagaattctcagtttcactttcttctgcagcagcacacggactgatatcttctacagataaagagcagaatgaatggtacagttacttgtggagttacagggaactgaagatttttttttaggagtgcacagattgagttgtgattttttttcccttccttttttttatggttttgggtgggaaatggctacaaagaaagggaaatatagggtatatcgtgatatcattcatttgattggtttgattgtttggaacagagagatttgtaattatttgaatatgtatataaattatagaagcatctgatcacactgcggcctgtgctacgtggcgacacacgattgggcacctcacgtggaccgtcttctacggtgccctgtgaggtggaggtccggcacgggtcagaacactctggcgactaacacgtacgctcatcgccgggcacggacagaacctatataactcctgggcctgccgtcggaggatcgatcagcaacagcaaaggcacagctcgcaagtgacaagacgaactgaacatccatccgatcgagacaaaggtcatccagcgatgccgccgaagcccagtattctggctctcgttctggtctctcttctttgctcggggtacctgtgcggggcggctgatggcgcggaggcgtggaagaggaggaaggcggcgtcgagtccggtgatcggcatcaacctgggcaccacgtactcgtgcgtcggggtgtaccggaacgggcacgtggacatcgtcgccaacgaccagggcaaccggatcacgccgtcctgggtggcgttcaccgacgacgagcgcctcgtcggcgaggccgccaagaaccaggcgccgctcaacccgcagcgcaccatcttcgatatcaagcgcctcatcggccggaggttcgacgacgaggaggtgcagcgggacgtcaggtacctaccgtacaaggtggtgaacaagggcggcaagccgtacgtggaggtgccgatgaagggcggcgagcggagggcgttcagccccgaggagatcagcgccatgatcctgtccaagatgcgggagacggccgagtcctacctcggccagcgcgtcgccgacgccgtcttcaccgtgccggcccacttcaacgacgcgcagcggctggcaaccaaggaagccggcaccatcgcggggctcaacgtgctgcggatcatcaacgagcccatggccgcggcgatcgcgtacgggctggacagggagggcgcggaggtgaacgtgctcgtgtacgacctcggcggcagcaccttcgacgtcaccgtgctcagcatcgacggcggcgtcttcgaggtgctggccaccagcggcgacacgcacctcggcggcgaggacttcgaccagcgcgtcatggaccatttcatccgcctcatcaggcggaagcacggcagggacatcagcaaggacggccgcgcgctgggcaagctgcggcgcgagtgcgagcgtgcccaggacgcgctcagaagccagcaccaggtgcgcgtcgaggtcgagtccctattcgacggcgtcgacttcgcggagcagctgaccagggccaagttcgaggagctcaacgtggacctgttcaggaagacgctgggccccgtcaacaaggccatcggcgacgccaagctcaataagtctgacatcgacgagattctgctcgtcggcggcagcaccaggatccccaaggtgcaggagctccttagggagatgttcgacggcaaggagcctagcaagggcatcaaccccgacgaggccgtggcctacggagccgccgtccagggcagcatcttcagcgacgagagaggcgccgagaccgaagacaccctgttcgacttcgacatgggacggacacggatgacgctgggggtcgagacggctggcggcgtgatgacgaagctgatcccgcggaacacgttgatcccagtgaagaagtcgcaggtgttcacgacctccgaggaccaccagacgactgtctcgatcaaggtgttcgagagcgagcgcagcctgaccaaggactgccgcgagctggggcggttcaacctgacgggcatcccgcccgcaccccgcggcgtgccgcagattgaggtgaccttcgagttggacgagaaccacatcctccacgtgacggcggcggacaaggcgggcgggcggtccaggtcgatcgccatcaccaacgacatggggcggctcagcaacagccaggaggagatcgaccggatggtgcgcgaggccgaggggttcgcggaggataaccgccgcgtccgggagctcgtcgacgagcggaactgttggctacgcctattctaagaacaaggattcagggaagaagaaacaggaggaagtaggccatagcagttttctgatttcttgatgccgagcacagcgtctgtcttcccttttaccaaacacaaagtagcccatactgcattacatgtacgttacgc

SEQ ID NO: 52425 - DNA, 7486 bp, Zea Mays
  misc_feature (3790)..(3797): n is a, c, g, or t
cgcatctcccgactcccgctgctgtagtgctgtgcactagccaagccagcttgcatattccttctcccccacgctttcccgtgcttccattccaccaccagggccgcggaacgccccgccccgcccggcccccgcgcctcccctttccacctgttcgtcgcgtgcgcattcgttcgcgcagccagcgagccagccaccaccggcccccaccatcgatcgatatcctcctcctgtctctcttgctgctagctctcgcagttccgtccgatcgactatactgatccagctcctgctatgcgcggcggctagctcctcgacgacgagctgatcaatccgacaatccgagtccgccggcgcggatcgtcgatcgatcggccaccagaccatgaggggactccggtgaacatcatcgtcggctcgcacgtgtggctggaggaccccggcgaggcgtgggtcgacggcgtcgtcaccgagatcaaaggcggcgacgccaccatcgccaccaccaacggcaaaacggtcgtggcgagccttggcagcgtataccccaaggacacggaggcgccgccggcaggagtggacgacatgaccaagctagcctacctccacgagccgggcgtcctgcacaacctctcctgccggtacggcctcaacgagatatacacgtacaccgggaacatcttgatcgcggtgaaccccttccagaggctgccgcatctgtacgacgtgcacatgatggagcagtacaagggcgccagcttcggggagctcagccctcatctcttcgccatcgcggacgcctgctacagggcgctcatcaatgaccaggcgagccaagcgatcctggtgagcggcgagagtggcgctggcaagacggagaccaccaagatgctcatgaggtacctcgcattcatgggaggacggtccggcaccgagggacgcaccgttgagcagcaggttctagagtctaacccggtacttgaagcatttggtaacgccaagacagtgaagaacaacaactcaagtcgattcggcaagttcgtggagatccagttcgacaagcatggcaagatatccggggctgccgttcgcacgtatctcctcgagcgatcgcgagtgtgtcaggtctccgatcctgagaggaactaccactgcttctacatgctctgctccgcgccccccgaggacgtgaagaggttcaaggtgggagacccaaggtcgttccattacctgaaccagacgaactgctatgaggtggccaacgtggacgacgcgagagagtacatagaaactagaaacgctatggatatcgttggcatcgatcaagaggaacaggacgcgatcttcagagtagtagcggcgatcctccacctaggaaacatcaacttttccaaagggcaggagatcgactcgtccaagctgagagacgataaatcggtccatcaccttaaaacagttgcggaactgctaatgtgtgacgagaaggccctcgaagactccctctgccagcgtgttattgttacgcctgatgggaacatcacgaagccccttgatccaggctctgcggcgttaagccgtgatgccttggcaaagacagtgtattcacgactgtttgactggatcgtagacaagatcaataactcgattggccaggatccagatgcgaccaatataataggcgtgcttgatatctatggatttgagagcttcaagatcaacagtttcgagcaattatgcatcaatttgacaaacgagaagctgcagcagcacttcaatcagcatgtgtttaagatggagcaagaagaatacacaagggaggaaatagactggagctatgttgaatttgtagacaatcaggatgtgctggacctgattgaaaagaaacctggaggaataattgcactcctggatgaggcatgcatgtttccaaagtctacacatgagacatttgctcaaaagatgtaccaaacgtataaggtccataagcgcttcagcaagcccaagctagctcggacagcctttacgatcaaccattatgcaggggatgtgacgtatcaagcggatcagttccttgataagaacaaagactatgtggtagccgaacaccaggccctactaaattcttcaaggtgcccttttgttgcaaacctcttccctccattacctgaggaaacctctaaacagtccaaattctcttcaattggtactcgctttaagcaacaactgcaatccctcatggaaacactgaatactacagaacctcactacatcagatgtgtcaagcctaatgctgtactcaaacccggcattttcgagaactacaacgtcttgaatcagttgagatgtgggggtgtcctggaagcaattcggatcagctgtgctggttatccaacgaagaggacatttgatgagttcattgatcggtttggaatgcttgcaccggagcttgtcgacagcagcgatgagaaggccgcctgtgcagcgatatgtgatagaatgggtttgaaaggatatcagatagggaaaactaaggtattcctaagagctggtcagatggcagagctggatgctcgaagagcagaaattttggctaatgctgcgcgactaatccaaaggcgtattaagacacatcttatgcgaaaggaattcatcaaattaagaaaagcctcagttcaatctcagaagttctggagagcacgactagctaaaaagatttttgagtatatgaggagagacgctgcttcaattaggatacaaaagcacgtgcgtgcgcattctgccagaaaagcgtacctgcaagtatatgaatcagctacagcaatacaaacaggattacgagcaatggcagctcgcaacgaacacagattccgaagagagaccagggcatccataattatccagactcggtggcgccaacacagagcttatactgcttacaaacagcaacagaaagcttctttgattctccaatgcttgtggagggcacgcattgcaagaaaggaacttcggaaactgagaatggaagcaagagagaccggcgcactgaaagaagcaaaagacaagctagaaaagagagtagaagaactcacatggcggttagacgtcgagaagcgtttgagggctgaccttgaagaagcaaagagccatgaaattgaaaagttgcaatctgcactacaaaaaatgcaagaaaatctcgaggaagcccatgcagcaatagtaaatgagaaagaggctgcaaagttagcgattgaacaggcaccaccaaagatagtagaagtgccggttattgacaatgcgaaacttgaggagttgacaactcaaaataaagaacttgaggatgaactaagtacgtttaaacagaaggctgaggatcttgaaaataagcttattgagttccaaaaacagtctgatgaactgtcacaagagacacaagaacaagcatccaaagttactgaacttcaagagctggtcgaaaggcttgaagcaagtttatccaatatggaatctgaatacccttttctacgacacatactcatgtcctatgagaaagtctcataaactaaaaataataatacatttagcttggaaagcaagatcgccaccttggagtcagagatagagttgctccacagcaattctgcactagctattcaggccgtggttactcctgaaatgaatcagacaacagtaatcgaggaatttgacaagggacaccagcttgaagaagtaaaacggtcaatgtatttgctattatttttacctggcaaacatttatacagtttaagataannnnnnnngcttccacaggaaaaccacgacgccctgattaaaagtatggtagaagacaggagatttgacgacaaaaaatccgctgcagcatgcattgtctacaaatcactcctacactggcattcatttgaagcggagaagactaacatatttgatcgaatcatccaaataattaggtcatcagttgagggagcagaaagttctggagagctagcctattggttgtcgacaacatcaactctcctctacttgttacaaaacactctcaaagctagcagttcattaagtaaaggaacaaatcgcagccggaccacaacaggcagtctgttcagtagaatggtgcagagtgcccggacatcatcaggcttaggcatagctagtggatacagtggaatggtgggaaggcctgacactgatgcatcgatggtagaggcaaaatatccagcacttcggttcaagcaacacttgacagcatatgtcgagaagatatacgggataatcagagataacctgaagaaggaaataagtccgttcttgacaatgtgcatacaggctccaagagctaaccgtgtgaggccatcacggggatcactaaaaagcatacactctaatgcactagctaggcaagcatcaagtctgcattggcaaaacattgtcaagtgcctggatcatacactggaaacgatgaaaaaaaactatgtagctccggtgataatcaggaaaacatttaaccaagtatttgcatacttgaatgtgcaactcttcaacagcttactgcttcgtcgggaatgctgctcttttagcaatggggagttcttaaaggctggtttacaagacctggagcagtggtgctctaggacaactgaagagtatgtagggacgtcctgggatgaactgcaacacattaggcaggcagtcgggttcctggttttgcatcagaaatcacacaaaatcctggaggaaattacgaatgagatttgccctgttttgagcataactcaaatataccgcatagcaacgatgttctgggacgacaagtacggtgcacaaggcgtatctcaagaggtcattggaaggatgagaacgatgacaacggacgactcagtaactactccaaacagttcgttcttgctggacgacgactcaagcataccgatatcgttggatgacatagctcggctgatgcttcacatcgatccgtccgatgtggaaccgcccccgctactgaggcagaattctcagtttcactttcttctgcagcagcacacggactgatatcttctacagataaagagcagaatgaatggtacagttacttgtggagttacagggaactgaagatttttttttaggagtgcacagattgagttgtgattttttttcccttccttttttttatggttttgggtgggaaatggctacaaagaaagggaaatatagggtatatcgtgatatcattcatttgattggtttgattgtttggaacagagagatttgtaattatttgaatatgtatataaattatagaagcatctgatcacactgcggcctgtgctacgtggcgacacacgattgggcacctcacgtggaccgtcttctacggtgccctgtgaggtggaggtccggcacgggtcagaacactctggcgactaacacgtacgctcatcgccgggcacggacagaacctatataactcctgggcctgccgtcggaggatcgatcagcaacagcaaaggcacagctcgcaagtgacaagacgaactgaacatccatccgatcgagacaaaggtcatccagcgatgccgccgaagcccagtattctggctctcgttctggtctctcttctttgctcggggtacctgtgcggggcggctgatggcgcggaggcgtggaagaggaggaaggcggcgtcgagtccggtgatcggcatcaacctgggcaccacgtactcgtgcgtcggggtgtaccggaacgggcacgtggacatcgtcgccaacgaccagggcaaccggatcacgccgtcctgggtggcgttcaccgacgacgagcgcctcgtcggcgaggccgccaagaaccaggcgccgctcaacccgcagcgcaccatcttcgatatcaagcgcctcatcggccggaggttcgacgacgaggaggtgcagcgggacgtcaggtacctaccgtacaaggtggtgaacaagggcggcaagccgtacgtggaggtgccgatgaagggcggcgagcggagggcgttcagccccgaggagatcagcgccatgatcctgtccaagatgcgggagacggccgagtcctacctcggccagcgcgtcgccgacgccgtcttcaccgtgccggcccacttcaacgacgcgcagcggctggcaaccaaggaagccggcaccatcgcggggctcaacgtgctgcggatcatcaacgagcccatggccgcggcgatcgcgtacgggctggacagggagggcgcggaggtgaacgtgctcgtgtacgacctcggcggcagcaccttcgacgtcaccgtgctcagcatcgacggcggcgtcttcgaggtgctggccaccagcggcgacacgcacctcggcggcgaggacttcgaccagcgcgtcatggaccatttcatccgcctcatcaggcggaagcacggcagggacatcagcaaggacggccgcgcgctgggcaagctgcggcgcgagtgcgagcgtgcccaggacgcgctcagaagccagcaccaggtgcgcgtcgaggtcgagtccctattcgacggcgtcgacttcgcggagcagctgaccagggccaagttcgaggagctcaacgtggacctgttcaggaagacgctgggccccgtcaacaaggccatcggcgacgccaagctcaataagtctgacatcgacgagattctgctcgtcggcggcagcaccaggatccccaaggtgcaggagctccttagggagatgttcgacggcaaggagcctagcaagggcatcaaccccgacgaggccgtggcctacggagccgccgtccagggcagcatcttcagcgacgagagaggcgccgagaccgaagacaccctgttcgacttcgacatgggacggacacggatgacgctgggggtcgagacggctggcggcgtgatgacgaagctgatcccgcggaacacgttgatcccagtgaagaagtcgcaggtgttcacgacctccgaggaccaccagacgactgtctcgatcaaggtgttcgagagcgagcgcagcctgaccaaggactgccgcgagctggggcggttcaacctgacgggcatcccgcccgcaccccgcggcgtgccgcagattgaggtgaccttcgagttggacgagaaccacatcctccacgtgacggcggcggacaaggcgggcgggcggtccaggtcgatcgccatcaccaacgacatggggcggctcagcaacagccaggaggagatcgaccggatggtgcgcgaggccgaggggttcgcggaggataaccgccgcgtccgggagctcgtcgacgagcggaactgttggctacgcctattctaagaacaaggattcagggaagaagaaacaggaggaagtaggccatagcagttttctgatttcttgatgccgagcacagcgtctgtcttcccttttaccaaacacaaagtagcccatactgcattacatgtacgttacgc

SEQ ID NO: 52426 - DNA, 7396 bp, Zea Mays
  misc_feature (3700)..(3707): n is a, c, g, or t
cgcatctcccgactcccgctgctgtagtgctgtgcactagccaagccagcttgcatattccttctcccccacgctttcccgtgcttccattccaccaccagggccgcggaacgccccgccccgcccggcccccgcgcctcccctttccacctgttcgtcgcgtgcgcattcgttcgcgcagccagcgagccagccaccaccggcccccaccatcgatcgatatcctcctcctgtctctcttgctgctagctctcgcagttccgtccgatcgactatactgatccagctcctgctatgcgcggcggctagctcctcgacgacgagctgatcaatccgacaatccgagtccgccggcgcggatcgtcgatcgatcggccaccagaccatggggactccggtgaacatcatcgtcggctcgcacgtgtggctggaggaccccggcgaggcgtgggtcgacggcgtcgtcaccgagatcaaaggcggcgacgccaccatcgccaccaccaacggcaaaacggtcgtggcgagccttggcagcgtataccccaaggacacggaggcgccgccggcaggagtggacgacatgaccaagctagcctacctccacgagccgggcgtcctgcacaacctctcctgccggtacggcctcaacgagatatacacgtacaccgggaacatcttgatcgcggtgaaccccttccagaggctgccgcatctgtacgacgtgcacatgatggagcagtacaagggcgccagcttcggggagctcagccctcatctcttcgccatcgcggacgcctgctacagggcgctcatcaatgaccaggcgagccaagcgatcctggtgagcggcgagagtggcgctggcaagacggagaccaccaagatgctcatgaggtacctcgcattcatgggaggacggtccggcaccgagggacgcaccgttgagcagcaggttctagagtctaacccggtacttgaagcatttggtaacgccaagacagtgaagaacaacaactcaagtcgattcggcaagttcgtggagatccagttcgacaagcatggcaagatatccggggctgccgttcgcacgtatctcctcgagcgatcgcgagtgtgtcaggtctccgatcctgagaggaactaccactgcttctacatgctctgctccgcgccccccgaggacgtgaagaggttcaaggtgggagacccaaggtcgttccattacctgaaccagacgaactgctatgaggtggccaacgtggacgacgcgagagagtacatagaaactagaaacgctatggatatcgttggcatcgatcaagaggaacaggacgcgatcttcagagtagtagcggcgatcctccacctaggaaacatcaacttttccaaagggcaggagatcgactcgtccaagctgagagacgataaatcggtccatcaccttaaaacagttgcggaactgctaatgtgtgacgagaaggccctcgaagactccctctgccagcgtgttattgttacgcctgatgggaacatcacgaagccccttgatccaggctctgcggcgttaagccgtgatgccttggcaaagacagtgtattcacgactgtttgactggatcgtagacaagatcaataactcgattggccaggatccagatgcgaccaatataataggcgtgcttgatatctatggatttgagagcttcaagatcaacagtttcgagcaattatgcatcaatttgacaaacgagaagctgcagcagcacttcaatcagcatgtgtttaagatggagcaagaagaatacacaagggaggaaatagactggagctatgttgaatttgtagacaatcaggatgtgctggacctgattgaaaagaaacctggaggaataattgcactcctggatgaggcatgcatgtttccaaagtctacacatgagacatttgctcaaaagatgtaccaaacgtataaggtccataagcgcttcagcaagcccaagctagctcggacagcctttacgatcaaccattatgcaggggatgtgacgtatcaagcggatcagttccttgataagaacaaagactatgtggtagccgaacaccaggccctactaaattcttcaagcaacaactgcaatccctcatggaaacactgaatactacagaacctcactacatcagatgtgtcaagcctaatgctgtactcaaacccggcattttcgagaactacaacgtcttgaatcagttgagatgtgggggtgtcctggaagcaattcggatcagctgtgctggttatccaacgaagaggacatttgatgagttcattgatcggtttggaatgcttgcaccggagcttgtcgacagcagcgatgagaaggccgcctgtgcagcgatatgtgatagaatgggtttgaaaggatatcagatagggaaaactaaggtattcctaagagctggtcagatggcagagctggatgctcgaagagcagaaattttggctaatgctgcgcgactaatccaaaggcgtattaagacacatcttatgcgaaaggaattcatcaaattaagaaaagcctcagttcaatctcagaagttctggagagcacgactagctaaaaagatttttgagtatatgaggagagacgctgcttcaattaggatacaaaagcacgtgcgtgcgcattctgccagaaaagcgtacctgcaagtatatgaatcagctacagcaatacaaacaggattacgagcaatggcagctcgcaacgaacacagattccgaagagagaccagggcatccataattatccagactcggtggcgccaacacagagcttatactgcttacaaacagcaacagaaagcttctttgattctccaatgcttgtggagggcacgcattgcaagaaaggaacttcggaaactgagaatggaagcaagagagaccggcgcactgaaagaagcaaaagacaagctagaaaagagagtagaagaactcacatggcggttagacgtcgagaagcgtttgagggctgaccttgaagaagcaaagagccatgaaattgaaaagttgcaatctgcactacaaaaaatgcaagaaaatctcgaggaagcccatgcagcaatagtaaatgagaaagaggctgcaaagttagcgattgaacaggcaccaccaaagatagtagaagtgccggttattgacaatgcgaaacttgaggagttgacaactcaaaataaagaacttgaggatgaactaagtacgtttaaacagaaggctgaggatcttgaaaataagcttattgagttccaaaaacagtctgatgaactgtcacaagagacacaagaacaagcatccaaagttactgaacttcaagagctggtcgaaaggcttgaagcaagtttatccaatatggaatctgaatacccttttctacgacacatactcatgtcctatgagaaagtctcataaactaaaaataataatacatttagcttggaaagcaagatcgccaccttggagtcagagatagagttgctccacagcaattctgcactagctattcaggccgtggttactcctgaaatgaatcagacaacagtaatcgaggaatttgacaagggacaccagcttgaagaagtaaaacggtcaatgtatttgctattatttttacctggcaaacatttatacagtttaagataannnnnnnngcttccacaggaaaaccacgacgccctgattaaaagtatggtagaagacaggagatttgacgacaaaaaatccgctgcagcatgcattgtctacaaatcactcctacactggcattcatttgaagcggagaagactaacatatttgatcgaatcatccaaataattaggtcatcagttgagggagcagaaagttctggagagctagcctattggttgtcgacaacatcaactctcctctacttgttacaaaacactctcaaagctagcagttcattaagtaaaggaacaaatcgcagccggaccacaacaggcagtctgttcagtagaatggtgcagagtgcccggacatcatcaggcttaggcatagctagtggatacagtggaatggtgggaaggcctgacactgatgcatcgatggtagaggcaaaatatccagcacttcggttcaagcaacacttgacagcatatgtcgagaagatatacgggataatcagagataacctgaagaaggaaataagtccgttcttgacaatgtgcatacaggctccaagagctaaccgtgtgaggccatcacggggatcactaaaaagcatacactctaatgcactagctaggcaagcatcaagtctgcattggcaaaacattgtcaagtgcctggatcatacactggaaacgatgaaaaaaaactatgtagctccggtgataatcaggaaaacatttaaccaagtatttgcatacttgaatgtgcaactcttcaacagcttactgcttcgtcgggaatgctgctcttttagcaatggggagttcttaaaggctggtttacaagacctggagcagtggtgctctaggacaactgaagagtatgtagggacgtcctgggatgaactgcaacacattaggcaggcagtcgggttcctggttttgcatcagaaatcacacaaaatcctggaggaaattacgaatgagatttgccctgttttgagcataactcaaatataccgcatagcaacgatgttctgggacgacaagtacggtgcacaaggcgtatctcaagaggtcattggaaggatgagaacgatgacaacggacgactcagtaactactccaaacagttcgttcttgctggacgacgactcaagcataccgatatcgttggatgacatagctcggctgatgcttcacatcgatccgtccgatgtggaaccgcccccgctactgaggcagaattctcagtttcactttcttctgcagcagcacacggactgatatcttctacagataaagagcagaatgaatggtacagttacttgtggagttacagggaactgaagatttttttttaggagtgcacagattgagttgtgattttttttcccttccttttttttatggttttgggtgggaaatggctacaaagaaagggaaatatagggtatatcgtgatatcattcatttgattggtttgattgtttggaacagagagatttgtaattatttgaatatgtatataaattatagaagcatctgatcacactgcggcctgtgctacgtggcgacacacgattgggcacctcacgtggaccgtcttctacggtgccctgtgaggtggaggtccggcacgggtcagaacactctggcgactaacacgtacgctcatcgccgggcacggacagaacctatataactcctgggcctgccgtcggaggatcgatcagcaacagcaaaggcacagctcgcaagtgacaagacgaactgaacatccatccgatcgagacaaaggtcatccagcgatgccgccgaagcccagtattctggctctcgttctggtctctcttctttgctcggggtacctgtgcggggcggctgatggcgcggaggcgtggaagaggaggaaggcggcgtcgagtccggtgatcggcatcaacctgggcaccacgtactcgtgcgtcggggtgtaccggaacgggcacgtggacatcgtcgccaacgaccagggcaaccggatcacgccgtcctgggtggcgttcaccgacgacgagcgcctcgtcggcgaggccgccaagaaccaggcgccgctcaacccgcagcgcaccatcttcgatatcaagcgcctcatcggccggaggttcgacgacgaggaggtgcagcgggacgtcaggtacctaccgtacaaggtggtgaacaagggcggcaagccgtacgtggaggtgccgatgaagggcggcgagcggagggcgttcagccccgaggagatcagcgccatgatcctgtccaagatgcgggagacggccgagtcctacctcggccagcgcgtcgccgacgccgtcttcaccgtgccggcccacttcaacgacgcgcagcggctggcaaccaaggaagccggcaccatcgcggggctcaacgtgctgcggatcatcaacgagcccatggccgcggcgatcgcgtacgggctggacagggagggcgcggaggtgaacgtgctcgtgtacgacctcggcggcagcaccttcgacgtcaccgtgctcagcatcgacggcggcgtcttcgaggtgctggccaccagcggcgacacgcacctcggcggcgaggacttcgaccagcgcgtcatggaccatttcatccgcctcatcaggcggaagcacggcagggacatcagcaaggacggccgcgcgctgggcaagctgcggcgcgagtgcgagcgtgcccaggacgcgctcagaagccagcaccaggtgcgcgtcgaggtcgagtccctattcgacggcgtcgacttcgcggagcagctgaccagggccaagttcgaggagctcaacgtggacctgttcaggaagacgctgggccccgtcaacaaggccatcggcgacgccaagctcaataagtctgacatcgacgagattctgctcgtcggcggcagcaccaggatccccaaggtgcaggagctccttagggagatgttcgacggcaaggagcctagcaagggcatcaaccccgacgaggccgtggcctacggagccgccgtccagggcagcatcttcagcgacgagagaggcgccgagaccgaagacaccctgttcgacttcgacatgggacggacacggatgacgctgggggtcgagacggctggcggcgtgatgacgaagctgatcccgcggaacacgttgatcccagtgaagaagtcgcaggtgttcacgacctccgaggaccaccagacgactgtctcgatcaaggtgttcgagagcgagcgcagcctgaccaaggactgccgcgagctggggcggttcaacctgacgggcatcccgcccgcaccccgcggcgtgccgcagattgaggtgaccttcgagttggacgagaaccacatcctccacgtgacggcggcggacaaggcgggcgggcggtccaggtcgatcgccatcaccaacgacatggggcggctcagcaacagccaggaggagatcgaccggatggtgcgcgaggccgaggggttcgcggaggataaccgccgcgtccgggagctcgtcgacgagcggaactgttggctacgcctattctaagaacaaggattcagggaagaagaaacaggaggaagtaggccatagcagttttctgatttcttgatgccgagcacagcgtctgtcttcccttttaccaaacacaaagtagcccatactgcattacatgtacgttacgc

SEQ ID NO: 52427 - DNA, 7462 bp, Zea Mays
  misc_feature (3766)..(3773): n is a, c, g, or t
cgcatctcccgactcccgctgctgtagtgctgtgcactagccaagccagcttgcatattccttctcccccacgctttcccgtgcttccattccaccaccagggccgcggaacgccccgccccgcccggcccccgcgcctcccctttccacctgttcgtcgcgtgcgcattcgttcgcgcagccagcgagccagccaccaccggcccccaccatcgatcgatatcctcctcctgtctctcttgctgctagctctcgcagttccgtccgatcgactatactgatccagctcctgctatgcgcggcggctagctcctcgacgacgagctgatcaatccgacaatccgagtccgccggcgcggatcgtcgatcgatcggccaccagaccatggggactccggtgaacatcatcgtcggctcgcacgtgtggctggaggaccccggcgaggcgtgggtcgacggcgtcgtcaccgagatcaaaggcggcgacgccaccatcgccaccaccaacggcaaaacggtcgtggcgagccttggcagcgtataccccaaggacacggaggcgccgccggcaggagtggacgacatgaccaagctagcctacctccacgagccgggcgtcctgcacaacctctcctgccgacgtacaccgggaacatcttgatcgcggtgaaccccttccagaggctgccgcatctgtacgacgtgcacatgatggagcagtacaagggcgccagcttcggggagctcagccctcatctcttcgccatcgcggacgcctgctacagggcgctcatcaatgaccaggcgagccaagcgatcctggtgagcggcgagagtggcgctggcaagacggagaccaccaagatgctcatgaggtacctcgcattcatgggaggacggtccggcaccgagggacgcaccgttgagcagcaggttctagagtctaacccggtacttgaagcatttggtaacgccaagacagtgaagaacaacaactcaagtcgattcggcaagttcgtggagatccagttcgacaagcatggcaagatatccggggctgccgttcgcacgtatctcctcgagcgatcgcgagtgtgtcaggtctccgatcctgagaggaactaccactgcttctacatgctctgctccgcgccccccgaggacgtgaagaggttcaaggtgggagacccaaggtcgttccattacctgaaccagacgaactgctatgaggtggccaacgtggacgacgcgagagagtacatagaaactagaaacgctatggatatcgttggcatcgatcaagaggaacaggacgcgatcttcagagtagtagcggcgatcctccacctaggaaacatcaacttttccaaagggcaggagatcgactcgtccaagctgagagacgataaatcggtccatcaccttaaaacagttgcggaactgctaatgtgtgacgagaaggccctcgaagactccctctgccagcgtgttattgttacgcctgatgggaacatcacgaagccccttgatccaggctctgcggcgttaagccgtgatgccttggcaaagacagtgtattcacgactgtttgactggatcgtagacaagatcaataactcgattggccaggatccagatgcgaccaatataataggcgtgcttgatatctatggatttgagagcttcaagatcaacagtttcgagcaattatgcatcaatttgacaaacgagaagctgcagcagcacttcaatcagcatgtgtttaagatggagcaagaagaatacacaagggaggaaatagactggagctatgttgaatttgtagacaatcaggatgtgctggacctgattgaaaagaaacctggaggaataattgcactcctggatgaggcatgcatgtttccaaagtctacacatgagacatttgctcaaaagatgtaccaaacgtataaggtccataagcgcttcagcaagcccaagctagctcggacagcctttacgatcaaccattatgcaggggatgtgacgtatcaagcggatcagttccttgataagaacaaagactatgtggtagccgaacaccaggccctactaaattcttcaaggtgcccttttgttgcaaacctcttccctccattacctgaggaaacctctaaacagtccaaattctcttcaattggtactcgctttaagcaacaactgcaatccctcatggaaacactgaatactacagaacctcactacatcagatgtgtcaagcctaatgctgtactcaaacccggcattttcgagaactacaacgtcttgaatcagttgagatgtgggggtgtcctggaagcaattcggatcagctgtgctggttatccaacgaagaggacatttgatgagttcattgatcggtttggaatgcttgcaccggagcttgtcgacagcagcgatgagaaggccgcctgtgcagcgatatgtgatagaatgggtttgaaaggatatcagatagggaaaactaaggtattcctaagagctggtcagatggcagagctggatgctcgaagagcagaaattttggctaatgctgcgcgactaatccaaaggcgtattaagacacatcttatgcgaaaggaattcatcaaattaagaaaagcctcagttcaatctcagaagttctggagagcacgactagctaaaaagatttttgagtatatgaggagagacgctgcttcaattaggatacaaaagcacgtgcgtgcgcattctgccagaaaagcgtacctgcaagtatatgaatcagctacagcaatacaaacaggattacgagcaatggcagctcgcaacgaacacagattccgaagagagaccagggcatccataattatccagactcggtggcgccaacacagagcttatactgcttacaaacagcaacagaaagcttctttgattctccaatgcttgtggagggcacgcattgcaagaaaggaacttcggaaactgagaatggaagcaagagagaccggcgcactgaaagaagcaaaagacaagctagaaaagagagtagaagaactcacatggcggttagacgtcgagaagcgtttgagggctgaccttgaagaagcaaagagccatgaaattgaaaagttgcaatctgcactacaaaaaatgcaagaaaatctcgaggaagcccatgcagcaatagtaaatgagaaagaggctgcaaagttagcgattgaacaggcaccaccaaagatagtagaagtgccggttattgacaatgcgaaacttgaggagttgacaactcaaaataaagaacttgaggatgaactaagtacgtttaaacagaaggctgaggatcttgaaaataagcttattgagttccaaaaacagtctgatgaactgtcacaagagacacaagaacaagcatccaaagttactgaacttcaagagctggtcgaaaggcttgaagcaagtttatccaatatggaatctgaatacccttttctacgacacatactcatgtcctatgagaaagtctcataaactaaaaataataatacatttagcttggaaagcaagatcgccaccttggagtcagagatagagttgctccacagcaattctgcactagctattcaggccgtggttactcctgaaatgaatcagacaacagtaatcgaggaatttgacaagggacaccagcttgaagaagtaaaacggtcaatgtatttgctattatttttacctggcaaacatttatacagtttaagataannnnnnnngcttccacaggaaaaccacgacgccctgattaaaagtatggtagaagacaggagatttgacgacaaaaaatccgctgcagcatgcattgtctacaaatcactcctacactggcattcatttgaagcggagaagactaacatatttgatcgaatcatccaaataattaggtcatcagttgagggagcagaaagttctggagagctagcctattggttgtcgacaacatcaactctcctctacttgttacaaaacactctcaaagctagcagttcattaagtaaaggaacaaatcgcagccggaccacaacaggcagtctgttcagtagaatggtgcagagtgcccggacatcatcaggcttaggcatagctagtggatacagtggaatggtgggaaggcctgacactgatgcatcgatggtagaggcaaaatatccagcacttcggttcaagcaacacttgacagcatatgtcgagaagatatacgggataatcagagataacctgaagaaggaaataagtccgttcttgacaatgtgcatacaggctccaagagctaaccgtgtgaggccatcacggggatcactaaaaagcatacactctaatgcactagctaggcaagcatcaagtctgcattggcaaaacattgtcaagtgcctggatcatacactggaaacgatgaaaaaaaactatgtagctccggtgataatcaggaaaacatttaaccaagtatttgcatacttgaatgtgcaactcttcaacagcttactgcttcgtcgggaatgctgctcttttagcaatggggagttcttaaaggctggtttacaagacctggagcagtggtgctctaggacaactgaagagtatgtagggacgtcctgggatgaactgcaacacattaggcaggcagtcgggttcctggttttgcatcagaaatcacacaaaatcctggaggaaattacgaatgagatttgccctgttttgagcataactcaaatataccgcatagcaacgatgttctgggacgacaagtacggtgcacaaggcgtatctcaagaggtcattggaaggatgagaacgatgacaacggacgactcagtaactactccaaacagttcgttcttgctggacgacgactcaagcataccgatatcgttggatgacatagctcggctgatgcttcacatcgatccgtccgatgtggaaccgcccccgctactgaggcagaattctcagtttcactttcttctgcagcagcacacggactgatatcttctacagataaagagcagaatgaatggtacagttacttgtggagttacagggaactgaagatttttttttaggagtgcacagattgagttgtgattttttttcccttccttttttttatggttttgggtgggaaatggctacaaagaaagggaaatatagggtatatcgtgatatcattcatttgattggtttgattgtttggaacagagagatttgtaattatttgaatatgtatataaattatagaagcatctgatcacactgcggcctgtgctacgtggcgacacacgattgggcacctcacgtggaccgtcttctacggtgccctgtgaggtggaggtccggcacgggtcagaacactctggcgactaacacgtacgctcatcgccgggcacggacagaacctatataactcctgggcctgccgtcggaggatcgatcagcaacagcaaaggcacagctcgcaagtgacaagacgaactgaacatccatccgatcgagacaaaggtcatccagcgatgccgccgaagcccagtattctggctctcgttctggtctctcttctttgctcggggtacctgtgcggggcggctgatggcgcggaggcgtggaagaggaggaaggcggcgtcgagtccggtgatcggcatcaacctgggcaccacgtactcgtgcgtcggggtgtaccggaacgggcacgtggacatcgtcgccaacgaccagggcaaccggatcacgccgtcctgggtggcgttcaccgacgacgagcgcctcgtcggcgaggccgccaagaaccaggcgccgctcaacccgcagcgcaccatcttcgatatcaagcgcctcatcggccggaggttcgacgacgaggaggtgcagcgggacgtcaggtacctaccgtacaaggtggtgaacaagggcggcaagccgtacgtggaggtgccgatgaagggcggcgagcggagggcgttcagccccgaggagatcagcgccatgatcctgtccaagatgcgggagacggccgagtcctacctcggccagcgcgtcgccgacgccgtcttcaccgtgccggcccacttcaacgacgcgcagcggctggcaaccaaggaagccggcaccatcgcggggctcaacgtgctgcggatcatcaacgagcccatggccgcggcgatcgcgtacgggctggacagggagggcgcggaggtgaacgtgctcgtgtacgacctcggcggcagcaccttcgacgtcaccgtgctcagcatcgacggcggcgtcttcgaggtgctggccaccagcggcgacacgcacctcggcggcgaggacttcgaccagcgcgtcatggaccatttcatccgcctcatcaggcggaagcacggcagggacatcagcaaggacggccgcgcgctgggcaagctgcggcgcgagtgcgagcgtgcccaggacgcgctcagaagccagcaccaggtgcgcgtcgaggtcgagtccctattcgacggcgtcgacttcgcggagcagctgaccagggccaagttcgaggagctcaacgtggacctgttcaggaagacgctgggccccgtcaacaaggccatcggcgacgccaagctcaataagtctgacatcgacgagattctgctcgtcggcggcagcaccaggatccccaaggtgcaggagctccttagggagatgttcgacggcaaggagcctagcaagggcatcaaccccgacgaggccgtggcctacggagccgccgtccagggcagcatcttcagcgacgagagaggcgccgagaccgaagacaccctgttcgacttcgacatgggacggacacggatgacgctgggggtcgagacggctggcggcgtgatgacgaagctgatcccgcggaacacgttgatcccagtgaagaagtcgcaggtgttcacgacctccgaggaccaccagacgactgtctcgatcaaggtgttcgagagcgagcgcagcctgaccaaggactgccgcgagctggggcggttcaacctgacgggcatcccgcccgcaccccgcggcgtgccgcagattgaggtgaccttcgagttggacgagaaccacatcctccacgtgacggcggcggacaaggcgggcgggcggtccaggtcgatcgccatcaccaacgacatggggcggctcagcaacagccaggaggagatcgaccggatggtgcgcgaggccgaggggttcgcggaggataaccgccgcgtccgggagctcgtcgacgagcggaactgttggctacgcctattctaagaacaaggattcagggaagaagaaacaggaggaagtaggccatagcagttttctgatttcttgatgccgagcacagcgtctgtcttcccttttaccaaacacaaagtagcccatactgcattacatgtacgttacgc

SEQ ID NO: 52428 - DNA, 7494 bp, Zea Mays
  misc_feature (3798)..(3805): n is a, c, g, or t
cgccaccccacaccgcatctcccgactcccgctgctgtagtgctgtgcactagccaagccagcttgcatattccttctcccccacgctttcccgtgcttccattccaccaccagggccgcggaacgccccgccccgcccggcccccgcgcctcccctttccacctgttcgtcgcgtgcgcattcgttcgcgcagccagcgagccagccaccaccggcccccaccatcgatcgatatcctcctcctgtctctcttgctgctagctctcgcagttccgtccgatcgactatactgatccagctcctgctatgcgcggcggctagctcctcgacgacgagctgatcaatccgacaatccgagtccgccggcgcggatcgtcgatcgatcggccaccagaccatggggactccggtgaacatcatcgtcggctcgcacgtgtggctggaggaccccggcgaggcgtgggtcgacggcgtcgtcaccgagatcaaaggcggcgacgccaccatcgccaccaccaacggcaaaacggtcgtggcgagccttggcagcgtataccccaaggacacggaggcgccgccggcaggagtggacgacatgaccaagctagcctacctccacgagccgggcgtcctgcacaacctctcctgccggtacggcctcaacgagatatacacgtacaccgggaacatcttgatcgcggtgaaccccttccagaggctgccgcatctgtacgacgtgcacatgatggagcagtacaagggcgccagcttcggggagctcagccctcatctcttcgccatcgcggacgcctgctacagggcgctcatcaatgaccaggcgagccaagcgatcctggtgagcggcgagagtggcgctggcaagacggagaccaccaagatgctcatgaggtacctcgcattcatgggaggacggtccggcaccgagggacgcaccgttgagcagcaggttctagagtctaacccggtacttgaagcatttggtaacgccaagacagtgaagaacaacaactcaagtcgattcggcaagttcgtggagatccagttcgacaagcatggcaagatatccggggctgccgttcgcacgtatctcctcgagcgatcgcgagtgtgtcaggtctccgatcctgagaggaactaccactgcttctacatgctctgctccgcgccccccgaggacgtgaagaggttcaaggtgggagacccaaggtcgttccattacctgaaccagacgaactgctatgaggtggccaacgtggacgacgcgagagagtacatagaaactagaaacgctatggatatcgttggcatcgatcaagaggaacaggacgcgatcttcagagtagtagcggcgatcctccacctaggaaacatcaacttttccaaagggcaggagatcgactcgtccaagctgagagacgataaatcggtccatcaccttaaaacagttgcggaactgctaatgtgtgacgagaaggccctcgaagactccctctgccagcgtgttattgttacgcctgatgggaacatcacgaagccccttgatccaggctctgcggcgttaagccgtgatgccttggcaaagacagtgtattcacgactgtttgactggatcgtagacaagatcaataactcgattggccaggatccagatgcgaccaatataataggcgtgcttgatatctatggatttgagagcttcaagatcaacagtttcgagcaattatgcatcaatttgacaaacgagaagctgcagcagcacttcaatcagcatgtgtttaagatggagcaagaagaatacacaagggaggaaatagactggagctatgttgaatttgtagacaatcaggatgtgctggacctgattgaaaagaaacctggaggaataattgcactcctggatgaggcatgcatgtttccaaagtctacacatgagacatttgctcaaaagatgtaccaaacgtataaggtccataagcgcttcagcaagcccaagctagctcggacagcctttacgatcaaccattatgcaggggatgtgacgtatcaagcggatcagttccttgataagaacaaagactatgtggtagccgaacaccaggccctactaaattcttcaaggtgcccttttgttgcaaacctcttccctccattacctgaggaaacctctaaacagtccaaattctcttcaattggtactcgctttaagcaacaactgcaatccctcatggaaacactgaatactacagaacctcactacatcagatgtgtcaagcctaatgctgtactcaaacccggcattttcgagaactacaacgtcttgaatcagttgagatgtgggggtgtcctggaagcaattcggatcagctgtgctggttatccaacgaagaggacatttgatgagttcattgatcggtttggaatgcttgcaccggagcttgtcgacagcgatgagaaggccgcctgtgcagcgatatgtgatagaatgggtttgaaaggatatcagatagggaaaactaaggtattcctaagagctggtcagatggcagagctggatgctcgaagagcagaaattttggctaatgctgcgcgactaatccaaaggcgtattaagacacatcttatgcgaaaggaattcatcaaattaagaaaagcctcagttcaatctcagaagttctggagagcacgactagctaaaaagatttttgagtatatgaggagagacgctgcttcaattaggatacaaaagcacgtgcgtgcgcattctgccagaaaagcgtacctgcaagtatatgaatcagctacagcaatacaaacaggattacgagcaatggcagctcgcaacgaacacagattccgaagagagaccagggcatccataattatccagactcggtggcgccaacacagagcttatactgcttacaaacagcaacagaaagcttctttgattctccaatgcttgtggagggcacgcattgcaagaaaggaacttcggaaactgagaatggaagcaagagagaccggcgcactgaaagaagcaaaagacaagctagaaaagagagtagaagaactcacatggcggttagacgtcgagaagcgtttgagggctgaccttgaagaagcaaagagccatgaaattgaaaagttgcaatctgcactacaaaaaatgcaagaaaatctcgaggaagcccatgcagcaatagtaaatgagaaagaggctgcaaagttagcgattgaacaggcaccaccaaagatagtagaagtgccggttattgacaatgcgaaacttgaggagttgacaactcaaaataaagaacttgaggatgaactaagtacgtttaaacagaaggctgaggatcttgaaaataagcttattgagttccaaaaacagtctgatgaactgtcacaagagacacaagaacaagcatccaaagttactgaacttcaagagctggtcgaaaggcttgaagcaagtttatccaatatggaatctgaatacccttttctacgacacatactcatgtcctatgagaaagtctcataaactaaaaataataatacatttagcttggaaagcaagatcgccaccttggagtcagagatagagttgctccacagcaattctgcactagctattcaggccgtggttactcctgaaatgaatcagacaacagtaatcgaggaatttgacaagggacaccagcttgaagaagtaaaacggtcaatgtatttgctattatttttacctggcaaacatttatacagtttaagataannnnnnnngcttccacaggaaaaccacgacgccctgattaaaagtatggtagaagacaggagatttgacgacaaaaaatccgctgcagcatgcattgtctacaaatcactcctacactggcattcatttgaagcggagaagactaacatatttgatcgaatcatccaaataattaggtcatcagttgagggagcagaaagttctggagagctagcctattggttgtcgacaacatcaactctcctctacttgttacaaaacactctcaaagctagcagttcattaagtaaaggaacaaatcgcagccggaccacaacaggcagtctgttcagtagaatggtgcagagtgcccggacatcatcaggcttaggcatagctagtggatacagtggaatggtgggaaggcctgacactgatgcatcgatggtagaggcaaaatatccagcacttcggttcaagcaacacttgacagcatatgtcgagaagatatacgggataatcagagataacctgaagaaggaaataagtccgttcttgacaatgtgcatacaggctccaagagctaaccgtgtgaggccatcacggggatcactaaaaagcatacactctaatgcactagctaggcaagcatcaagtctgcattggcaaaacattgtcaagtgcctggatcatacactggaaacgatgaaaaaaaactatgtagctccggtgataatcaggaaaacatttaaccaagtatttgcatacttgaatgtgcaactcttcaacagcttactgcttcgtcgggaatgctgctcttttagcaatggggagttcttaaaggctggtttacaagacctggagcagtggtgctctaggacaactgaagagtatgtagggacgtcctgggatgaactgcaacacattaggcaggcagtcgggttcctggttttgcatcagaaatcacacaaaatcctggaggaaattacgaatgagatttgccctgttttgagcataactcaaatataccgcatagcaacgatgttctgggacgacaagtacggtgcacaaggcgtatctcaagaggtcattggaaggatgagaacgatgacaacggacgactcagtaactactccaaacagttcgttcttgctggacgacgactcaagcataccgatatcgttggatgacatagctcggctgatgcttcacatcgatccgtccgatgtggaaccgcccccgctactgaggcagaattctcagtttcactttcttctgcagcagcacacggactgatatcttctacagataaagagcagaatgaatggtacagttacttgtggagttacagggaactgaagatttttttttaggagtgcacagattgagttgtgattttttttcccttccttttttttatggttttgggtgggaaatggctacaaagaaagggaaatatagggtatatcgtgatatcattcatttgattggtttgattgtttggaacagagagatttgtaattatttgaatatgtatataaattatagaagcatctgatcacactgcggcctgtgctacgtggcgacacacgattgggcacctcacgtggaccgtcttctacggtgccctgtgaggtggaggtccggcacgggtcagaacactctggcgactaacacgtacgctcatcgccgggcacggacagaacctatataactcctgggcctgccgtcggaggatcgatcagcaacagcaaaggcacagctcgcaagtgacaagacgaactgaacatccatccgatcgagacaaaggtcatccagcgatgccgccgaagcccagtattctggctctcgttctggtctctcttctttgctcggggtacctgtgcggggcggctgatggcgcggaggcgtggaagaggaggaaggcggcgtcgagtccggtgatcggcatcaacctgggcaccacgtactcgtgcgtcggggtgtaccggaacgggcacgtggacatcgtcgccaacgaccagggcaaccggatcacgccgtcctgggtggcgttcaccgacgacgagcgcctcgtcggcgaggccgccaagaaccaggcgccgctcaacccgcagcgcaccatcttcgatatcaagcgcctcatcggccggaggttcgacgacgaggaggtgcagcgggacgtcaggtacctaccgtacaaggtggtgaacaagggcggcaagccgtacgtggaggtgccgatgaagggcggcgagcggagggcgttcagccccgaggagatcagcgccatgatcctgtccaagatgcgggagacggccgagtcctacctcggccagcgcgtcgccgacgccgtcttcaccgtgccggcccacttcaacgacgcgcagcggctggcaaccaaggaagccggcaccatcgcggggctcaacgtgctgcggatcatcaacgagcccatggccgcggcgatcgcgtacgggctggacagggagggcgcggaggtgaacgtgctcgtgtacgacctcggcggcagcaccttcgacgtcaccgtgctcagcatcgacggcggcgtcttcgaggtgctggccaccagcggcgacacgcacctcggcggcgaggacttcgaccagcgcgtcatggaccatttcatccgcctcatcaggcggaagcacggcagggacatcagcaaggacggccgcgcgctgggcaagctgcggcgcgagtgcgagcgtgcccaggacgcgctcagaagccagcaccaggtgcgcgtcgaggtcgagtccctattcgacggcgtcgacttcgcggagcagctgaccagggccaagttcgaggagctcaacgtggacctgttcaggaagacgctgggccccgtcaacaaggccatcggcgacgccaagctcaataagtctgacatcgacgagattctgctcgtcggcggcagcaccaggatccccaaggtgcaggagctccttagggagatgttcgacggcaaggagcctagcaagggcatcaaccccgacgaggccgtggcctacggagccgccgtccagggcagcatcttcagcgacgagagaggcgccgagaccgaagacaccctgttcgacttcgacatgggacggacacggatgacgctgggggtcgagacggctggcggcgtgatgacgaagctgatcccgcggaacacgttgatcccagtgaagaagtcgcaggtgttcacgacctccgaggaccaccagacgactgtctcgatcaaggtgttcgagagcgagcgcagcctgaccaaggactgccgcgagctggggcggttcaacctgacgggcatcccgcccgcaccccgcggcgtgccgcagattgaggtgaccttcgagttggacgagaaccacatcctccacgtgacggcggcggacaaggcgggcgggcggtccaggtcgatcgccatcaccaacgacatggggcggctcagcaacagccaggaggagatcgaccggatggtgcgcgaggccgaggggttcgcggaggataaccgccgcgtccgggagctcgtcgacgagcggaactgttggctacgcctattctaagaacaaggattcagggaagaagaaacaggaggaagtaggccatagcagttttctgatttcttgatgccgagcacagcgtctgtcttcccttttaccaaacacaaagtagcccatactgcattacatgtacgttacgc

SEQ ID NO: 52429 - DNA, 7594 bp, Zea Mays
  misc_feature (3898)..(3905): n is a, c, g, or t
aattccgatccggccttgatcttctctctccctcctgcctgttccctctaggctctagtagcaaaagggagaggcgaaccagctcagagccggcgaccgccaccccacaccgcatctcccgactcccgctgctgtagtgctgtgcactagccaagccagcttgcatattccttctcccccacgctttcccgtgcttccattccaccaccagggccgcggaacgccccgccccgcccggcccccgcgcctcccctttccacctgttcgtcgcgtgcgcattcgttcgcgcagccagcgagccagccaccaccggcccccaccatcgatcgatatcctcctcctgtctctcttgctgctagctctcgcagttccgtccgatcgactatactgatccagctcctgctatgcgcggcggctagctcctcgacgacgagctgatcaatccgacaatccgagtccgccggcgcggatcgtcgatcgatcggccaccagaccatggggactccggtgaacatcatcgtcggctcgcacgtgtggctggaggaccccggcgaggcgtgggtcgacggcgtcgtcaccgagatcaaaggcggcgacgccaccatcgccaccaccaacggcaaaacggtcgtggcgagccttggcagcgtataccccaaggacacggaggcgccgccggcaggagtggacgacatgaccaagctagcctacctccacgagccgggcgtcctgcacaacctctcctgccggtacggcctcaacgagatatacacgtacaccgggaacatcttgatcgcggtgaaccccttccagaggctgccgcatctgtacgacgtgcacatgatggagcagtacaagggcgccagcttcggggagctcagccctcatctcttcgccatcgcggacgcctgctacagggcgctcatcaatgaccaggcgagccaagcgatcctggtgagcggcgagagtggcgctggcaagacggagaccaccaagatgctcatgaggtacctcgcattcatgggaggacggtccggcaccgagggacgcaccgttgagcagcaggttctagagtctaacccggtacttgaagcatttggtaacgccaagacagtgaagaacaacaactcaagtcgattcggcaagttcgtggagatccagttcgacaagcatggcaagatatccggggctgccgttcgcacgtatctcctcgagcgatcgcgagtgtgtcaggtctccgatcctgagaggaactaccactgcttctacatgctctgctccgcgccccccgaggacgtgaagaggttcaaggtgggagacccaaggtcgttccattacctgaaccagacgaactgctatgaggtggccaacgtggacgacgcgagagagtacatagaaactagaaacgctatggatatcgttggcatcgatcaagaggaacaggacgcgatcttcagagtagtagcggcgatcctccacctaggaaacatcaacttttccaaagggcaggagatcgactcgtccaagctgagagacgataaatcggtccatcaccttaaaacagttgcggaactgctaatgtgtgacgagaaggccctcgaagactccctctgccagcgtgttattgttacgcctgatgggaacatcacgaagccccttgatccaggctctgcggcgttaagccgtgatgccttggcaaagacagtgtattcacgactgtttgactggatcgtagacaagatcaataactcgattggccaggatccagatgcgaccaatataataggcgtgcttgatatctatggatttgagagcttcaagatcaacagtttcgagcaattatgcatcaatttgacaaacgagaagctgcagcagcacttcaatcagcatgtgtttaagatggagcaagaagaatacacaagggaggaaatagactggagctatgttgaatttgtagacaatcaggatgtgctggacctgattgaaaagaaacctggaggaataattgcactcctggatgaggcatgcatgtttccaaagtctacacatgagacatttgctcaaaagatgtaccaaacgtataaggtccataagcgcttcagcaagcccaagctagctcggacagcctttacgatcaaccattatgcaggggatgtgacgtatcaagcggatcagttccttgataagaacaaagactatgtggtagccgaacaccaggccctactaaattcttcaaggtgcccttttgttgcaaacctcttccctccattacctgaggaaacctctaaacagtccaaattctcttcaattggtactcgctttaagcaacaactgcaatccctcatggaaacactgaatactacagaacctcactacatcagatgtgtcaagcctaatgctgtactcaaacccggcattttcgagaactacaacgtcttgaatcagttgagatgtgggggtgtcctggaagcaattcggatcagctgtgctggttatccaacgaagaggacatttgatgagttcattgatcggtttggaatgcttgcaccggagcttgtcgacagcagcgatgagaaggccgcctgtgcagcgatatgtgatagaatgggtttgaaaggatatcagatagggaaaactaaggtattcctaagagctggtcagatggcagagctggatgctcgaagagcagaaattttggctaatgctgcgcgactaatccaaaggcgtattaagacacatcttatgcgaaaggaattcatcaaattaagaaaagcctcagttcaatctcagaagttctggagagcacgactagctaaaaagatttttgagtatatgaggagagacgctgcttcaattaggatacaaaagcacgtgcgtgcgcattctgccagaaaagcgtacctgcaagtatatgaatcagctacagcaatacaaacaggattacgagcaatggcagctcgcaacgaacacagattccgaagagagaccagggcatccataattatccagactcggtggcgccaacacagagcttatactgcttacaaacagcaacagaaagcttctttgattctccaatgcttgtggagggcacgcattgcaagaaaggaacttcggaaactgagaatggaagcaagagagaccggcgcactgaaagaagcaaaagacaagctagaaaagagagtagaagaactcacatggcggttagacgtcgagaagcgtttgagggctgaccttgaagaagcaaagagccatgaaattgaaaagttgcaatctgcactacaaaaaatgcaagaaaatctcgaggaagcccatgcagcaatagtaaatgagaaagaggctgcaaagttagcgattgaacaggcaccaccaaagatagtagaagtgccggttattgacaatgcgaaacttgaggagttgacaactcaaaataaagaacttgaggatgaactaagtacgtttaaacagaaggctgaggatcttgaaaataagcttattgagttccaaaaacagtctgatgaactgtcacaagagacacaagaacaagcatccaaagttactgaacttcaagagctggtcgaaaggcttgaagcaagtttatccaatatggaatctgaatacccttttctacgacacatactcatgtcctatgagaaagtctcataaactaaaaataataatacatttagcttggaaagcaagatcgccaccttggagtcagagatagagttgctccacagcaattctgcactagctattcaggccgtggttactcctgaaatgaatcagacaacagtaatcgaggaatttgacaagggacaccagcttgaagaagtaaaacggtcaatgtatttgctattatttttacctggcaaacatttatacagtttaagataannnnnnnngcttccacaggaaaaccacgacgccctgattaaaagtatggtagaagacaggagatttgacgacaaaaaatccgctgcagcatgcattgtctacaaatcactcctacactggcattcatttgaagcggagaagactaacatatttgatcgaatcatccaaataattaggtcatcagttgagggagcagaaagttctggagagctagcctattggttgtcgacaacatcaactctcctctacttgttacaaaacactctcaaagctagcagttcattaagtaaaggaacaaatcgcagccggaccacaacaggcagtctgttcagtagaatggtgcagagtgcccggacatcatcaggcttaggcatagctagtggatacagtggaatggtgggaaggcctgacactgatgcatcgatggtagaggcaaaatatccagcacttcggttcaagcaacacttgacagcatatgtcgagaagatatacgggataatcagagataacctgaagaaggaaataagtccgttcttgacaatgtgcatacaggctccaagagctaaccgtgtgaggccatcacggggatcactaaaaagcatacactctaatgcactagctaggcaagcatcaagtctgcattggcaaaacattgtcaagtgcctggatcatacactggaaacgatgaaaaaaaactatgtagctccggtgataatcaggaaaacatttaaccaagtatttgcatacttgaatgtgcaactcttcaacagcttactgcttcgtcgggaatgctgctcttttagcaatggggagttcttaaaggctggtttacaagacctggagcagtggtgctctaggacaactgaagagtatgtagggacgtcctgggatgaactgcaacacattaggcaggcagtcgggttcctggttttgcatcagaaatcacacaaaatcctggaggaaattacgaatgagatttgccctgttttgagcataactcaaatataccgcatagcaacgatgttctgggacgacaagtacggtgcacaaggcgtatctcaagaggtcattggaaggatgagaacgatgacaacggacgactcagtaactactccaaacagttcgttcttgctggacgacgactcaagcataccgatatcgttggatgacatagctcggctgatgcttcacatcgatccgtccgatgtggaaccgcccccgctactgaggcagaattctcagtttcactttcttctgcagcagcacacggactgatatcttctacagataaagagcagaatgaatggtacagttacttgtggagttacagggaactgaagatttttttttaggagtgcacagattgagttgtgattttttttcccttccttttttttatggttttgggtgggaaatggctacaaagaaagggaaatatagggtatatcgtgatatcattcatttgattggtttgattgtttggaacagagagatttgtaattatttgaatatgtatataaattatagaagcatctgatcacactgcggcctgtgctacgtggcgacacacgattgggcacctcacgtggaccgtcttctacggtgccctgtgaggtggaggtccggcacgggtcagaacactctggcgactaacacgtacgctcatcgccgggcacggacagaacctatataactcctgggcctgccgtcggaggatcgatcagcaacagcaaaggcacagctcgcaagtgacaagacgaactgaacatccatccgatcgagacaaaggtcatccagcgatgccgccgaagcccagtattctggctctcgttctggtctctcttctttgctcggggtacctgtgcggggcggctgatggcgcggaggcgtggaagaggaggaaggcggcgtcgagtccggtgatcggcatcaacctgggcaccacgtactcgtgcgtcggggtgtaccggaacgggcacgtggacatcgtcgccaacgaccagggcaaccggatcacgccgtcctgggtggcgttcaccgacgacgagcgcctcgtcggcgaggccgccaagaaccaggcgccgctcaacccgcagcgcaccatcttcgatatcaagcgcctcatcggccggaggttcgacgacgaggaggtgcagcgggacgtcaggtacctaccgtacaaggtggtgaacaagggcggcaagccgtacgtggaggtgccgatgaagggcggcgagcggagggcgttcagccccgaggagatcagcgccatgatcctgtccaagatgcgggagacggccgagtcctacctcggccagcgcgtcgccgacgccgtcttcaccgtgccggcccacttcaacgacgcgcagcggctggcaaccaaggaagccggcaccatcgcggggctcaacgtgctgcggatcatcaacgagcccatggccgcggcgatcgcgtacgggctggacagggagggcgcggaggtgaacgtgctcgtgtacgacctcggcggcagcaccttcgacgtcaccgtgctcagcatcgacggcggcgtcttcgaggtgctggccaccagcggcgacacgcacctcggcggcgaggacttcgaccagcgcgtcatggaccatttcatccgcctcatcaggcggaagcacggcagggacatcagcaaggacggccgcgcgctgggcaagctgcggcgcgagtgcgagcgtgcccaggacgcgctcagaagccagcaccaggtgcgcgtcgaggtcgagtccctattcgacggcgtcgacttcgcggagcagctgaccagggccaagttcgaggagctcaacgtggacctgttcaggaagacgctgggccccgtcaacaaggccatcggcgacgccaagctcaataagtctgacatcgacgagattctgctcgtcggcggcagcaccaggatccccaaggtgcaggagctccttagggagatgttcgacggcaaggagcctagcaagggcatcaaccccgacgaggccgtggcctacggagccgccgtccagggcagcatcttcagcgacgagagaggcgccgagaccgaagacaccctgttcgacttcgacatgggacggacacggatgacgctgggggtcgagacggctggcggcgtgatgacgaagctgatcccgcggaacacgttgatcccagtgaagaagtcgcaggtgttcacgacctccgaggaccaccagacgactgtctcgatcaaggtgttcgagagcgagcgcagcctgaccaaggactgccgcgagctggggcggttcaacctgacgggcatcccgcccgcaccccgcggcgtgccgcagattgaggtgaccttcgagttggacgagaaccacatcctccacgtgacggcggcggacaaggcgggcgggcggtccaggtcgatcgccatcaccaacgacatggggcggctcagcaacagccaggaggagatcgaccggatggtgcgcgaggccgaggggttcgcggaggataaccgccgcgtccgggagctcgtcgacgagcggaactgttggctacgcctattctaagaacaaggattcagggaagaagaaacaggaggaagtaggccatagcagttttctgatttcttgatgccgagcacagcgtctgtcttcccttttaccaaacacaaagtagcccatactgcattacatgtacgttacgc

SEQ ID NO: 52430 - DNA, 6343 bp, Zea Mays
cgcgagagcactctagtctcgagcacagcacaaggccgccggtcccttctctcccactcccactactcgcgctcgccgctggatcctccacccgccgcggcgccaggccggagatccagcagctgggaccacggaggtcggccggttgctccgttcccgctggtggttgctcttcggccgctggagatcggcagacggaagcagttgacgccacagggcttcgtgctgccgaattccccagatattctgggggttcaaccgaacccccatgcccgacaacactgggcttgaaattggccttaaaggctccaagggagccccaatgccaggaacggaaggaagagtggcaaaggatttgaagaaagctcctgcctccttggaggaaagcaatgcttctcgtgatgaggatcctggcggagggcctgccttgactgggaagaaaaggaaggaccggaggggttccgcggatgacaacaggaatgtgacaagaagggtgttgaggtccgacgccatgaagctgcgtgctgaggctgaggcaccatgtggagcgggtgtggaggttagcaaaactgatagtttggagaggaaacactgtgacactactgtggaggctgaggcttgcaaaagtagtgtgctgatggaagttgcctgcaatggtggggaagccaacggattagttaacttggatgcgagcgatgtttcggaagaatcaactaggtgttctgataataatatgggaatgcctggtgttcctgcaacagatttttctcaagatggtggcttagctcaaggtagcattgcagaatcagatgataagacagtcaagtcagatgaggtgtccgctgtaactcattcagagcagaatgactcccaagctggaataaacagttataatgctgatgaggcccaagataacaaagtgagacatgggccttgtcaggatgaggtcatagactcagcaattactaatggtgccaacacaagtacagatttaaccaaaaccagccctaccagtggatcagaatctgttaagcaggatgatagtaagcaggagaataatttggttcatactgaaggagtgatactccacagtggtgatccgaaagttgagaatcattctcaaattgaggacacttgtacagaaactgagatttctttgactgggaatggaagatgtgcagctgataaccacactgatcgaactgggtacactaagcaggaggagaggggcagccctgtgaacgaaaccaatgatatttcggcacatgacattgtttttacaaggagaggtagaaaatcatgtgaggcaaagcaggggacatgtgaagaggagtcacggtttgagaagcgagttacgagatcagctacagttagacagagagaagtttctggaagcttatgcaaaactaccacgaatgagactgcactaggaagcagagggaggaagggagatattattgctcactatacaaggaaagtgagcagtgcagtatctccaaaaggtcaccatgctgagctgggagaatgtaataccagtatggagaatcaaacagtgaaacaaaaggtggttgatcgaagagattcaggtgccactaagaatgataatgatgcgaatgacacaaagaataaggaatcagaaaagacagagatcaatctgaagacgcaaccacctgttggaagtgttagcattgtaaataaaacaactgtaggagctgtttctgtggtgggtcagagtatctctggttcagccatcactgagagaaatgatacagatcatactgattctgatggagttaaatatgaaaatatgactcttgtgcagaaactactactgtctgttggcgcgaagattgttgccagcaagaagagggtattggaagcaggtcctgataaaaccactggaaggtcaccaattgctttgccatccatgaaaaagacaagaaatacgtcttctgatcctgagatagatcaacctgataagtcttctggagagaagcttattggaaataactgtgatttgggcaataaacgtgttttgagggaacggcagcatcagaatcaaacatatttgtcaagcaggtcttctaaccagtctaatcaaaatgctatcaagcagacacaggatcaatctgacgatgatgacatcagcagcgatacttcctacaggagaactcgtagcggacgtcgtcgtggtgctgcccgtcttgccgtgccaaaacaagaggactccagtgattctgaagaagttgttgttgtgaaaaagaatcgacggaaacgtaagaaatctgtgcataaacacagggctggatctaagttgaagcatacttctggtagtcctcccaaaacaggtcgtttgggtagacctccacttgtcaaatctgaatgtggctgcttacctctgcagccaggaaaagggaaaatgaatgtgcctgaaggtacaggagctctacgcgaagaaaaacaaaaaataagtgatcagataaaggccatgcttctagatgctggttggacaattgatttaagacccaggaatggtagaaactacatggattccgtgtatatacatcctagtggcaaagggtcttactggtcagttacaaaagcatattacgtgttccgtgcagatatggaatctgagcagaaggaaagttctaaagaccatattctgtcaaaaaaatctgttggtagccccggcaaaaggcaggtctctagttcttcaggctgtactttaacagatgatatccttagcaaattaaaaagagttgttgtaaacaaacgaacaaccaaagtagagattcaaaggttgagacagaagaaggaaaagaagaatactacaaattcaacaagattgcatttaggcaatgaaagaaaaaagagaggtggctgtgctctactcgttcgtggatcgaacaaggagtctggcagcaccactgatggttttgttccatatgaatggaaacgtacgatcttctcctggctgattgatctgaatgttctatcagtcaatactaagctgaactgtttggatgaaagccactcaaaggttttactagagggttttgtcactagggatgggattaactgcagctgctgtagcgaggtcatttcagtgccagaatttgtgactcatgctggttctgaagtaaataagccatacagaaacatacttgtggatgggctagacattgaccttttgcactgtctcattaatgcatggaatatgcagtctgatgctgaaagacaagatttctttcccgttagcattgagggagatgaccccaatgatgacacctgtggtatttgtggagatggaggcaatttgatctgttgtgatggatgcccctcgacatttcacatgagttgtctaggactggaggcacttcccactgattattggtgttgttccaactgctcatgtaaattttgccatgaacattctagtgatgatgctgaagacactgctgatgttgattcttcattgcatacttgttcccagattcataacatatggtatcatgagtcaggtatcctttccatgacttctgctgcggacgatgtacgcacatggcgtgaggagctcgctcgtgccagggcagatctggagcaggcccgatctgctatcctccagctagtgatctactcacggcaaaggtggagtctgactgccgatcagcggcgacaacgcgactgcaggaggctgtgcatgggttcctggcgtgacgtccagtgtggcagcggcttgccgtcttcaggctacgacacgtggcttcctggcgcggcgtcaagcacagcaagcagcggcttgccctcttcaggttgcggcacttggcttcctgacgtggcgtcaagcacgacaagcggcaacacggttgcaggctacggccttcagcagggttggccgatccttagccatgtggacagcaagaacaagtctggttgggtggtgctgtctccactggaactcgcggtagctcaggccgtaagactggtgagctgccacgtcttggcctttgcagcctggaagaggttgttcccatgggatccagggtggcatatgttaggttctttattttatttgttaataaattaaagcggagatgtaaaaggcttatagttagggttgcactttcacatgcatatcaagttagacagcaaggttgtttccatgcaccgagaacgagctgtcttcaaagggtgggggaatgtcatgtggtggcagcccagggcatggaggcccatagggataggctcagggttaggattagtgaataaagattagataagattgacttagatacttgggattagattagataaaataagattgagttagttacttgagagccgagtcttcgtatctatacaaggatgggctgtacctccttaagaagaaaaaggaatgaagaagaattagtcccagatctctccaatagtctggtctctctcaagccgactccgcctgactaccttccggcgctgtttatcacccctatgaactaggattcaaaacatatttgaactattatttagtgacttgagaaccttgtcattttaatccagctattaaaagctctactcttcttttggattgagtcgctatatttttatttctgaaactagacagttggtatttagtcataagaaatgtgtaatgcaaaaacaccatggaagttgtgtatttttgaaaatgctgtattaaacactattttttaccatcaaatcaaacacacatcctgtctagatcctttctatctatttgtggttttatttatcttctagtttattaatgtatgtataccctccctacaagccgcaactgacccaagaacttccaaacttcaaatggtatagttgcataatctgaaattactagttctgtgatgcagctgtttgaggaattgcagaatcttctcgcagtcaagaaggatcttgaaccagaatactcatgcagagttgttcaacgcatccatgaagaggtaccagaagaagtccttgctttggacaaaagagttgagtgtaactccaagattgctgttgcactctcattaatggacgagtgcttccttccgattgttgaccagagaactggcatcaacttgatacgcaatgttgtgtataactgtggatcaaattttgcccgattggatttccgtggattctatataattattttagaacgtggagatgaaataatagctgcagcatctgtccgaatacatggaaccaagttagctgagatgccgttcattggtacccggaatatgtataggcgacaagggatgtgccgccgacttgttgatggaattgaaatgatcctcagctctctcaatattgagaagctgatcattcctgctatcacagaacttgtggacacctggacatctaaatttggatttagtccactggacgattctgagaagcaggaagtgaaatccgttagcatgttagtttttcctggtacaggtcttctccaaaagccattgctgaagacctcaccatcggaagatcaatgctcccaaggagacaaaactgaaaaatcatctgatgtagtcaatgaagattcgctttgctctggtgcaagtgccgaccccctaggttcggtggtcaaagagcatggggacaccagcaaagatgccgatggtacttgcaacggtgatgtttcacagcgatctcctctttcctgatggtaagatttggttgcagctttctgggcccccccaagctttatatggacgaaacctccgtttgtttttgtacctctcgagttttgactcagcagccagcatgacaaccatccgtttggcagaaagaggcttccggttttttgcagattagttgccggggcacccctgtagttgtactcagaatttgaccattgactcgtcggcctgggaaaagaatcagcccgtgcagtactgaaaagcgtttactccaaccaggaaccagctaacttactgtgcagctgaaaagtcagtatgcagaatgtggaggataatatcacttcttttgtttttttttggtcgttaacttagaactccgagggcgagtcgtcgtaaatgttacaccagttgttattttgttaatagctttttttttaaaaatgttttcgctagcgcattcctagaaccttctcatttctgtaagatagttctcgcctctgtaagataaactaatgtatgcgcaagctagaaatagtccgcctgatccgtcacgcggaattggttacctaaaccctgttaatgtttcgttttgcatcgtgttggaatgtgtgtgttcttcctgtgaaggaaagcttttgcgggtcattatactagagcgaaaccatatcatcgtttgagatgtg

SEQ ID NO: 52431 - DNA, 5040 bp, Zea Mays
cgcgagagcactctagtctcgagcacagcacaaggccgccggtcccttctctcccactcccactactcgcgctcgccgctggatcctccacccgccgcggcgccaggccggagatccagcagctgggaccacggaggtcggccggttgctccgttcccgctggtggttgctcttcggccgctggagatcggcagacggaagcagttgacgccacagggcttcgtgctgccgaattccccagatattctgggggttcaaccgaacccccatgcccgacaacactgggcttgaaattggccttaaaggctccaagggagccccaatgccaggaacggaaggaagagtggcaaaggatttgaagaaagctcctgcctccttggaggaaagcaatgcttctcgtgatgaggatcctggcggagggcctgccttgactgggaagaaaaggaaggaccggaggggttccgcggatgacaacaggaatgtgacaagaagggtgttgaggtccgacgccatgaagctgcgtgctgaggctgaggcaccatgtggagcgggtgtggaggttagcaaaactgatagtttggagaggaaacactgtgacactactgtggaggctgaggcttgcaaaagtagtgtgctgatggaagttgcctgcaatggtggggaagccaacggattagttaacttggatgcgagcgatgtttcggaagaatcaactaggtgttctgataataatatgggaatgcctggtgttcctgcaacagatttttctcaagatggtggcttagctcaaggtagcattgcagaatcagatgataagacagtcaagtcagatgaggtgtccgctgtaactcattcagagcagaatgactcccaagctggaataaacagttataatgctgatgaggcccaagataacaaagtgagacatgggccttgtcaggatgaggtcatagactcagcaattactaatggtgccaacacaagtacagatttaaccaaaaccagccctaccagtggatcagaatctgttaagcaggatgatagtaagcaggagaataatttggttcatactgaaggagtgatactccacagtggtgatccgaaagttgagaatcattctcaaattgaggacacttgtacagaaactgagatttctttgactgggaatggaagatgtgcagctgataaccacactgatcgaactgggtacactaagcaggaggagaggggcagccctgtgaacgaaaccaatgatatttcggcacatgacattgtttttacaaggagaggtagaaaatcatgtgaggcaaagcaggggacatgtgaagaggagtcacggtttgagaagcgagttacgagatcagctacagttagacagagagaagtttctggaagcttatgcaaaactaccacgaatgagactgcactaggaagcagagggaggaagggagatattattgctcactatacaaggaaagtgagcagtgcagtatctccaaaaggtcaccatgctgagctgggagaatgtaataccagtatggagaatcaaacagtgaaacaaaaggtggttgatcgaagagattcaggtgccactaagaatgataatgatgcgaatgacacaaagaataaggaatcagaaaagacagagatcaatctgaagacgcaaccacctgttggaagtgttagcattgtaaataaaacaactgtaggagctgtttctgtggtgggtcagagtatctctggttcagccatcactgagagaaatgatacagatcatactgattctgatggagttaaatatgaaaatatgactcttgtgcagaaactactactgtctgttggcgcgaagattgttgccagcaagaagagggtattggaagcaggtcctgataaaaccactggaaggtcaccaattgctttgccatccatgaaaaagacaagaaatacgtcttctgatcctgagatagatcaacctgataagtcttctggagagaagcttattggaaataactgtgatttgggcaataaacgtgttttgagggaacggcagcatcagaatcaaacatatttgtcaagcaggtcttctaaccagtctaatcaaaatgctatcaagcagacacaggatcaatctgacgatgatgacatcagcagcgatacttcctacaggagaactcgtagcggacgtcgtcgtggtgctgcccgtcttgccgtgccaaaacaagaggactccagtgattctgaagaagttgttgttgtgaaaaagaatcgacggaaacgtaagaaatctgtgcataaacacagggctggatctaagttgaagcatacttctggtagtcctcccaaaacaggtcgtttgggtagacctccacttgtcaaatctgaatgtggctgcttacctctgcagccaggaaaagggaaaatgaatgtgcctgaaggtacaggagctctacgcgaagaaaaacaaaaaataagtgatcagataaaggccatgcttctagatgctggttggacaattgatttaagacccaggaatggtagaaactacatggattccgtgtatatacatcctagtggcaaagggtcttactggtcagttacaaaagcatattacgtgttccgtgcagatatggaatctgagcagaaggaaagttctaaagaccatattctgtcaaaaaaatctgttggtagccccggcaaaaggcaggtctctagttcttcaggctgtactttaacagatgatatccttagcaaattaaaaagagttgttgtaaacaaacgaacaaccaaagtagagattcaaaggttgagacagaagaaggaaaagaagaatactacaaattcaacaagattgcatttaggcaatgaaagaaaaaagagaggtggctgtgctctactcgttcgtggatcgaacaaggagtctggcagcaccactgatggttttgttccatatgaatggaaacgtacgatcttctcctggctgattgatctgaatgttctatcagtcaatactaagctgaactgtttggatgaaagccactcaaaggttttactagagggttttgtcactagggatgggattaactgcagctgctgtagcgaggtcatttcagtgccagaatttgtgactcatgctggttctgaagtaaataagccatacagaaacatacttgtggatgggctagacattgaccttttgcactgtctcattaatgcatggaatatgcagtctgatgctgaaagacaagatttctttcccgttagcattgagggagatgaccccaatgatgacacctgtggtatttgtggagatggaggcaatttgatctgttgtgatggatgcccctcgacatttcacatgagttgtctaggactggaggcacttcccactgattattggtgttgttccaactgctcatgtaaattttgccatgaacattctagtgatgatgctgaagacactgctgatgttgattcttcattgcatacttgttcccagtgcgaagagcagtatcatggagcctgctctcctgatattgattccatagctactaatctttctagtcagacaggcaatttattctgccaacaaagctgcagactgaatcttctcgcagtcaagaaggatcttgaaccagaatactcatgcagagttgttcaacgcatccatgaagaggtaccagaagaagtccttgctttggacaaaagagttgagtgtaactccaagattgctgttgcactctcattaatggacgagtgcttccttccgattgttgaccagagaactggcatcaacttgatacgcaatgttgtgtataactgtggatcaaattttgcccgattggatttccgtggattctatataattattttagaacgtggagatgaaataatagctgcagcatctgtccgaatacatggaaccaagttagctgagatgccgttcattggtacccggaatatgtataggcgacaagggatgtgccgccgacttgttgatggaattgaaatgatcctcagctctctcaatattgagaagctgatcattcctgctatcacagaacttgtggacacctggacatctaaatttggatttagtccactggacgattctgagaagcaggaagtgaaatccgttagcatgttagtttttcctggtacaggtcttctccaaaagccattgctgaagacctcaccatcggaagatcaatgctcccaaggagacaaaactgaaaaatcatctgatgtagtcaatgaagattcgctttgctctggtgcaagtgccgaccccctaggttcggtggtcaaagagcatggggacaccagcaaagatgccgatggtacttgcaacggtgatgtttcacagcgatctcctctttcctgatggtaagatttggttgcagctttctgggcccccccaagctttatatggacgaaacctccgtttgtttttgtacctctcgagttttgactcagcagccagcatgacaaccatccgtttggcagaaagaggcttccggttttttgcagattagttgccggggcacccctgtagttgtactcagaatttgaccattgactcgtcggcctgggaaaagaatcagcccgtgcagtactgaaaagcgtttactccaaccaggaaccagctaacttactgtgcagctgaaaagtcagtatgcagaatgtggaggataatatcacttcttttgtttttttttggtcgttaacttagaactccgagggcgagtcgtcgtaaatgttacaccagttgttattttgttaatagctttttttttaaaaatgttttcgctagcgcattcctagaaccttctcatttctgtaagatagttctcgcctctgtaagataaactaatgtatgcgcaagctagaaatagtccgcctgatccgtcacgcggaattggttacctaaaccctgttaatgtttcgttttgcatcgtgttggaatgtgtgtgttcttcctgtgaaggaaagcttttgcgggtcattatactagagcgaaaccatatcatcgtttgagatgtg

SEQ ID NO: 52432 - DNA, 6300 bp, Zea Mays
cgcgagagcactctagtctcgagcacagcacaaggccgccggtcccttctctcccactcccactactcgcgctcgccgctggatcctccacccgccgcggcgccaggccggagatccagcagctgggaccacggaggtcggccggttgctccgttcccgctggtggttgctcttcggccgctggagatcggcagacggaagcagttgacgccacagggcttcgtgctgccgaattccccagatattctgggggttcaaccgaacccccatgcccgacaacactgggcttgaaattggccttaaaggctccaagggagccccaatgccaggaacggaaggaagagtggcaaaggatttgaagaaagctcctgcctccttggaggaaagcaatgcttctcgtgatgaggatcctggcggagggcctgccttgactgggaagaaaaggaaggaccggaggggttccgcggatgacaacaggaatgtgacaagaagggtgttgaggtccgacgccatgaagctgcgtgctgaggctgaggcaccatgtggagcgggtgtggaggttagcaaaactgatagtttggagaggaaacactgtgacactactgtggaggctgaggcttgcaaaagtagtgtgctgatggaagttgcctgcaatggtggggaagccaacggattagttaacttggatgcgagcgatgtttcggaagaatcaactaggtgttctgataataatatgggaatgcctggtgttcctgcaacagatttttctcaagatggtggcttagctcaaggtagcattgcagaatcagatgataagacagtcaagtcagatgaggtgtccgctgtaactcattcagagcagaatgactcccaagctggaataaacagttataatgctgatgaggcccaagataacaaagtgagacatgggccttgtcaggatgaggtcatagactcagcaattactaatggtgccaacacaagtacagatttaaccaaaaccagccctaccagtggatcagaatctgttaagcaggatgatagtaagcaggagaataatttggttcatactgaaggagtgatactccacagtggtgatccgaaagttgagaatcattctcaaattgaggacacttgtacagaaactgagatttctttgactgggaatggaagatgtgcagctgataaccacactgatcgaactgggtacactaagcaggaggagaggggcagccctgtgaacgaaaccaatgatatttcggcacatgacattgtttttacaaggagaggtagaaaatcatgtgaggcaaagcaggggacatgtgaagaggagtcacggtttgagaagcgagttacgagatcagctacagttagacagagagaagtttctggaagcttatgcaaaactaccacgaatgagactgcactaggaagcagagggaggaagggagatattattgctcactatacaaggaaagtgagcagtgcagtatctccaaaaggtcaccatgctgagctgggagaatgtaataccagtatggagaatcaaacagtgaaacaaaaggtggttgatcgaagagattcaggtgccactaagaatgataatgatgcgaatgacacaaagaataaggaatcagaaaagacagagatcaatctgaagacgcaaccacctgttggaagtgttagcattgtaaataaaacaactgtaggagctgtttctgtggtgggtcagagtatctctggttcagccatcactgagagaaatgatacagatcatactgattctgatggagttaaatatgaaaatatgactcttgtgcagaaactactactgtctgttggcgcgaagattgttgccagcaagaagagggtattggaagcaggtcctgataaaaccactggaaggtcaccaattgctttgccatccatgaaaaagacaagaaatacgtcttctgatcctgagatagatcaacctgataagtcttctggagagaagcttattggaaataactgtgatttgggcaataaacgtgttttgagggaacggcagcatcagaatcaaacatatttgtcaagcaggtcttctaaccagtctaatcaaaatgctatcaagcagacacaggatcaatctgacgatgatgacatcagcagcgatacttcctacaggagaactcgtagcggacgtcgtcgtggtgctgcccgtcttgccgtgccaaaacaagaggactccagtgattctgaagaagttgttgttgtgaaaaagaatcgacggaaacgtaagaaatctgtgcataaacacagggctggatctaagttgaagcatacttctggtagtcctcccaaaacaggtcgtttgggtagacctccacttgtcaaatctgaatgtggctgcttacctctgcagccaggaaaagggaaaatgaatgtgcctgaaggtacaggagctctacgcgaagaaaaacaaaaaataagtgatcagataaaggccatgcttctagatgctggttggacaattgatttaagacccaggaatggtagaaactacatggattccgtgtatatacatcctagtggcaaagggtcttactggtcagttacaaaagcatattacgtgttccgtgcagatatggaatctgagcagaaggaaagttctaaagaccatattctgtcaaaaaaatctgttggtagccccggcaaaaggcaggtctctagttcttcaggctgtactttaacagatgatatccttagcaaattaaaaagagttgttgtaaacaaacgaacaaccaaagtagagattcaaaggttgagacagaagaaggaaaagaagaatactacaaattcaacaagattgcatttaggcaatgaaagaaaaaagagaggtggctgtgctctactcgttcgtggatcgaacaaggagtctggcagcaccactgatggttttgttccatatgaatggaaacgtacgatcttctcctggctgattgatctgaatgttctatcagtcaatactaagctgaactgtttggatgaaagccactcaaaggttttactagagggttttgtcactagggatgggattaactgcagctgctgtagcgaggtcatttcagtgccagaatttgtgactcatgctggttctgaagtaaataagccatacagaaacatacttgtggatgggctagacattgaccttttgcactgtctcattaatgcatggaatatgcagtctgatgctgaaagacaagatttctttcccgttagcattgagggagatgaccccaatgatgacacctgtggtatttgtggagatggaggcaatttgatctgttgtgatggatgcccctcgacatttcacatgagttgtctaggactggaggcacttcccactgattattggtgttgttccaactgctcatgtaaattttgccatgaacattctagtgatgatgctgaagacactgctgatgttgattcttcattgcatacttgttcccagattcataacatatggtatcatgagtcaggtatcctttccatgacttctgctgcggacgatgtacgcacatggcgtgaggagctcgctcgtgccagggcagatctggagcaggcccgatctgctatcctccagctagtgatctactcacggcaaaggtggagtctgactgccgatcagcggcgacaacgcgactgcaggaggctgtgcatgggttcctggcgtgacgtccagtgtggcagcggcttgccgtcttcaggctacgacacgtggcttcctggcgcggcgtcaagcacagcaagcagcggcttgccctcttcaggttgcggcacttggcttcctgacgtggcgtcaagcacgacaagcggcaacacggttgcaggctacggccttcagcagggttggccgatccttagccatgtggacagcaagaacaagtctggttgggtggtgctgtctccactggaactcgcggtagctcaggccgtaagactggtgagctgccacgtcttggcctttgcagcctggaagaggttgttcccatgggatccagggtggcatatgttaggttctttattttatttgttaataaattaaagcggagatgtaaaaggcttatagttagggttgcactttcacatgcatatcaagttagacagcaaggttgtttccatgcaccgagaacgagctgtcttcaaagggtgggggaatgtcatgtggtggcagcccagggcatggaggcccatagggataggctcagggttaggattagtgaataaagattagataagattgacttagatacttgggattagattagataaaataagattgagttagttacttgagagccgagtcttcgtatctatacaaggatgggctgtacctccttaagaagaaaaaggaatgaagaagaattagtcccagatctctccaatagtctggtctctctcaagccgactccgcctgactaccttccggcgctgtttatcacccctatgaactaggattcaaaacatatttgaactattatttagtgacttgagaaccttgtcattttaatccagctattaaaagctctactcttcttttggattgagtcgctatatttttatttctgaaactagacagttggtatttagtcataagaaatgtgtaatgcaaaaacaccatggaagttgtgtatttttgaaaatgctgtattaaacactattttttaccatcaaatcaaacacacatcctgtctagatcctttctatctatttgtggttttatttatcttctagtttattaatgtatgtataccctccctacaagccgcaactgacccaagaacttccaaacttcaaatggtatagttgcataatctgaaattactagttctgtgatgcagctgtttgaggaattgcagaatcttctcgcagtcaagaaggatcttgaaccagaatactcatgcagagttgttcaacgcatccatgaagaggtaccagaagaagtccttgctttggacaaaagagttgagtgtaactccaagattgctgttgcactctcattaatggacgagtgcttccttccgattgttgaccagagaactggcatcaacttgatacgcaatgttgtgtataactgtggatcaaattttgcccgattggatttccgtggattctatataattattttagaacgtggagatgaaataatagctgcagcatctgtccgaatacatggaaccaagttagctgagatgccgttcattggtacccggaatatgtataggcgacaagggatgtgccgccgacttgttgatggaattgaaatgatcctcagctctctcaatattgagaagctgatcattcctgctatcacagaacttgtggacacctggacatctaaatttggatttagtccactggacgattctgagaagcaggaagtgaaatccgttagcatgttagtttttcctggtacaggtcttctccaaaagccattgctgaagacctcaccatcggaagatcaatgctcccaaggagacaaaactgaaaaatcatctgatgtagtcaatgaagattcgctttgctctggtgcaagtgccgaccccctaggttcggtggtcaaagagcatggggacaccagcaaagatgccgatgatggtaagatttggttgcagctttctgggcccccccaagctttatatggacgaaacctccgtttgtttttgtacctctcgagttttgactcagcagccagcatgacaaccatccgtttggcagaaagaggcttccggttttttgcagattagttgccggggcacccctgtagttgtactcagaatttgaccattgactcgtcggcctgggaaaagaatcagcccgtgcagtactgaaaagcgtttactccaaccaggaaccagctaacttactgtgcagctgaaaagtcagtatgcagaatgtggaggataatatcacttcttttgtttttttttggtcgttaacttagaactccgagggcgagtcgtcgtaaatgttacaccagttgttattttgttaatagctttttttttaaaaatgttttcgctagcgcattcctagaaccttctcatttctgtaagatagttctcgcctctgtaagataaactaatgtatgcgcaagctagaaatagtccgcctgatccgtcacgcggaattggttacctaaaccctgttaatgtttcgttttgcatcgtgttggaatgtgtgtgttcttcctgtgaaggaaagcttttgcgggtcattatactagagcgaaaccatatcatcgtttgagatgtg

SEQ ID NO: 52433 - DNA, 6398 bp, Zea Mays
cgcgagagcactctagtctcgagcacagcacaaggccgccggtcccttctctcccactcccactactcgcgctcgccgctggatcctccacccgccgcggcgccaggccggagatccagcagctgggaccacggaggtcggccggttgctccgttcccgctggtggttgctcttcggccgctggagatcggcagacggaagcagttgacgccacagggcttcgtgctgccgaattccccagatattctgggggttcaaccgaacccccatgcccgacaacactgggcttgaaattggccttaaaggctccaagggagccccaatgccaggaacggaaggaagagtggcaaaggatttgaagaaagctcctgcctccttggaggaaagcaatgcttctcgtgatgaggatcctggcggagggcctgccttgactgggaagaaaaggaaggaccggaggggttccgcggatgacaacaggaatgtgacaagaagggtgttgaggtccgacgccatgaagctgcgtgctgaggctgaggcaccatgtggagcgggtgtggaggttagcaaaactgatagtttggagaggaaacactgtgacactactgtggaggctgaggcttgcaaaagtagtgtgctgatggaagttgcctgcaatggtggggaagccaacggattagttaacttggatgcgagcgatgtttcggaagaatcaactaggtgttctgataataatatgggaatgcctggtgttcctgcaacagatttttctcaagatggtggcttagctcaaggtagcattgcagaatcagatgataagacagtcaagtcagatgaggtgtccgctgtaactcattcagagcagaatgactcccaagctggaataaacagttataatgctgatgaggcccaagataacaaagtgagacatgggccttgtcaggatgaggtcatagactcagcaattactaatggtgccaacacaagtacagatttaaccaaaaccagccctaccagtggatcagaatctgttaagcaggatgatagtaagcaggagaataatttggttcatactgaaggagtgatactccacagtggtgatccgaaagttgagaatcattctcaaattgaggacacttgtacagaaactgagatttctttgactgggaatggaagatgtgcagctgataaccacactgatcgaactgggtacactaagcaggaggagaggggcagccctgtgaacgaaaccaatgatatttcggcacatgacattgtttttacaaggagaggtagaaaatcatgtgaggcaaagcaggggacatgtgaagaggagtcacggtttgagaagcgagttacgagatcagctacagttagacagagagaagtttctggaagcttatgcaaaactaccacgaatgagactgcactaggaagcagagggaggaagggagatattattgctcactatacaaggaaagtgagcagtgcagtatctccaaaaggtcaccatgctgagctgggagaatgtaataccagtatggagaatcaaacagtgaaacaaaaggtggttgatcgaagagattcaggtgccactaagaatgataatgatgcgaatgacacaaagaataaggaatcagaaaagacagagatcaatctgaagacgcaaccacctgttggaagtgttagcattgtaaataaaacaactgtaggagctgtttctgtggtgggtcagagtatctctggttcagccatcactgagagaaatgatacagatcatactgattctgatggagttaaatatgaaaatatgactcttgtgcagaaactactactgtctgttggcgcgaagattgttgccagcaagaagagggtattggaagcaggtcctgataaaaccactggaaggtcaccaattgctttgccatccatgaaaaagacaagaaatacgtcttctgatcctgagatagatcaacctgataagtcttctggagagaagcttattggaaataactgtgatttgggcaataaacgtgttttgagggaacggcagcatcagaatcaaacatatttgtcaagcaggtcttctaaccagtctaatcaaaatgctatcaagcagacacaggatcaatctgacgatgatgacatcagcagcgatacttcctacaggagaactcgtagcggacgtcgtcgtggtgctgcccgtcttgccgtgccaaaacaagaggactccagtgattctgaagaagttgttgttgtgaaaaagaatcgacggaaacgtaagaaatctgtgcataaacacagggctggatctaagttgaagcatacttctggtagtcctcccaaaacaggtcgtttgggtagacctccacttgtcaaatctgaatgtggctgcttacctctgcagccaggaaaagggaaaatgaatgtgcctgaaggtacaggagctctacgcgaagaaaaacaaaaaataagtgatcagataaaggccatgcttctagatgctggttggacaattgatttaagacccaggaatggtagaaactacatggattccgtgtatatacatcctagtggcaaagggtcttactggtcagttacaaaagcatattacgtgttccgtgcagatatggaatctgagcagaaggaaagttctaaagaccatattctgtcaaaaaaatctgttggtagccccggcaaaaggcaggtctctagttcttcaggctgtactttaacagatgatatccttagcaaattaaaaagagttgttgtaaacaaacgaacaaccaaagtagagattcaaaggttgagacagaagaaggaaaagaagaatactacaaattcaacaagattgcatttaggcaatgaaagaaaaaagagaggtggctgtgctctactcgttcgtggatcgaacaaggagtctggcagcaccactgatggttttgttccatatgaatggaaacgtacgatcttctcctggctgattgatctgaatgttctatcagtcaatactaagctgaactgtttggatgaaagccactcaaaggttttactagagggttttgtcactagggatgggattaactgcagctgctgtagcgaggtcatttcagtgccagaatttgtgactcatgctggttctgaagtaaataagccatacagaaacatacttgtggatgggctagacattgaccttttgcactgtctcattaatgcatggaatatgcagtctgatgctgaaagacaagatttctttcccgttagcattgagggagatgaccccaatgatgacacctgtggtatttgtggagatggaggcaatttgatctgttgtgatggatgcccctcgacatttcacatgagttgtctaggactggaggcacttcccactgattattggtgttgttccaactgctcatgtaaattttgccatgaacattctagtgatgatgctgaagacactgctgatgttgattcttcattgcatacttgttcccagtgcgaagagcagtatcatggagcctgctctcctgatattgattccatagctactaatctttctagtcagacaggcaatttattctgccaacaaagctgcagactggtaacgcttgtcagattattgttcttttttccttgaccttgtttctggatatgctaccttgtggttttcatgatcataatttaaatggtgacacttgctattttactttcatgtttgaggcagatatcgttcccttttttaacggctcatgttgggtttgggactaaaaggcttttgctgttgttttatgtttaagaccttaatcactaatgagatgtttggtttgaggaataagctagtccatcatcttcgcactcctcacttttttgtttggtttgcgaaatggaatgagttgatccattatcacctcatttgtcatagttagttagttagtactaacacgaggaatggggccatctcaccaaatttgaggaatagattcatgatgcaccaccgcatcttggatgaagtgattcctcaaaccaaacacctcctaaatatctgcaccatcccgctctgttagcttcctttcttgatcatatgcatatatgtttttccttctaatagcaatatcatagcaatgtacatatattcaggttgctggtttttatttacatggatttcattactacaagtgattacatatagtaaggtactatatgagtgtggtattttgtcatggggcggcaacccagggcatggaggcttagattggataagattgagttagttacttgggattagattagataatattgagttagttacttgggatccaagtcttcctatctatataaggatgaactgtacctccttaagaagaaaaaggaatgaagaagaattagtcctagatctctccaatagtctagtccctcccatgctgactctgcccggctaccttcccggcgctgactaggattcataacatatggtatcatgagtcaggtatcctttccatgacttctgctgcggacgatgtacgcacatggcgtgaggagctcgctcgtgccagggcagatctggagcaggcccgatctgctatcctccagctagtgatctactcacggcaaaggtggagtctgactgccgatcagcggcgacaacgcgactgcaggaggctgtgcatgggttcctggcgtgacgtccagtgtggcagcggcttgccgtcttcaggctacgacacgtggcttcctggcgcggcgtcaagcacagcaagcagcggcttgccctcttcaggttgcggcacttggcttcctgacgtggcgtcaagcacgacaagcggcaacacggttgcaggctacggccttcagcagggttggccgatccttagccatgtggacagcaagaacaagtctggttgggtggtgctgtctccactggaactcgcggtagctcaggccctgtttgaggaattgcagaatcttctcgcagtcaagaaggatcttgaaccagaatactcatgcagagttgttcaacgcatccatgaagaggtaccagaagaagtccttgctttggacaaaagagttgagtgtaactccaagattgctgttgcactctcattaatggacgagtgcttccttccgattgttgaccagagaactggcatcaacttgatacgcaatgttgtgtataactgtggatcaaattttgcccgattggatttccgtggattctatataattattttagaacgtggagatgaaataatagctgcagcatctgtccgaatacatggaaccaagttagctgagatgccgttcattggtacccggaatatgtataggcgacaagggatgtgccgccgacttgttgatggaattgaaatgatcctcagctctctcaatattgagaagctgatcattcctgctatcacagaacttgtggacacctggacatctaaatttggatttagtccactggacgattctgagaagcaggaagtgaaatccgttagcatgttagtttttcctggtacaggtcttctccaaaagccattgctgaagacctcaccatcggaagatcaatgctcccaaggagacaaaactgaaaaatcatctgatgtagtcaatgaagattcgctttgctctggtgcaagtgccgaccccctaggttcggtggtcaaagagcatggggacaccagcaaagatgccgatggtacttgcaacggtgatgtttcacagcgatctcctctttcctgatggtaagatttggttgcagctttctgggcccccccaagctttatatggacgaaacctccgtttgtttttgtacctctcgagttttgactcagcagccagcatgacaaccatccgtttggcagaaagaggcttccggttttttgcagattagttgccggggcacccctgtagttgtactcagaatttgaccattgactcgtcggcctgggaaaagaatcagcccgtgcagtactgaaaagcgtttactccaaccaggaaccagctaacttactgtgcagctgaaaagtcagtatgcagaatgtggaggataatatcacttcttttgtttttttttggtcgttaacttagaactccgagggcgagtcgtcgtaaatgttacaccagttgttattttgttaatagctttttttttaaaaatgttttcgctagcgcattcctagaaccttctcatttctgtaagatagttctcgcctctgtaagataaactaatgtatgcgcaagctagaaatagtccgcctgatccgtcacgcggaattggttacctaaaccctgttaatgtttcgttttgcatcgtgttggaatgtgtgtgttcttcctgtgaaggaaagcttttgcgggtcattatactagagcgaaaccatatcatcgtttgagatgtg

SEQ ID NO: 52434 - DNA, 5047 bp, Zea Mays
aacccctccaggcatacgcgagagcactctagtctcgagcacagcacaaggccgccggtcccttctctcccactcccactactcgcgctcgccgctggatcctccacccgccgcggcgccaggccggagatccagcagctgggaccacggaggtcggccggttgctccgttcccgctggtggttgctcttcggccgctggagatcggcagacggaagcagttgacgccacagggcttcgtgctgccgaattccccagatattctgggggttcaaccgaacccccatgcccgacaacactgggcttgaaattggccttaaaggctccaagggagccccaatgccaggaacggaaggaagagtggcaaaggatttgaagaaagctcctgcctccttggaggaaagcaatgcttctcgtgatgaggatcctggcggagggcctgccttgactgggaagaaaaggaaggaccggaggggttccgcggatgacaacaggaatgtgacaagaagggtgttgaggtccgacgccatgaagctgcgtgctgaggctgaggcaccatgtggagcgggtgtggaggttagcaaaactgatagtttggagaggaaacactgtgacactactgtggaggctgaggcttgcaaaagtagtgtgctgatggaagttgcctgcaatggtggggaagccaacggattagttaacttggatgcgagcgatgtttcggaagaatcaactaggtgttctgataataatatgggaatgcctggtgttcctgcaacagatttttctcaagatggtggcttagctcaaggtagcattgcagaatcagatgataagacagtcaagtcagatgaggtgtccgctgtaactcattcagagcagaatgactcccaagctggaataaacagttataatgctgatgaggcccaagataacaaagtgagacatgggccttgtcaggatgaggtcatagactcagcaattactaatggtgccaacacaagtacagatttaaccaaaaccagccctaccagtggatcagaatctgttaagcaggatgatagtaagcaggagaataatttggttcatactgaaggagtgatactccacagtggtgatccgaaagttgagaatcattctcaaattgaggacacttgtacagaaactgagatttctttgactgggaatggaagatgtgcagctgataaccacactgatcgaactgggtacactaagcaggaggagaggggcagccctgtgaacgaaaccaatgatatttcggcacatgacattgtttttacaaggagaggtagaaaatcatgtgaggcaaagcaggggacatgtgaagaggagtcacggtttgagaagcgagttacgagatcagctacagttagacagagagaagtttctggaagcttatgcaaaactaccacgaatgagactgcactaggaagcagagggaggaagggagatattattgctcactatacaaggaaagtgagcagtgcagtatctccaaaaggtcaccatgctgagctgggagaatgtaataccagtatggagaatcaaacagtgaaacaaaaggtggttgatcgaagagattcaggtgccactaagaatgataatgatgcgaatgacacaaagaataaggaatcagaaaagacagagatcaatctgaagacgcaaccacctgttggaagtgttagcattgtaaataaaacaactgtaggagctgtttctgtggtgggtcagagtatctctggttcagccatcactgagagaaatgatacagatcatactgattctgatggagttaaatatgaaaatatgactcttgtgcagaaactactactgtctgttggcgcgaagattgttgccagcaagaagagggtattggaagcaggtcctgataaaaccactggaaggtcaccaattgctttgccatccatgaaaaagacaagaaatacgtcttctgatcctgagatagatcaacctgataagtcttctggagagaagcttattggaaataactgtgatttgggcaataaacgtgttttgagggaacggcagcatcagaatcaaacatatttgtcaagcaggtcttctaaccagtctaatcaaaatgctatcaagcagacacaggatcaatctgacgatgatgacatcagcagcgatacttcctacaggagaactcgtagcggacgtcgtcgtggtgctgcccgtcttgccgtgccaaaacaagaggactccagtgattctgaagaagttgttgttgtgaaaaagaatcgacggaaacgtaagaaatctgtgcataaacacagggctggatctaagttgaagcatacttctggtagtcctcccaaaacaggtcgtttgggtagacctccacttgtcaaatctgaatgtggctgcttacctctgcagccaggaaaagggaaaatgaatgtgcctgaaggtacaggagctctacgcgaagaaaaacaaaaaataagtgatcagataaaggccatgcttctagatgctggttggacaattgatttaagacccaggaatggtagaaactacatggattccgtgtatatacatcctagtggcaaagggtcttactggtcagttacaaaagcatattacgtgttccgtgcagatatggaatctgagcagaaggaaagttctaaagaccatattctgtcaaaaaaatctgttggtagccccggcaaaaggcaggtctctagttcttcaggctgtactttaacagatgatatccttagcaaattaaaaagagttgttgtaaacaaacgaacaaccaaagtagagattcaaaggttgagacagaagaaggaaaagaagaatactacaaattcaacaagattgcatttaggcaatgaaagaaaaaagagaggtggctgtgctctactcgttcgtggatcgaacaaggagtctggcagcaccactgatggttttgttccatatgaatggaaacgtacgatcttctcctggctgattgatctgaatgttctatcagtcaatactaagctgaactgtttggatgaaagccactcaaaggttttactagagggttttgtcactagggatgggattaactgcagctgctgtagcgaggtcatttcagtgccagaatttgtgactcatgctggttctgaagtaaataagccatacagaaacatacttgtggatgggctagacattgaccttttgcactgtctcattaatgcatggaatatgcagtctgatgctgaaagacaagatttctttcccgttagcattgagggagatgaccccaatgatgacacctgtggtatttgtggagatggaggcaatttgatctgttgtgatggatgcccctcgacatttcacatgagttgtctaggactggaggcacttcccactgattattggtgttgttccaactgctcatgtaaattttgccatgaacattctagtgatgatgctgaagacactgctgatgttgattcttcattgcatacttgttcccagtgcgaagagcagtgtactgaagcctgctctcctgatattgattccatagctactaatctttctagtcagacaggcaatttattctgccaacaaagctgcagactgctgtttgaggaattgcagaatcttctcgcagtcaagaaggatcttgaaccagaatactcatgcagagttgttcaacgcatccatgaagaggtaccagaagaagtccttgctttggacaaaagagttgagtgtaactccaagattgctgttgcactctcattaatggacgagtgcttccttccgattgttgaccagagaactggcatcaacttgatacgcaatgttgtgtataactgtggatcaaattttgcccgattggatttccgtggattctatataattattttagaacgtggagatgaaataatagctgcagcatctgtccgaatacatggaaccaagttagctgagatgccgttcattggtacccggaatatgtataggcgacaagggatgtgccgccgacttgttgatggaattgaaatgatcctcagctctctcaatattgagaagctgatcattcctgctatcacagaacttgtggacacctggacatctaaatttggatttagtccactggacgattctgagaagcaggaagtgaaatccgttagcatgttagtttttcctggtacaggtcttctccaaaagccattgctgaagacctcaccatcggaagatcaatgctcccaaggagtcaatgaagattcgctttgctctggtgcaagtgccgaccccctaggttcggtggtcaaagagcatggggacaccagcaaagatgccgatggtacttgcaacggtgatgtttcacagcgatctcctctttcctgatggtaagatttggttgcagctttctgggcccccccaagctttatatggacgaaacctccgtttgtttttgtacctctcgagttttgactcagcagccagcatgacaaccatccgtttggcagaaagaggcttccggttttttgcagattagttgccggggcacccctgtagttgtactcagaatttgaccattgactcgtcggcctgggaaaagaatcagcccgtgcagtactgaaaagcgtttactccaaccaggaaccagctaacttactgtgcagctgaaaagtcagtatgcagaatgtggaggataatatcacttcttttgtttttttttggtcgttaacttagaactccgagggcgagtcgtcgtaaatgttacaccagttgttattttgttaatagctttttttttaaaaatgttttcgctagcgcattcctagaaccttctcatttctgtaagatagttctcgcctctgtaagataaactaatgtatgcgcaagctagaaatagtccgcctgatccgtcacgcggaattggttacctaaaccctgttaatgtttcgttttgcatcgtgttggaatgtgtgtgttcttcctgtgaaggaaagcttttgcgggtcattatactagagcgaaaccatatcatcgtttgagatgtg

SEQ ID NO: 52435 - DNA, 5055 bp, Zea Mays
aaataataaacccctccaggcatacgcgagagcactctagtctcgagcacagcacaaggccgccggtcccttctctcccactcccactactcgcgctcgccgctggatcctccacccgccgcggcgccaggccggagatccagcagctgggaccacggaggtcggccggttgctccgttcccgctggtggttgctcttcggccgctggagatcggcagacggaagcagttgacgccacagggcttcgtgctgccgaattccccagatattctgggggttcaaccgaacccccatgcccgacaacactgggcttgaaattggccttaaaggctccaagggagccccaatgccaggaacggaaggaagagtggcaaaggatttgaagaaagctcctgcctccttggaggaaagcaatgcttctcgtgatgaggatcctggcggagggcctgccttgactgggaagaaaaggaaggaccggaggggttccgcggatgacaacaggaatgtgacaagaagggtgttgaggtccgacgccatgaagctgcgtgctgaggctgaggcaccatgtggagcgggtgtggaggttagcaaaactgatagtttggagaggaaacactgtgacactactgtggaggctgaggcttgcaaaagtagtgtgctgatggaagttgcctgcaatggtggggaagccaacggattagttaacttggatgcgagcgatgtttcggaagaatcaactaggtgttctgataataatatgggaatgcctggtgttcctgcaacagatttttctcaagatggtggcttagctcaaggtagcattgcagaatcagatgataagacagtcaagtcagatgaggtgtccgctgtaactcattcagagcagaatgactcccaagctggaataaacagttataatgctgatgaggcccaagataacaaagtgagacatgggccttgtcaggatgaggtcatagactcagcaattactaatggtgccaacacaagtacagatttaaccaaaaccagccctaccagtggatcagaatctgttaagcaggatgatagtaagcaggagaataatttggttcatactgaaggagtgatactccacagtggtgatccgaaagttgagaatcattctcaaattgaggacacttgtacagaaactgagatttctttgactgggaatggaagatgtgcagctgataaccacactgatcgaactgggtacactaagcaggaggagaggggcagccctgtgaacgaaaccaatgatatttcggcacatgacattgtttttacaaggagaggtagaaaatcatgtgaggcaaagcaggggacatgtgaagaggagtcacggtttgagaagcgagttacgagatcagctacagttagacagagagaagtttctggaagcttatgcaaaactaccacgaatgagactgcactaggaagcagagggaggaagggagatattattgctcactatacaaggaaagtgagcagtgcagtatctccaaaaggtcaccatgctgagctgggagaatgtaataccagtatggagaatcaaacagtgaaacaaaaggtggttgatcgaagagattcaggtgccactaagaatgataatgatgcgaatgacacaaagaataaggaatcagaaaagacagagatcaatctgaagacgcaaccacctgttggaagtgttagcattgtaaataaaacaactgtaggagctgtttctgtggtgggtcagagtatctctggttcagccatcactgagagaaatgatacagatcatactgattctgatggagttaaatatgaaaatatgactcttgtgcagaaactactactgtctgttggcgcgaagattgttgccagcaagaagagggtattggaagcaggtcctgataaaaccactggaaggtcaccaattgctttgccatccatgaaaaagacaagaaatacgtcttctgatcctgagatagatcaacctgataagtcttctggagagaagcttattggaaataactgtgatttgggcaataaacgtgttttgagggaacggcagcatcagaatcaaacatatttgtcaagcaggtcttctaaccagtctaatcaaaatgctatcaagcagacacaggatcaatctgacgatgatgacatcagcagcgatacttcctacaggagaactcgtagcggacgtcgtcgtggtgctgcccgtcttgccgtgccaaaacaagaggactccagtgattctgaagaagttgttgttgtgaaaaagaatcgacggaaacgtaagaaatctgtgcataaacacagggctggatctaagttgaagcatacttctggtagtcctcccaaaacaggtcgtttgggtagacctccacttgtcaaatctgaatgtggctgcttacctctgcagccaggaaaagggaaaatgaatgtgcctgaaggtacaggagctctacgcgaagaaaaacaaaaaataagtgatcagataaaggccatgcttctagatgctggttggacaattgatttaagacccaggaatggtagaaactacatggattccgtgtatatacatcctagtggcaaagggtcttactggtcagttacaaaagcatattacgtgttccgtgcagatatggaatctgagcagaaggaaagttctaaagaccatattctgtcaaaaaaatctgttggtagccccggcaaaaggcaggtctctagttcttcaggctgtactttaacagatgatatccttagcaaattaaaaagagttgttgtaaacaaacgaacaaccaaagtagagattcaaaggttgagacagaagaaggaaaagaagaatactacaaattcaacaagattgcatttaggcaatgaaagaaaaaagagaggtggctgtgctctactcgttcgtggatcgaacaaggagtctggcagcaccactgatggttttgttccatatgaatggaaacgtacgatcttctcctggctgattgatctgaatgttctatcagtcaatactaagctgaactgtttggatgaaagccactcaaaggttttactagagggttttgtcactagggatgggattaactgcagctgctgtagcgaggtcatttcagtgccagaatttgtgactcatgctggttctgaagtaaataagccatacagaaacatacttgtggatgggctagacattgaccttttgcactgtctcattaatgcatggaatatgcagtctgatgctgaaagacaagatttctttcccgttagcattgagggagatgaccccaatgatgacacctgtggtatttgtggagatggaggcaatttgatctgttgtgatggatgcccctcgacatttcacatgagttgtctaggactggaggcacttcccactgattattggtgttgttccaactgctcatgtaaattttgccatgaacattctagtgatgatgctgaagacactgctgatgttgattcttcattgcatacttgttcccagtgcgaagagcagtatcatggagcctgctctcctgatattgattccatagctactaatctttctagtcagacaggcaatttattctgccaacaaagctgcagactgctgtttgaggaattgcagaatcttctcgcagtcaagaaggatcttgaaccagaatactcatgcagagttgttcaacgcatccatgaagaggtaccagaagaagtccttgctttggacaaaagagttgagtgtaactccaagattgctgttgcactctcattaatggacgagtgcttccttccgattgttgaccagagaactggcatcaacttgatacgcaatgttgtgtataactgtggatcaaattttgcccgattggatttccgtggattctatataattattttagaacgtggagatgaaataatagctgcagcatctgtccgaatacatggaaccaagttagctgagatgccgttcattggtacccggaatatgtataggcgacaagggatgtgccgccgacttgttgatggaattgaaatgatcctcagctctctcaatattgagaagctgatcattcctgctatcacagaacttgtggacacctggacatctaaatttggatttagtccactggacgattctgagaagcaggaagtgaaatccgttagcatgttagtttttcctggtacaggtcttctccaaaagccattgctgaagacctcaccatcggaagatcaatgctcccaaggagtcaatgaagattcgctttgctctggtgcaagtgccgaccccctaggttcggtggtcaaagagcatggggacaccagcaaagatgccgatggtacttgcaacggtgatgtttcacagcgatctcctctttcctgatggtaagatttggttgcagctttctgggcccccccaagctttatatggacgaaacctccgtttgtttttgtacctctcgagttttgactcagcagccagcatgacaaccatccgtttggcagaaagaggcttccggttttttgcagattagttgccggggcacccctgtagttgtactcagaatttgaccattgactcgtcggcctgggaaaagaatcagcccgtgcagtactgaaaagcgtttactccaaccaggaaccagctaacttactgtgcagctgaaaagtcagtatgcagaatgtggaggataatatcacttcttttgtttttttttggtcgttaacttagaactccgagggcgagtcgtcgtaaatgttacaccagttgttattttgttaatagctttttttttaaaaatgttttcgctagcgcattcctagaaccttctcatttctgtaagatagttctcgcctctgtaagataaactaatgtatgcgcaagctagaaatagtccgcctgatccgtcacgcggaattggttacctaaaccctgttaatgtttcgttttgcatcgtgttggaatgtgtgtgttcttcctgtgaaggaaagcttttgcgggtcattatactagagcgaaaccatatcatcgtttgagatgtg

SEQ ID NO: 52436 - DNA, 5243 bp, Zea Mays
cacaatcctgcgaaaccagatcaaacccaacccgaacggccaaacccacacaacgcaggccgcggctgcggcgcaggccccgcgcgtcagttaccgctgcccacccaccgggcacactttcaacacaggtgctgcgccggatgatcccaagagcagcaaacaaataataaacccctccaggcatacgcgagagcactctagtctcgagcacagcacaaggccgccggtcccttctctcccactcccactactcgcgctcgccgctggatcctccacccgccgcggcgccaggccggagatccagcagctgggaccacggaggtcggccggttgctccgttcccgctggtggttgctcttcggccgctggagatcggcagacggaagcagttgacgccacagggcttcgtgctgccgaattccccagatattctgggggttcaaccgaacccccatgcccgacaacactgggcttgaaattggccttaaaggctccaagggagccccaatgccaggaacggaaggaagagtggcaaaggatttgaagaaagctcctgcctccttggaggaaagcaatgcttctcgtgatgaggatcctggcggagggcctgccttgactgggaagaaaaggaaggaccggaggggttccgcggatgacaacaggaatgtgacaagaagggtgttgaggtccgacgccatgaagctgcgtgctgaggctgaggcaccatgtggagcgggtgtggaggttagcaaaactgatagtttggagaggaaacactgtgacactactgtggaggctgaggcttgcaaaagtagtgtgctgatggaagttgcctgcaatggtggggaagccaacggattagttaacttggatgcgagcgatgtttcggaagaatcaactaggtgttctgataataatatgggaatgcctggtgttcctgcaacagatttttctcaagatggtggcttagctcaaggtagcattgcagaatcagatgataagacagtcaagtcagatgaggtgtccgctgtaactcattcagagcagaatgactcccaagctggaataaacagttataatgctgatgaggcccaagataacaaagtgagacatgggccttgtcaggatgaggtcatagactcagcaattactaatggtgccaacacaagtacagatttaaccaaaaccagccctaccagtggatcagaatctgttaagcaggatgatagtaagcaggagaataatttggttcatactgaaggagtgatactccacagtggtgatccgaaagttgagaatcattctcaaattgaggacacttgtacagaaactgagatttctttgactgggaatggaagatgtgcagctgataaccacactgatcgaactgggtacactaagcaggaggagaggggcagccctgtgaacgaaaccaatgatatttcggcacatgacattgtttttacaaggagaggtagaaaatcatgtgaggcaaagcaggggacatgtgaagaggagtcacggtttgagaagcgagttacgagatcagctacagttagacagagagaagtttctggaagcttatgcaaaactaccacgaatgagactgcactaggaagcagagggaggaagggagatattattgctcactatacaaggaaagtgagcagtgcagtatctccaaaaggtcaccatgctgagctgggagaatgtaataccagtatggagaatcaaacagtgaaacaaaaggtggttgatcgaagagattcaggtgccactaagaatgataatgatgcgaatgacacaaagaataaggaatcagaaaagacagagatcaatctgaagacgcaaccacctgttggaagtgttagcattgtaaataaaacaactgtaggagctgtttctgtggtgggtcagagtatctctggttcagccatcactgagagaaatgatacagatcatactgattctgatggagttaaatatgaaaatatgactcttgtgcagaaactactactgtctgttggcgcgaagattgttgccagcaagaagagggtattggaagcaggtcctgataaaaccactggaaggtcaccaattgctttgccatccatgaaaaagacaagaaatacgtcttctgatcctgagatagatcaacctgataagtcttctggagagaagcttattggaaataactgtgatttgggcaataaacgtgttttgagggaacggcagcatcagaatcaaacatatttgtcaagcaggtcttctaaccagtctaatcaaaatgctatcaagcagacacaggatcaatctgacgatgatgacatcagcagcgatacttcctacaggagaactcgtagcggacgtcgtcgtggtgctgcccgtcttgccgtgccaaaacaagaggactccagtgattctgaagaagttgttgttgtgaaaaagaatcgacggaaacgtaagaaatctgtgcataaacacagggctggatctaagttgaagcatacttctggtagtcctcccaaaacaggtcgtttgggtagacctccacttgtcaaatctgaatgtggctgcttacctctgcagccaggaaaagggaaaatgaatgtgcctgaaggtacaggagctctacgcgaagaaaaacaaaaaataagtgatcagataaaggccatgcttctagatgctggttggacaattgatttaagacccaggaatggtagaaactacatggattccgtgtatatacatcctagtggcaaagggtcttactggtcagttacaaaagcatattacgtgttccgtgcagatatggaatctgagcagaaggaaagttctaaagaccatattctgtcaaaaaaatctgttggtagccccggcaaaaggcaggtctctagttcttcaggctgtactttaacagatgatatccttagcaaattaaaaagagttgttgtaaacaaacgaacaaccaaagtagagattcaaaggttgagacagaagaaggaaaagaagaatactacaaattcaacaagattgcatttaggcaatgaaagaaaaaagagaggtggctgtgctctactcgttcgtggatcgaacaaggagtctggcagcaccactgatggttttgttccatatgaatggaaacgtacgatcttctcctggctgattgatctgaatgttctatcagtcaatactaagctgaactgtttggatgaaagccactcaaaggttttactagagggttttgtcactagggatgggattaactgcagctgctgtagcgaggtcatttcagtgccagaatttgtgactcatgctggttctgaagtaaataagccatacagaaacatacttgtggatgggctagacattgaccttttgcactgtctcattaatgcatggaatatgcagtctgatgctgaaagacaagatttctttcccgttagcattgagggagatgaccccaatgatgacacctgtggtatttgtggagatggaggcaatttgatctgttgtgatggatgcccctcgacatttcacatgagttgtctaggactggaggcacttcccactgattattggtgttgttccaactgctcatgtaaattttgccatgaacattctagtgatgatgctgaagacactgctgatgttgattcttcattgcatacttgttcccagtgcgaagagcagtatcatggagcctgctctcctgatattgattccatagctactaatctttctagtcagacaggcaatttattctgccaacaaagctgcagactgctgtttgaggaattgcagaatcttctcgcagtcaagaaggatcttgaaccagaatactcatgcagagttgttcaacgcatccatgaagaggtaccagaagaagtccttgctttggacaaaagagttgagtgtaactccaagattgctgttgcactctcattaatggacgagtgcttccttccgattgttgaccagagaactggcatcaacttgatacgcaatgttgtgtataactgtggatcaaattttgcccgattggatttccgtggattctatataattattttagaacgtggagatgaaataatagctgcagcatctgtccgaatacatggaaccaagttagctgagatgccgttcattggtacccggaatatgtataggcgacaagggatgtgccgccgacttgttgatggaattgaaatgatcctcagctctctcaatattgagaagctgatcattcctgctatcacagaacttgtggacacctggacatctaaatttggatttagtccactggacgattctgagaagcaggaagtgaaatccgttagcatgttagtttttcctggtacaggtcttctccaaaagccattgctgaagacctcaccatcggaagatcaatgctcccaaggagacaaaactgaaaaatcatctgatgtagtcaatgaagattcgctttgctctggtgcaagtgccgaccccctaggttcggtggtcaaagagcatggggacaccagcaaagatgccgatggtacttgcaacggtgatgtttcacagcgatctcctctttcctgatggtaagatttggttgcagctttctgggcccccccaagctttatatggacgaaacctccgtttgtttttgtacctctcgagttttgactcagcagccagcatgacaaccatccgtttggcagaaagaggcttccggttttttgcagattagttgccggggcacccctgtagttgtactcagaatttgaccattgactcgtcggcctgggaaaagaatcagcccgtgcagtactgaaaagcgtttactccaaccaggaaccagctaacttactgtgcagctgaaaagtcagtatgcagaatgtggaggataatatcacttcttttgtttttttttggtcgttaacttagaactccgagggcgagtcgtcgtaaatgttacaccagttgttattttgttaatagctttttttttaaaaatgttttcgctagcgcattcctagaaccttctcatttctgtaagatagttctcgcctctgtaagataaactaatgtatgcgcaagctagaaatagtccgcctgatccgtcacgcggaattggttacctaaaccctgttaatgtttcgttttgcatcgtgttggaatgtgtgtgttcttcctgtgaaggaaagcttttgcgggtcattatactagagcgaaaccatatcatcgtttgagatgtg

SEQ ID NO: 52437 - DNA, 286 bp, Zea Mays
cacccgccgctctagtcccactccccgccgccgccgccacttgctcgcctttgccccttctgtctcccttcgtccgtagcagaccaggaacgcccaaggcgctagcgtctccaagatggtgctgcaaaacgacattgacttactcaatccaccggcagagcttgagaagctaaagcacaagaagaagcggctagtccagtcccccaactccttcttcatggatgtcaagtgccagggctgtttcagcataaactgtatcttggtcaaagttgtttcactcagctgt

SEQ ID NO: 52438 - DNA, 1217 bp, Zea Mays
ccctacagccgacatgcaaggggagggggaggggtagggtcgaccgctgcgatcagtcttaaacacctacccgtccggccgacgagagagccattcaccgcaacaacacacaacggcagagaccaagaagccgtgaccgtgggagagctccgagcgccagccgcgtgcggcgtgtccatactccatacacgaagaggaacagtcgaacagaggaagagcaggaggagatgtacttccgtccgccgcccaagggcccagagtggtacgccagcgatgcggagacggggcaggcggcgcggccgctgtacccaatgatgctggaggacccgcgtctgcggtgggccttcatccggaaggtctacagcatcctctccatccagatgctgctcaccgtcgccgtcgctgccgtcgtcgttgctttgccctctgtactactactaccagcaccacccggtgaacctgctgctgctcggcctcttcaccgtggccatcagcttcgccgtcggcctcacctgcgccttcaccaaaggggaggtgatcctcgagtcggcggtcctcacggcggcggtggtgctgagcctcacggcgtacacgttctgggcggcgaagcgcggccacgacttcagcttcctgggcccgttcctgttcgccgccgtcatgatcctcatgctgttcgcgctcatccagctcttcttcccgctcggccgcatctcgctcatgatatacgggggactggcggcgctcgtcttctgcggctacatcatctacgacaccgacaacctcatcaagcgctactcctacgacgagtacgtctgggccgccgtcgcgctctacctcgacgtcatcaacctcttcctctccctcctcacgctcttccgggcggcggattcgtgagcacggctacctgccagctcgcgtaggcgcggcgacaggatcttggaatgtgccttgccttgccccgcctccggtgctgtctgccgaaattcctctgtaaaaagactaaagagaaataattgttttggttttgtgctttgcttcgcttgcgaagattgttcaacgaaacaattttttttctgtgaaactaactgtcgtttttgggacctatgtatgttttctgtgatatttttttcttcttttgttatttttcctggaaaatttgattaatatatgtccaacagatcggtgcaaaatgtctgtttatataatttcgaaattag

SEQ ID NO: 52439 - DNA, 1628 bp, Zea Mays
caggaacgctacccttgttctatcctatccggctatccccattcggccactctccagtccgcggaagggtggcggacggcgaggaaagggtgcgaggtgagcgggaagacggcagcccggtcgattcgaggcgcggaagtgccactcggcgaggcacgaccgctggcagggctgacgcggtttccacagccgcccgcccgccttcatcagagtccataatccaagctctaaacaggttcgtccatgagcagataaggcgcgcgccacgccgcggccaccacacgtacgtaaggcgccaaccccatctccgggaaagtatgggggcgctacccgtcgcccacagtctcgctctcaccgccgcgttcctcccgtgccgccgccccgcggcccacggccggtgccggcgccggcggtacagagcggtggtggcgtacatggagccgaaccccaactcgccggcggccatcgcggggcgcctcgtcggcgcccttcccatcgtgggcctcgtggcgcgcatcctcaacgacgagggcggcgtcggcggcgacatcatcgacttcgccgagttccgccgccgcgtcagcaagaagtgcacggtcatggactccaaggccttctacgacttcaaccaacgacgcgggaagccaggcgatcccttctacgttctactgtgctgctggctggccgccatcggcgccgggctgctcaaaacggaggagatcttggaaggcgtggcgcgcctccgcatctccaacgacatcgagttcgaggaggagacgttcatcgacatgatgagggcggcaaaggagataccgatggagacgcgggcggagaaggccctcgaagccatctacgtgtgctgcttcggtcaggacatggtggaggacgaggacgagaagcttctccgggcgatactgaacgccgtgttcccctccgtcgggcgggccgcggtcgagaggatggtggcgtccatggccaagcaggtggcctccggcgagaggaagcgggacgggaggaccgtgtccaaggaagtgcagcagcggcagctcaaggacctggagtttctgaagcagaacaagctggagtcgtcgtgaagcagcagcggcggcgagcagaaacttggcagcaaatcacgcggcgtggttcgccggcggctgcagcagccttgctttcggttcgttttggaacaacggattcatggtggaattttgtaggattattagaacagaactctatgtgaatttgtaaccctttggaagttggaacaaggaagtggccatactgaaatcctacatgccctttttggaaccgtggtatgctgaacactgggcttcataaaaatattatctccaacattgtaattagatttgtagtattataatcataattcataaccaccgcttctttgtatttttgttattctcgcaaggtttagccgtaattttaaaaaacctagttatggggttactctcgttccaaaaaaaaatagccgtaattttaaaaaacctagggttactttcgttccaaaaaaaaactccttatggaatgcctcatgccgtagaattctggcggagcaatccctatatttgctttcaaacactatattagaaagtttgccagtttcttaa

SEQ ID NO: 52440 - DNA, 2779 bp, Zea Mays
agaaagaatggaatccaccaagctttattttttttaaaaaaaagaaccctcaaagggaaaaaggctgcacactggaagacgaaggcaaaccctagtcgctactccaccgcggcgccaaccacctcgatcgggctccgattccgatggacttcgcggagctggaggccgtggagggcctccggtggccgtggcactcgtggccgccgactgctcccgccgccgcgtccctcgtcgtgcccacggccgtcctctgctcgccgctgcagcaccccacggcgcccgacctcctcccgctgctcccctacgcgccgctccgctgcgcctccccgggttgcggcgccgcgctcaacccgttctcgcgcgtgcaccacggctccgcgcgctggtcctgccccttctgcggcgccaccggcaacccgttcccgcgcctcctggcccccgacgcgctccccgccgagctcttccccacccactccagcgtcgagtactcgctgcctccggaccccgccgaggccgggggcccggggccacctgcgctcgtgttcgtgatcgatgcggccacggcggccgaggagctcgccgtgctgaaggacgaggtacgcagggtcgtgcaagggctgcccgaggggatcagggtggcgctcgtcactttcgctgcgtccgtatgggtgcacgatcttggatttgagggttgcgctcgagtggttgtgctcaacggcgagcgtgagctcgagtctgacaagatacaaaaacttctaggtgttcaccgttcaccatacaagaagttggctatgccaaggtccactgaagcacagcgatttttgctgcctgtttctgaatgtgaatttaacatcacatctgcaatagaggacctgagctccatgtctgcatgtccacgtgggcaccgccctttaagggcaactggcgcagcgatttctactgctattgctcttctagagggttgctgctcacccagtactggtggtcggattatggtctttacatctggtcctgcaacagttggtccagggtgtgttgtggaaactgatcttgggaaagcaattcgttctcatcgtgacatattcaatagcaacgcacctttgactgacaaagcacgtgatttctataagaaagttgcaaagaggttgacagatcatgcattagttcttgatctgtttgcttgctcccttgatcaggttggggccgcagagctgaggaatccaattgaagtgtcagggggtttaatggtgcatacagaatcatttgagtctgagcagttcaaaagctgttttaggcatatgttcaagcgtgaaggcgccaataaccttaatatgaacttcaatgcgacgattgaaatagtgacatcaaaggaggtgaagatttgtggcgcccttggtccctgcatttcccttcgcaggaaaaatagctccgttagtgataaggaaattggtgaagttcatgacaaggtaccgagctggtgatggtagttatcgcctaagggtaacgaccgttgcaagaaggtgggctgctcctcgatctcctgaaattgctgcagggtttgatcaggaagctgctgcagctgttatggccaggcttgctgtttacagggcagagacgtaccatgttagagatgttatacgatggcttgacaagatgcttatccgcttcactgctaagtttggaaactatgtttctgaagatccatctacatttcggctgtcaacaaacttctccttgtatccacagttcatgtactacttgcggagatcacagttcattgatgttttcaacagctctcctgatgaaactgctttcttcaggttgatgctgaatagggagggagttgtggggtctctaatcatgatccagcctactctattccagtactcatttgatggaccacctattcctgtgctgttagatgtcagctccatctctcctgatgtcattttactatttgattcatacttctatatcgtgattcattatggctcaaagattgctcaatggaggaagcttggctatcacaaggacccaaaccacgaaaatttgcggaagctccttgaagcaccagaagtagatgcagaggcactattggtagaccgtttccctgtgccaaaactcataaagtgtgaccagcatggtagtcaggccaggttcctgctcgctcgcttgaatccatctgtgacacagaaaacacagctttcagagggatctgaagtcattttcaccgacgatgttagtttgcaagtgtttattgaacacttgcaggagttggctgttcagggctagaaagtcatggagcttcaccatgtctctgctatttggtccacttgagatcctgaagatatggctttgagagggaccagacttcatatttgcagatgaagtttacttgcaagtttttattgaacacttgcagtaattggttgtgcaggattaacatgttcatgtggattatttatatgcaattttctgctcacatgcaaatactggggagctctactgcctggaggagtgagatctccctgagttgtacattgctcaagctccagtttgataactcttcatgatcctcagacgcttgcatgagtcgacaaacatcctgcagggaccagaaaatcagcaaggcgacatacaagacactggagtcctaatcatgggtcagtaaatacgaaagcagacgatggcacgctagaacggagaacatactcccacgggacgtcgccgaccagcatccagtcaccatccttgtcttcgtaagtagtgaccacatcat

SEQ ID NO: 52441 - DNA, 2842 bp, Zea Mays
agaaagaatggaatccaccaagctttattttttttaaaaaaaagaaccctcaaagggaaaaaggctgcacactggaagacgaaggcaaaccctagtcgctactccaccgcggcgccaaccacctcgatcgggctccgattccgatggacttcgcggagctggaggccgtggagggcctccggtggccgtggcactcgtggccgccgactgctcccgccgccgcgtccctcgtcgtgcccacggccgtcctctgctcgccgctgcagcaccccacggcgcccgacctcctcccgctgctcccctacgcgccgctccgctgcgcctccccgggttgcggcgccgcgctcaacccgttctcgcgcgtgcaccacggctccgcgcgctggtcctgccccttctgcggcgccaccggcaacccgttcccgcgcctcctggcccccgacgcgctccccgccgagctcttccccacccactccagcgtcgagtactcgctgcctccggaccccgccgaggccgggggcccggggccacctgcgctcgtgttcgtgatcgatgcggccacggcggccgaggagctcgccgtgctgaaggacgaggtacgcagggtcgtgcaagggctgcccgaggggatcagggtggcgctcgtcactttcgctgcgtccgtatgggtgcacgatcttggatttgagggttgcgctcgagtggttgtgctcaacggcgagcgtgagctcgagtctgacaagatacaaaaacttctaggtgttcaccgttcaccatacaagaagttggctatgccaaggtccactgaagcacagcgatttttgctgcctgtttctgaatgtgaatttaacatcacatctgcaatagaggacctgagctccatgtctgcatgtccacgtgggcaccgccctttaagggcaactggcgcagcgatttctactgctattgctcttctagagggttgctgctcacccagtactggtggtcggattatggtctttacatctggtcctgcaacagttggtccagggtgtgttgtggaaactgatcttgggaaagcaattcgttctcatcgtgacatattcaatagcaacgcacctttgactgacaaagcacgtgatttctataagaaagttgcaaagaggttgacagatcatgcattagttcttgatctgtttgcttgctcccttgatcaggttggggccgcagagctgaggaatccaattgaagtgtcagggggtttaatggtgcatacagaatcatttgagtctgagcagttcaaaagctgttttaggcatatgttcaagcgtgaaggcgccaataaccttaatatgaacttcaatgcgacgattgaaatagtgacatcaaaggaggtgaagatttgtggcgcccttggtccctgcatttcccttcgcaggaaaaatagctccgttagtgataaggaaattggtgaaggtgggacaaattattggaaaactagttcactgagcagcaagaccaacattgctttctttttccgagttgattgcagtcgtaaagctgagcccccaactgtcttctttattcagttcatgacaaggtaccgagctggtgatggtagttatcgcctaagggtaacgaccgttgcaagaaggtgggctgctcctcgatctcctgaaattgctgcagggtttgatcaggaagctgctgcagctgttatggccaggcttgctgtttacagggcagagacgtaccatgttagagatgttatacgatggcttgacaagatgcttatccgcttcactgctaagtttggaaactatgtttctgaagatccatctacatttcggctgtcaacaaacttctccttgtatccacagttcatgtactacttgcggagatcacagttcattgatgttttcaacagctctcctgatgaaactgctttcttcaggttgatgctgaatagggagggagttgtggggtctctaatcatgatccagcctactctattccagtactcatttgatggaccacctattcctgtgctgttagatgtcagctccatctctcctgatgtcattttactatttgattcatacttctatatcgtgattcattatggctcaaagattgctcaatggaggaagcttggctatcacaaggacccaaaccacgaaaatttgcggaagctccttgaagcaccagaagtagatgcagaggcactattggtagaccgtttccctgtgccaaaactcataaagtgtgaccagcatggtagtcaggccaggttcctgctcgctcgcttgaatccatctgtgacacagaaaacacagctttcagagggatctgaagtcattttcaccgacgatgttagtttgcaagtgtttattgaacacttgcaggagttggctgttcagggctagaaagtcatggagcttcaccatgtctctgctatttggtccacttgagatcctgaagatatggctttgagagggaccagacttcatatttgcagatgaagtttacttgcaagtttttattgaacacttgcagtaattggttgtgcaggattaacatgttcatgtggattatttatatgcaattttctgctcacatgcaaatactggggagctctactgcctggaggagtgagatctccctgagttgtacattgctcaagctccagtttgatggaccagaaaatcagcaaggcgacatacaagacactggagtcctaatcatgggtcagtaaatacgaaagcagacgatggcacgctagaacggagaacatactcccacgggacgtcgccgaccagcatccagtcaccatccttgtcttcgtaagtagtgaccacatcat

SEQ ID NO: 52442 - DNA, 254 bp, Zea Mays
ccgcaagacgcgcctcagcctcgtggagcattgggtcatctaggacgcaacatcaacgacggctaggcccacgccgctctggttttgggggacggattaccacatgcaggcgctagcgagaatctgagtgagatgttcaacatggtggggaagaagttcaacgaggccgtgtgcaagaatgagggcatcgccgatgacgtttagcagcatcatatgaaggcctaacattattgacaagaattgttgggggcact

SEQ ID NO: 52443 - DNA, 1456 bp, Zea Mays
cgcgtcgcgtccagccgccgctcgcccgctccgctcaccgtctctgcctcctctcgcgcagatccgcccctggccaagaccatcgcgtccctcttcctggactccggggagtcgtccttcgccaactcctcggcgcggacgacgcgccacgtggactgcgcgtccgacagccagtccaccgagtccgggggctccgctccgacgaccgcctcctcttcgagccccacgggccctccagctccatcctcgagaggaagcctccggcggcgcctgccctgcggccgcgagcggcggcgtcctcctctcgtccttcgttgacggcgtcgcggtggcgttcgactccgccgacccgtcagatggtgatggtgtcaggcggcgggggtaacgcgtgggcgaaggagatgaccctccgccgcaggatagccagcatattcaacaagacgcaggaacacttccctactctgaaggactacaacgattatctggaagaagttgaggatatgactttcaacctgatcgaagggatagatgtcgaggagattgaagcaaaaattgcaagataccaacaggaaaatgcggagcagatatacttgtccagagctaaaagggcagaagatcttgcggcagcacttaaagcaagcaggatgaaccccgtaaaggccgaggccaatgatacggctgctgggagttctcagggtattagtggcggggcaggagttcagggccagtatgcacctgccgctgttcttgggggagtggctcagccccgccccacaggtatggcgccccaactaatcggcagtgggtcggatcccctgcaaggagacgacgaggagaccaggagactacgcgcagagcgagcagcacgggctggcggatggactgctgaattgagcaagagaagagcgcttgaggaggcgtttagcgccatattcatctaggattagatcaaaaggcaacacatggtctgcattggcattggtaaaacctgcactagttctgcagggcaaagaataagaactactcaatcagatgccgccatgcaaaagttaaaatgtgtctctatccatggcagggctactctaaaactaactaaatatattactagtggtctttcacatttgcatggttggtcttattgtgaccggcaagtcagtaagtgggcagccgagccttttgttctggtactagcaaaaatggaagtgtagcgacatctgagtaatcacctcgttttcattagctagatccagcttcttcatgatgtacctctgtacagaagaaatctgcaaactgcggtctctgaaacaaagacaaaaaattaaaccagtgaaaagaaataaatgtcagggaacagaacacgccttagtactgagggaaaaaaatctcagtgcacacataacaagttaagaatggtccaaagaagttcataacatatctgcgccccggtacgttgaac

SEQ ID NO: 52444 - DNA, 2059 bp, Zea Mays
cgcgtcgcgtccagccgccgctcgcccgctccgctcaccgtctctgcctcctctcgcgcagatccgcccctggccaagaccatcgcgtccctcttcctggactccggggagtcgtccttcgccaactcctcggcgcggacgacgcgccacgtggactgcgcgtccgacagccagtccaccgagtccgggggctccgctccgacgaccgcctcctcttcgagccccacgggccctccagctccatcctcgagaggaagcctccggcggcgcctgccctgcggccgcgagcggcggcgtcctcctctcgtccttcgttgacggcgtcgcggtggcgttcgactccgccgacccgtcagatggtgatggtgtcaggcggcgggggtaacgcgtgggcgaaggagatgaccctccgccgcaggatagccagcatattcaacaagacgcaggaacacttccctactctgaaggactacaacgattatctggaagaagttgaggatatgactttcaacctgatcgaagggatagatgtcgaggagattgaagcaaaaattgcaagataccaacaggaaaatgcggagcagatatacttgtccagagctaaaagggcagaagatcttgcggcagcacttaaagcaagcaggatgaaccccgtaaaggccgaggccaatgatacggtcagtagatatcttcgagatatatgtttccttagtaaattaactgtgaaggttataaaatatgggttttctttagcttagaaatccgatagtctgatagctggttgtgtaagtacacgagcaatcccatcatgctggtgttactggtaagttacttgcatcggaaatatttggcactagtatttagcatgtcaaccaggcaaacttctagtaaacatcatgaggatatggtagtgatgaaatgctgaatcatgaagtgacagctttcagatttatcaccttgacatcttatcaacatgttctattggaaattgtgatcataatcacagtattggatgtggatgtatgctttgcactagaaaataaaattaattatgcaggagtggtgatttagtggtcaaaggggcaattgagttttagggtacgcaagaatttgctatatatatagaattctagatgcataacagaatggatgtagcgaaaaagtcaaagcggcttagaatttggaacgagagggagtactatttttttcttgagatgttgatgcattgatgctgtgttggtgtaaatgccaacacttggtgctcttgcaatctgtaacaggctgctgggagttctcagggtattagtggcggggcaggagttcagggccagtatgcacctgccgctgttcttgggggagtggctcagccccgccccacaggtatggcgccccaactaatcggcagtgggtcggatcccctgcaaggagacgacgaggagaccaggagactacgcgcagagcgagcagcacgggctggcggatggactgctgaattgagcaagagaagagcgcttgaggaggcgtttagcgccatattcatctaggattagatcaaaaggcaacacatggtctgcattggcattggtaaaacctgcactagttctgcagggcaaagaataagaactactcaatcagatgccgccatgcaaaagttaaaatgtgtctctatccatggcagggctactctaaaactaactaaatatattactagtggtctttcacatttgcatggttggtcttattgtgaccggcaagtcagtaagtgggcagccgagccttttgttctggtactagcaaaaatggaagtgtagcgacatctgagtaatcacctcgttttcattagctagatccagcttcttcatgatgtacctctgtacagaagaaatctgcaaactgcggtctctgaaacaaagacaaaaaattaaaccagtgaaaagaaataaatgtcagggaacagaacacgccttagtactgagggaaaaaaatctcagtgcacacataacaagttaagaatggtccaaagaagttcataacatatctgcgccccggtacgttgaac

SEQ ID NO: 52445 - DNA, 1632 bp, Zea Mays
gcagttgcaggggacaggacaacacaatccgtcgggcggtcgggcctgttcgagttttgcagcattggcaggggcggcccagtacaagcgagcgaataggcccagccgcgtctccgcctccactccgccagccgccagccagtagccgcgtgcccgcgtcgcgtccagccgccgctcgcccgctccgctcaccgtctctgcctcctctcgcgcagatccgcccctggccaagaccatcgcgtccctcttcctggactccggggagtcgtccttcgccaactcctcggcgcggacgacgcgccacgtggactgcgcgtccgacagccagtccaccgagtccgaggccccggcggccgacgacttcgcggacgccatcgtccgggggctccgctccgacgaccgcctcctcttcgagccccacgggccctccagctccatcctcgagaggaagcctccggcggcgcctgccctgcggccgcgagcggcggcgtcctcctctcgtccttcgttgacggcgtcgcggtggcgttcgactccgccgacccgtcagatggtgatggtgtcaggcggcgggggtaacgcgtgggcgaaggagatgaccctccgccgcaggatagccagcatattcaacaagacgcaggaacacttccctactctgaaggactacaacgattatctggaagaagttgaggatatgactttcaacctgatcgaagggatagatgtcgaggagattgaagcaaaaattgcaagataccaacaggaaaatgcggagcagatatacttgtccagagctaaaagggcagaagatcttgcggcagcacttaaagcaagcaggatgaaccccgtaaaggccgaggccaatgatacgggtattagtggcggggcaggagttcagggccagtatgcacctgccgctgttcttgggggagtggctcagccccgccccacaggtatggcgccccaactaatcggcagtgggtcggatcccctgcaaggagacgacgaggagaccaggagactacgcgcagagcgagcagcacgggctggcggatggactgctgaattgagcaagagaagagcgcttgaggaggcgtttagcgccatattcatctaggattagatcaaaaggcaacacatggtctgcattggcattggtaaaacctgcactagttctgcagggcaaagaataagaactactcaatcagatgccgccatgcaaaagttaaaatgtgtctctatccatggcagggctactctaaaactaactaaatatattactagtggtctttcacatttgcatggttggtcttattgtgaccggcaagtcagtaagtgggcagccgagccttttgttctggtactagcaaaaatggaagtgtagcgacatctgagtaatcacctcgttttcattagctagatccagcttcttcatgatgtacctctgtacagaagaaatctgcaaactgcggtctctgaaacaaagacaaaaaattaaaccagtgaaaagaaataaatgtcagggaacagaacacgccttagtactgagggaaaaaaatctcagtgcacacataacaagttaagaatggtccaaagaagttcataacatatctgcgccccggtacgttgaac

SEQ ID NO: 52446 - DNA, 2570 bp, Zea Mays
cacagttccatcagcccatgcagcgtgctcgaggggcagattggctcgccgtggcagatgatctccacctgcagttggtttacagggatcagagaataggacgggatcaatcggaatccctgtcgtctacaccagaatcactagtgccttcttctttgcatgaactcgaagcactagtgcaaagaagaacaggaaagatactaaggggttcaagtatatggacgtcatcagtccatggttactctctaggtctctaggagatttccaactgaaattgatacgcagaaggaacgcgaaatagatgacaaaaaagactaatttgcagttgcaggggacaggacaacacaatccgtcgggcggtcgggcctgttcgagttttgcagcattggcaggggcggcccagtacaagcgagcgaataggcccagccgcgtctccgcctccactccgccagccgccagccagtagccgcgtgcccgcgtcgcgtccagccgccgctcgcccgctccgctcaccgtctctgcctcctctcgcgcagatccgcccctggccaagaccatcgcgtccctcttcctggactccggggagtcgtccttcgccaactcctcggcgcggacgacgcgccacgtggactgcgcgtccgacagccagtccaccgagtccgaggccccggcggccgacgacttcgcggacgccatcgtccgggggctccgctccgacgaccgcctcctcttcgagccccacgggccctccagctccatcctcgagaggaagcctccggcggcgcctgccctgcggccgcgagcggcggcgtcctcctctcgtccttcgttgacggcgtcgcggtggcgttcgactccgccgacccgtcagatggtgatggtgtcaggcggcgggggtaacgcgtgggcgaaggagatgaccctccgccgcaggatagccagcatattcaacaagacgcaggaacacttccctactctgaaggactacaacgattatctggaagaagttgaggatatgactttcaacctgatcgaagggatagatgtcgaggagattgaagcaaaaattgcaagataccaacaggaaaatgcggagcagatatacttgtccagagctaaaaggaagatcttgcggcagcacttaaagcaagcaggatgaaccccgtaaaggccgaggccaatgatacggtcagtagatatcttcgagatatatgtttccttagtaaattaactgtgaaggttataaaatatgggttttctttagcttagaaatccgatagtctgatagctggttgtgtaagtacacgagcaatcccatcatgctggtgttactggtaagttacttgcatcggaaatatttggcactagtatttagcatgtcaaccaggcaaacttctagtaaacatcatgaggatatggtagtgatgaaatgctgaatcatgaagtgacagctttcagatttatcaccttgacatcttatcaacatgttctattggaaattgtgatcataatcacagtattggatgtggatgtatgctttgcactagaaaataaaattaattatgcaggagtggtgatttagtggtcaaaggggcaattgagttttagggtacgcaagaatttgctatatatatagaattctagatgcataacagaatggatgtagcgaaaaagtcaaagcggcttagaatttggaacgagagggagtactatttttttcttgagatgttgatgcattgatgctgtgttggtgtaaatgccaacacttggtgctcttgcaatctgtaacaggctgctgggagttctcagggtattagtggcggggcaggagttcagggccagtatgcacctgccgctgttcttgggggagtggctcagccccgccccacaggtatggcgccccaactaatcggcagtgggtcggatcccctgcaaggagacgacgaggagaccaggagactacgcgcagagcgagcagcacgggctggcggatggactgctgaattgagcaagagaagagcgcttgaggaggcgtttagcgccatattcatctaggattagatcaaaaggcaacacatggtctgcattggcattggtaaaacctgcactagttctgcagggcaaagaataagaactactcaatcagatgccgccatgcaaaagttaaaatgtgtctctatccatggcagggctactctaaaactaactaaatatattactagtggtctttcacatttgcatggttggtcttattgtgaccggcaagtcagtaagtgggcagccgagccttttgttctggtactagcaaaaatggaagtgtagcgacatctgagtaatcacctcgttttcattagctagatccagcttcttcatgatgtacctctgtacagaagaaatctgcaaactgcggtctctgaaacaaagacaaaaaattaaaccagtgaaaagaaataaatgtcagggaacagaacacgccttagtactgagggaaaaaaatctcagtgcacacataacaagttaagaatggtccaaagaagttcataacatatctgcgccccggtacgttgaac

SEQ ID NO: 52447 - DNA, 1815 bp, Zea Mays
cttttatggcatggagtatgattagagccaccggcgcgtatcagcctagaggcgcgccgtccatggaggcgatggaggaggccaacaggacggcagtggagagctgccaccgggtgctggcgctcctctccaacccgcacggccagctcgtccccagcagggagctcgtggccaccaccggggaggccgtagccaggttcggctccctggcggccaagctctccagctccaacggcaatggcctgcagggccacgctagggtcaggaagaccaagaagcccctgcccatcttctacagcaacctcttcctcgagagcagctctgcggtggccgccgccgcgactgtggccaagacgcccagtccgagcccgaccactggcctccagctgttcccgaggtaccaccagatggagggctcgtcgtgtaaggatcctgtcaggatccctgcgcagttccccaagaggttgctgctggagaacctggctgccggtctggaggggtcgtcgccgcctgcccctccggtccggatggtgcagccggtgtccgttgcgcctcccgcagggatgcccaccccggcattgcccgccgcacacctccatttcatccagcagcagcagagctaccagaggtttcagctcatgcagcagatgaagattcagagcgagatggttaagaggagcaatcttggtgagcagggtggtagcttaagtggcggcgggggcggtggtaagggtgtgaacctcaagtttgacagctccaattgcacggcgtcatcgtctcgctcgttcctttcgtctctgagcatggaaggaagtcttgcgagcttggatggaagccgggccagcaggccgttccagctagttagtggctctcagacatctagcacaccggagctgggcctggtgcaaaggagaaggtgtgctgggaaggaggatgggagtggtcagtgcgcaaccgggagccggtgccattgttcaaagaaaaggaagctaaggataaggaggtccatcaaagtccctgcagtaagcaacaaggttgcagacatcccagctgatgagttctcgtggaggaagtatgggcagaagccaatcaagggatccccacatcctaggggttactacaagtgtagcagcgtgagaggctgccccgcgaggaagcacgtcgagaggtgcgtggacgacccttcgatgctgatcgttacctacgagggtgaccacaaccacagccgagttctagcccagccagcctgatctctctggctatcgattattcaagatcgcttccgtagtagtcaccctccctctctagagaagggaggacagcaacagcaacaatgagagcctagtgtctgtacataagttctgcttctaacagttggaggagtgattcggttagctagctctttcagaagaatcagtggtgacagaagggaacttatcgcgtcgatggatggaagaaagggagagagagagttcctcatcagatactcatactctatttttgtagcttcggtttatctctcttttttgttcatcctgtgctagggcccatcctgtgggttgtatgtctgggaatggtgttgggggggattggatcggagaagaaggcatgtggcaggaaattgcctgtaaaagtggctacacctaggaacagaatgtactatcgtcttcagcagtggtacagccttgttgacgcagtggtttttgtttggtctgtcgcgtgttgtttgttagcgcgagtgtgacgctgcgatgcatggtgttgccggctctgttcgtgcagcaagccatttgtactggcacgtgcacgtctgag

SEQ ID NO: 52448 - DNA, 1117 bp, Zea Mays
ccccatcccccggctcggcgccccgctaagtcgctactcgtacccgtttttgtttgttagtttgtttatattatatataaaataaaaatataaatcgtcgctaactccactctgccgagcgccgggtctcgcagacggaccacggtccacgggttgtaaaaccaaccaggctaccagccgagggcgagtgcgtcgctttcctcctccaggcctccaccctcgctctcgctcgctcgtcgtcaccaccacaccagcgaggcgcggcgcggcgggcttcgctcgtcgaggaagctaaggataaggaggtccatcaaagtccctgcagtaagcaacaaggttgcagacatcccagctgatgagttctcgtggaggaagtatgggcagaagccaatcaagggatccccacatcctaggggttactacaagtgtagcagcgtgagaggctgccccgcgaggaagcacgtcgagaggtgcgtggacgacccttcgatgctgatcgttacctacgagggtgaccacaaccacagccgagttctagcccagccagcctgatctctctggctatcgattattcaagatcgcttccgtagtagtcaccctccctctctagagaagggaggacagcaacagcaacaatgagagcctagtgtctgtacataagttctgcttctaacagttggaggagtgattcggttagctagctctttcagaagaatcagtggtgacagaagggaacttatcgcgtcgatggatggaagaaagggagagagagagttcctcatcagatactcatactctatttttgtagcttcggtttatctctcttttttgttcatcctgtgctagggcccatcctgtgggttgtatgtctgggaatggtgttgggggggattggatcggagaagaaggcatgtggcaggaaattgcctgtaaaagtggctacacctaggaacagaatgtactatcgtcttcagcagtggtacagccttgttgacgcagtggtttttgtttggtctgtcgcgtgttgtttgttagcgcgagtgtgacgctgcgatgcatggtgttgccggctctgttcgtgcagcaagccatttgtactggcacgtgcacgtctgag

SEQ ID NO: 52449 - DNA, 2013 bp, Zea Mays
gtccaattgatgtctagatttagactactcgagacattgttaagcaacacatagcaactgcatttctccatcttcaaagtgaaatatcagaggcactggttaggacacattcaacatcaaatgagaagttggaagagtcacagctgcaaactgctatggagacaagcaaaatcaaagtatcccaaggatgcatagatctcctgcaggaatttcatcatctggtagatggcaatatagagttgcttgttaagctgagggatttgattattgattgggtacaagaaggttttcaagagtttttccagaaacttgatggacattttcatgtgctttctgggagaagcaaaacaaatttacaagagccaactatggattctatgcaaactgataagaccccaacagtcttggtacttatgcttgcacaactctgtgtttacattgaacaaacaacagtccctaaagttacagaggagttagcttctttttttggaggtggtgcacatagctacgaatatggaccaccttttgtgcctggagaaatatgtcggctatatcgatcatctggagagaaattcttgcaccattacataaatatgaagacccagaagatctccaaacttcttaacaagcgatttacaacaccagtttggattaagcacaaggaacctagggaagtgaacatgtttgttgatctacttctcctagagatcaatggtctggtatctgaagtcaagcagatcttacctggtatggttcggcgacatcggcattcagatagcactggtagcacgacttcctccagaagcaatccaatgcgagaagacatgttgaaccgatcaaacacacatcgtgctagaagtcagtttttagaaaatcacctggcaaagttatttgagcaaaaaatggaaatattcaccaaagttgaatacacacaggaatctgttatttctactgtcctcaagctctgcctgaaaagcttgcaagaatttgtccgtcttcagactttcaacagaagtggatttcagcagattcagctggatatggaatttctcaagacctctcttaaggaatttgtggatgatgaagcagccattagctttttactcaaagaggtgaacaatgctgcccatgagagatgtcttgacccaatccctcttgagccccccatattagataagctcataaatgcaaaactagcaaaaattaaagagagaaacccaaatatgcggtagctatgcacagattggtgtcgtttactagaattcagttctgtccatttgaatgcactattcagagttgtgtgtgcaacttcatagagtttagggcacatagcatggatgaaaatctggagtcagactcagatttgaataacactccccaaattgtatactggtatacttaatttggggtggtcgagctgttagcatccccttgcttgtcaggctaccgtcaagttgtcttctgtgcattgttttcttatcccaggtcaggtactggtctgaatttaatcaaatgagcatcgagctgttagaaaaccaaggcaccaactctaatagattcaccatctggaaagcgagggcagttatcatgccttgtgaagatggtttgttgggattgcgattccctttatgcgtcctgtttttttatttgtcatcttctgctgtatcatcctttctttgaactatattttcatgtggtacatgataccttttgttaccttcgccacagtactgctcacgaatagcattttgagccattttgctatgccttggaataaaacttttatcctcgatcctaggaatggataacctcttggattttcacatctgatattaaccattaaaatttggatgatggaatgtgtgttcgcgactcatcatagttcacttcccgcctcctattacaaagataaaaaggagaccagaaattcagaacaccacattcagctaacaaggaaaactaaagagggcagatattgaagaccaagcacacaacagccttgggaaaacagag

SEQ ID NO: 52450 - DNA, 2381 bp, Zea Mays
atcactgccagttatgttaatgtgcatgtcgatgaggctatgtcagaggctcagagctcctctgtgttgcaatgtggacaacttaaaatcgaatctacttgagaagctggaagaatgtctcttgaatttccagaatgagactacacatgcttcaattggtgacatctcaaagacatttcgtgcttatttaataatatttcctgattcagaaaggcgtctcattgaacttgcacaagctttgttcttaaaccgatatgagacagtcagagagaatctgaagaaaagaattccatcaacagatctactggcaatgctacgatccttatgggaggatgcaaccatcatcgatgaggttatttcagaggctgcgctaccagctttttctttggagactactcgagacattgttaagcaacacatagcaactgcatttctccatcttcaaagtgaaatatcagaggcactggttaggacacattcaacatcaaatgagaagttggaagagtcacagctgcaaactgctatggagacaagcaaaatcaaagtatcccaaggatgcatagatctcctgcaggaatttcatcatctggtagatggcaatatagagttgcttgttaagctgagggatttgattattgattgggtacaagaaggttttcaagagtttttccagaaacttgatggacattttcatgtgctttctgggagaagcaaaacaaatttacaagagccaactatggattctatgcaaactgataagaccccaacagtcttggtacttatgcttgcacaactctgtgtttacattgaacaaacaacagtccctaaagttacagaggagttagcttctttttttggaggtggtgcacatagctacgaatatggaccaccttttgtgcctggagaaatatgtcggctatatcgatcatctggagagaaattcttgcaccattacataaatatgaagacccagaagatctccaaacttcttaacaagcgatttacaacaccagtttggattaagcacaaggaacctagggaagtgaacatgtttgttgatctacttctcctagagatcaatggtctggtatctgaagtcaagcagatcttacctggtatggttcggcgacatcggcattcagatagcactggtagcacgacttcctccagaagcaatccaatgcgagaagacatgttgaaccgatcaaacacacatcgtgctagaagtcagtttttagaaaatcacctggcaaagttatttgagcaaaaaatggaaatattcaccaaagttgaatacacacaggaatctgttatttctactgtcctcaagctctgcctgaaaagcttgcaagaatttgtccgtcttcagactttcaacagaagtggatttcagcagattcagctggatatggaatttctcaagacctctcttaaggaatttgtggatgatgaagcagccattagctttttactcaaagaggtgaacaatgctgcccatgagagatgtcttgacccaatccctcttgagccccccatattagataagctcataaatgcaaaactagcaaaaattaaagagagaaacccaaatatgcggtagctatgcacagattggtgtcgtttactagaattcagttctgtccatttgaatgcactattcagagttgtgtgtgcaacttcatagagtttagggcacatagcatggatgaaaatctggagtcagactcagatttgaataacactccccaaattgtatactggtatacttaatttggggtggtcgagctgttagcatccccttgcttgtcaggctaccgtcaagttgtcttctgtgcattgttttcttatcccaggtcaggtactggtctgaatttaatcaaatgagcatcgagctgttagaaaaccaaggcaccaactctaatagattcaccatctggaaagcgagggcagttatcatgccttgtgaagatggtttgttgggattgcgattccctttatgcgtcctgtttttttatttgtcatcttctgctgtatcatcctttctttgaactatattttcatgtggtacatgataccttttgttaccttcgccacagtactgctcacgaatagcattttgagccattttgctatgccttggaataaaacttttatcctcgatcctaggaatggataacctcttggattttcacatctgatattaaccattaaaatttggatgatggaatgtgtgttcgcgactcatcatagttcacttcccgcctcctattacaaagataaaaaggagaccagaaattcagaacaccacattcagctaacaaggaaaactaaagagggcagatattgaagaccaagcacacaacagccttgggaaaacagag

SEQ ID NO: 52451 - DNA, 3214 bp, Zea Mays
tccaaaacaccccttggcattctccatctccactcccacagcctctctggtctctccggcgcctcgactgcgagacccaccgcgacgccccaccgatatggcgacagccggtggcgccgcaccggcggcaatggacgagaaggcgcggcgcacgcgcgacctccttgctagcttctacaacaccgacccgtccgcggccgccgggggtgccgcggcccccgcgttcctggcgcgcccgtcccctaccgccgcgcccgcatcgcccctcgactcaatcaactccacctccttcgatcccgacatctacatgaatgtcctggtgcaacaatccaatctggaaggtcttctacaaaggcatgtgaagatggctactgagatcaagaacctagacacagatttacagatgctagtgtatgagaattataacaagtttattagtgcaactgacactataaaaaggatgaagactaacattgttggaatggaggcaaatatggagcagctccttacaaagataacatcagtgcaatcaagaagcgacacagtgaatacatctctttttgacaaaagggaaaacattgagaaattacatcgcacacgcaatctgctccggaaagttcaattcatatatgaccttccaactcgtcttaacaaatgcatcaagacagaagcatatgcagatgctgtcaggttttttactggagcaaaacctatttttgaggcctatggagatacatcctttcgagactgtaaaaaggcttctgaggaggcaatggatgtagttatacaacaccttcagacaaagttatactcagattctgaacctattgaagcaagagcagaagctgtagttctccttaaacaattgaagtttccagtggacaacttaaaatcgaatctacttgagaagctggaagaatgtctcttgaatttccagaatgagactacacatgcttcaattggtgacatctcaaagacatttcgtgcttatttaataatatttcctgattcagaaaggcgtctcattgaacttgcacaagctttgttcttaaaccgatatgagacagtcagagagaatctgaagaaaagaattccatcaacagatctactggcaatgctacgatccttatgggaggatgcaaccatcatcgatgaggttatttcagaggctgcgctaccagctttttctttggagactactcgagacattgttaagcaacacatagcaactgcatttctccatcttcaaagtgaaatatcagaggcactggttaggacacattcaacatcaaatgagaagttggaagagtcacagctgcaaactgctatggagacaagcaaaatcaaagtatcccaaggatgcatagatctcctgcagtgttctgtttctggctatgttgcttccaggaatttcatcatctggtagatggcaatatagagttgcttgttaagctgagggatttgattattgattgggtacaagaaggttttcaagagtttttccagaaacttgatggacattttcatgtgctttctgggagaagcaaaacaaatttacaagagccaactatggattctatgcaaactgataagaccccaacagtcttggtacttatgcttgcacaactctgtgtttacattgaacaaacaacagtccctaaagttacagaggagttagcttctttttttggaggtggtgcacatagctacgaatatggaccaccttttgtgcctggagaaatatgtcggctatatcgatcatctggagagaaattcttgcaccattacataaatatgaagacccagaagatctccaaacttcttaacaagcgatttacaacaccagtttggattaagcacaaggaacctagggaagtgaacatgtttgttgatctacttctcctagagatcaatggtctggtatctgaagtcaagcagatcttacctggtatggttcggcgacatcggcattcagatagcactggtagcacgacttcctccagaagcaatccaatgcgagaagacatgttgaaccgatcaaacacacatcgtgctagaagtcagtttttagaaaatcacctggcaaagttatttgagcaaaaaatggaaatattcaccaaagttgaatacacacaggaatctgttatttctactgtcctcaagctctgcctgaaaagcttgcaagaatttgtccgtcttcagactttcaacagaagtggatttcagcagattcagctggatatggaatttctcaagacctctcttaaggaatttgtggatgatgaagcagccattagctttttactcaaagaggtgaacaatgctgcccatgagagatgtcttgacccaatccctcttgagccccccatattagataagctcataaatgcaaaactagcaaaaattaaagagagaaacccaaatatgcggtagctatgcacagattggtgtcgtttactagaattcagttctgtccatttgaatgcactattcagagttgtgtgtgcaacttcatagagtttagggcacatagcatggatgaaaatctggagtcagactcagatttgaataacactccccaaattgtatactggtatacttaatttggggtggtcgagctgttagcatccccttgcttgtcaggctaccgtcaagttgtcttctgtgcattgttttcttatcccaggtcaggtactggtctgaatttaatcaaatgagcatcgagctgttagaaaaccaaggcaccaactctaatagattcaccatctggaaagcgagggcagttatcatgccttgtgaagatggtttgttgggattgcgattccctttatgcgtcctgtttttttatttgtcatcttctgctgtatcatcctttctttgaactatattttcatgtggtacatgataccttttgttaccttcgccacagtactgctcacgaatagcattttgagccattttgctatgccttggaataaaacttttatcctcgatcctaggaatggataacctcttggattttcacatctgatattaaccattaaaatttggatgatggaatgtgtgttcgcgactcatcatagttcacttcccgcctcctattacaaagataaaaaggagaccagaaattcagaacaccacattcagctaacaaggaaaactaaagagggcagatattgaagaccaagcacacaacagccttgggaaaacagag

SEQ ID NO: 52452 - DNA, 2775 bp, Zea Mays
agtgggtgtgcgagcgggcggacgaaagcaacgccccaacaacctgatccctccccttcaccccatcgcacgccacaacaaagcagagcgcggcgctacacctacacacctccacccggaccacccccccacagtcccacaccacaccacgcagtgccgtgccgcactgctgtcctgcaatctcccataaactcactcgcctcgcctcgcctcgcctcgcccacccgcccgcctgtccctccccaaggccgcagctcactcgtgtcgtgcacccgtcccctcccacccgccaagaactagcattgccgccgccggtgccagggggcggaggagaggccgcggcggcgagggagcggcaccaggcgcagggggtcaggagagccgccggcaggatgttcgggcgggacccctggggcgggcctctggagatctccaacgccgactcggcgacagatgacgaccggagccgggacctggaccgggcggcgctgatgcggcagctggacgagacgcagcagagctggctcctggccgggcccggcgaccaggcgggcaagaagaagaagaggtacgtcgacctgggctgcgtcgtcgtcgaccgcaagatcttcatgtggaccgtcggcaccatcctcggcctcggcgtcttcatcggcttcatcatgatgatcgtcaagctcgtcccgcacaagcgcccgccgccgccgccgcccgaccagtacacgcaggcgctgcacaaggcgctcatgttcttcaacgcgcagcgatccggtccgctgccgaagcacaacggcgtcagctggaggggcaattcctgcatgaaggatggcctctccgacagcaccgtccgccggagcttggtcggaggcttctacgatgcgggggacgccatcaagttcaactaccccatggcctggtccatgaccatgctcagctggagtgtgatcgagtacagggcgaagtatgaggccatcggtgagctcgaccatatcaaggagctgatcaagtggggaacagactacatcctcaaaaccttcaattcatctgctgacacgatagacaggattgtcgctcaggtgggtgtaggtgacacctctaaaggcagcagtcagcctaatgaccattactgctggatgagaccagaggacatcgactacaaaaggccagtcaccgagtgtcactcttgctcagatctagcgtctgaaatggctgctgccctggctgcagcttccatagtgttcaaggacagcaaaacctactccgacaagctcgtcaaaggcgcaaaagccctgtacaagttcggaaggctgcagcgcgggcgatacagccccaatgggtctgaccaggcaatcttctacaattccaccagctactgggatgagtttgtgtggggtggtgcgtggatgtactttgccacagggaacaattcatacctcacggtcgccacagccccaggaatggcgaagcatgctggagcctactggtttggaagtccaaactatggagtatttacctgggatgacaaacttccaggagctcaggttcttctcagcaggttgcgactcttcctaagtccagggtacccttacgaagaaatactgaggacattccacaaccaaaccgacaatgttatgtgctcatatctgcctctattcaattcattcaacttcactaaaggaggactaatacaactcaaccatggaaggcctcagccacttcagtatgctgtcaacgcagctttccttgcttctctatacagcgactatcttgaagctgcagacacgcctgggtggtactgcggacctaacttctacaccacagaagtcctccgcaagtttgccaggtcacagctcgactacatccttggcaagaacccattgaagatgagctacgttgtgggtttcggaaacaagtacccgaagcgccctcatcacagaggcgcgtcgatacctcacaacggcgtcaagtatgggtgcaaaggaggttacaagtggagggacacaaagaaggcaaaccctaacaggcgcgatggctacaaagatgtccgcacgaactacaactacacggagcctactctcgcagcgaatgctggtctggttgcagcgctgatctctatatccgatatcaaaaccggacggttcggcatcgataagaacaccatcttctctgcgattcctccgatgttcccaacacccccgccgccgccatcagcatggaaaccatagaggcaatacctctgaatgtttttccaaagcatcgaacagggaagtggagcaaacgtgtgatcatttggtacagcgaaggccagagacaggaaagctgacagcataagtttatagagcttctatttctgtaccaatatgacagatcagtataagatcctctgtcagacatagatcggaagctgtgtgcatcgcgtggagctaatttttgggggtcttgttgctattggcactccagctcatgtgtgaagttctttttgtagaaatggtacctttacaaattgttttataggagtgacttttcattattatagtaaagaatgcgtgtgatctctatgcttgcttcattttgatcctgttattttgtattcaaaaaatccctgtttgaggggaaatatgtttggtaacaagagatcacaggggatgggtggggtgggaaattagttcttgtcctcctcaatttcctccaattctcctgtggtcctctggttaccaaatcaaccctaagttctcggaaattacaatggaatgacaaaaggacaaacatgagtag

SEQ ID NO: 52453 - DNA, 330 bp, Zea Mays
tctgccttgatagctgacaggaggtttggtaggaccaacttgctgatatatgggccaacttggtcagagaaaaagaagaaaagatgatttctgaagggggggttcaggcaaggtttgcatgcagggtgtcatgataatcacggttgggaatggttaaggtttcaagatttgcacaggggatatttggcctagtgtaaggcataagaaggtggttgatcttggttcactgggcctatacctgaataacttgcacagcacagagagctcgcatttcgctttcctttgtggtcagagatccacatccgacaagagggggggggggggggggaa

SEQ ID NO: 52454 - DNA, 318 bp, Zea Mays
gctgacaggaggtttggtaggaccaacttgctgatatatgggccaacttggtcagagaaaaagaagaaaagatgatttctgaagggggggttcaggcaaggtttgcatgcagggtgtcatgataatcacggttgggaatggttaaggtttcaagatttgcacaggggatatttggcctagtgtaaggcataagaaggtggttgatcttggttcactgggcctatacctgaataacttgcacagcacagagagctcgcatttcgctttcctttgtggtcagagatccacatccgacaagagggggggggggggggggaa

SEQ ID NO: 52455 - DNA, 647 bp, Zea Mays
gtaactccgacaacctccaccacttaggcacatttcgttgagatggatccttgggtcatctctgaggtcctcaaaccaaatctggagtgtactggatttattgacgtgtcacagatacatatgctccgcgttgaaaaattcttggccaatgccgaaaaatctcatggtaaatatccttcattcgattatatcagtgtaacaccaccatatctggaggtcaactatagcacactgctcgcccaacttgcaaggtcaccattggttggaaaagactgcttcatcctagttgagtacccgctgaaaacagacatggctgaatcatgcggaaaccttgtacagatagctgacaggaggtttggtaggaccaacttgctgatatatgggccaacttggtcagagaaaaagaagaaaagatgatttctgaagggggggttcaggcaaggtgtcatgataatcacggttgggaatggttaaggtttcaagatttgcacaggggatatttggcctagtgtaaggcataagaaggtggttgatcttggttcactgggcctatacctgaataacttgcacagcacagagagctcgcatttcgctttcctttgtggtcagagatccacatccgacaagagggggggggggggggggaa

SEQ ID NO: 52456 - DNA, 672 bp, Zea Mays
tcttctgcagtagtaactccgacaacctccaccacttaggcacatttcgttgagatggatccttgggtcatctctgaggtcctcaaaccaaatctggagtgtactggatttattgacgtgtcacagatacatatgctccgcgttgaaaaattcttggccaatgccgaaaaatctcatggtaaatatccttcattcgattatatcagtgtaacaccaccatatctggaggtcaactatagcacactgctcgcccaacttgcaaggtcaccattggttggaaaagactgcttcatcctagttgagtacccgctgaaaacagacatggctgaatcatgcggaaaccttgtacagatagctgacaggaggtttggtaggaccaacttgctgatatatgggccaacttggtcagagaaaaagaagaaaagatgatttctgaagggggggttcaggcaaggtttgcatgcagggtgtcatgataatcacggttgggaatggttaaggtttcaagatttgcacaggggatatttggcctagtgtaaggcataagaaggtggttgatcttggttcactgggcctatacctgaataacttgcacagcacagagagctcgcatttcgctttcctttgtggtcagagatccacatccgacaagagggggggggggggggggaa

SEQ ID NO: 52457 - DNA, 1288 bp, Zea Mays
ccctcttatccgttctcgtctcctgtcccggactcccgggaccggggaggccgggatcgagaagggcaacgagcgcgtcccgtgctcgccgctcctcgccgatggcgtcctccactctgccagcctaccccttccgtatgtctcttcccggactacgagccccggaccctgctaaggttaagcacgtatccgttcgagcccccgctcgccgtcttcccgttgcagcctccgcggcaccatcaggcgccgcggcggcggcggcgagggagcgcaggcgtttcctggagagctacgggctcaacccaaacgacttcgaggaagatgcagaggagaatccgagggaagagagaaaggacaggcggagacgtcggcagtcggggagaggggagcaaactgcggaagcggcagtgactccagcgaaggtggaggagcctcgggagactcacaaaatgctccaggtgctaggtggaaaagtccgcagaaggaaattactttcacccaaagataggaatgtccgtccaatgatggaagttgtccgaggagcagcctttgacattttacagtcagctggtggttctcctgcttcactcagaccgggtcggtggctagacttgtatagtggtactggatccgttggaattgaagctatgagccgaggatgttcagaggcacatttcgttgagatggatccttgggtcatctctgaggtcctcaaaccaaatctggagtgtactggatttattgacgtgtcacagatacatatgctccgcgttgaaaaattcttggccaatgccgaaaaatctcatggtaaatatccttcattcgattatatcagtgtaacaccaccatatctggaggtcaactatagcacactgctcgcccaacttgcaaggtcaccattggttggaaaagactgcttcatcctagttgagtacccgctgaaaacagacatggctgaatcatgcggaaaccttgtacagatagctgacaggaggtttggtaggaccaacttgctgatatatgggccaacttggtcagagaaaaagaagaaaagatgatttctgaagggggggttcaggcaaggtgtcatgataatcacggttgggaatggttaaggtttcaagatttgcacaggggatatttggcctagtgtaaggcataagaaggtggttgatcttggttcactgggcctatacctgaataacttgcacagcacagagagctcgcatttcgctttcctttgtggtcagagatccacatccgacaagagggggggggggggggggaa

SEQ ID NO: 52458 - DNA, 2023 bp, Zea Mays
ccctcttatccgttctcgtctcctgtcccggactcccgggaccggggaggccgggatcgagaagggcaacgagcgcgtcccgtgctcgccgctcctcgccgatggcgtcctccactctgccagcctaccccttccgtatgtctcttcccggactacgagccccggaccctgctaaggttaagcacgtatccgttcgagcccccgctcgccgtcttcccgttgcagcctccgcggcaccatcaggcgccgcggcggcggcggcgagggagcgcaggcgtttcctggagagctacgggctcaacccaaacgacttcgaggaagatgcagaggagaatccgagggtctactccaattattctgaacttattcgtaatgattgtcgctgcgaattggtgtgattttgagtggtatgctttctcttttcattttttgcaggaagagagaaaggacaggcggagacgtcggcagtcggggagaggggagcaaactgcggaagcggcagtgactccagcgaaggtggaggagcctcgggagactcacaaaatgctccaggtgctaggtggaaaagtccgcagaaggaaattactttcacccaaagataggaatgtccgtccaatgatggaagttgtccgaggagcagcctttgacattttacagtcagctggtggttctcctgcttcactcagaccgggtcggtggctagacttgtatagtggtactggatccgttggaattgaagctatgagccgaggatgttcagaggttgtccaaaaattcatactgaaacttcagtcatgatagtctagacatgaatgcagataatccctcaaaacacccattcatctaattaccttttatttttttatcacaattcaaataagctcattgttgacaaattactcatgatgtttttatatatccaagtaaggactactgcatacttgcaaacttttcatcattcgtgcccacaagcacatcaagtgcagtgtatttttatgttcaatttccatgatgatcttttcaagggttgactgagctaggtgtgggtaggcagaagtcttcttcttttttcccatgattgtcgcatgatgatctattttaggaaatgggcttagtcttctgcagtagtaactccgacaacctccaccacttaggtttgagtcctcatccacttgaatttttgacacttattcttcttatttacagtgacacctagttcctcctaggatggttgatttatttttgtctagtcttatagctatcagattgatttcaaatgctgacaaatgaaaagtgtataagaccttcatgaagctgctaattctgaaattggatttggcgattgatgtgaactagaagtaatgcaatataatcattgatttctttgtcttttttttttcaaggcacatttcgttgagatggatccttgggtcatctctgaggtcctcaaaccaaatctggagtgtactggatttattgacgtgtcacagatacatatgctccgcgttgaaaaattcttggccaatgccgaaaaatctcatggtaaatatccttcattcgattatatcagtgtaacaccaccatatctggaggtcaactatagcacactgctcgcccaacttgcaaggtcaccattggttggaaaagactgcttcatcctagttgagtacccgctgaaaacagacatggctgaatcatgcggaaaccttgtacagatagctgacaggaggtttggtaggaccaacttgctgatatatgggccaacttggtcagagaaaaagaagaaaagatgatttctgaagggggggttcaggcaaggtgtcatgataatcacggttgggaatggttaaggtttcaagatttgcacaggggatatttggcctagtgtaaggcataagaaggtggttgatcttggttcactgggcctatacctgaataacttgcacagcacagagagctcgcatttcgctttcctttgtggtcagagatccacatccgacaagagggggggggggggggggaa

SEQ ID NO: 52459 - DNA, 1123 bp, Zea Mays
ccctcttatccgttctcgtctcctgtcccggactcccgggaccggggaggccgggatcgagaagggcaacgagcgcgtcccgtgctcgccgctcctcgccgatggcgtcctccactctgccagcctaccccttccgtatgtctcttcccggactacgagccccggaccctgctaaggaagagagaaaggacaggcggagacgtcggcagtcggggagaggggagcaaactgcggaagcggcagtgactccagcgaaggtggaggagcctcgggagactcacaaaatgctccaggtgctaggtggaaaagtccgcagaaggaaattactttcacccaaagataggaatgtccgtccaatgatggaagttgtccgaggagcagcctttgacattttacagtcagctggtggttctcctgcttcactcagaccgggtcggtggctagacttgtatagtggtactggatccgttggaattgaagctatgagccgaggatgttcagaggcacatttcgttgagatggatccttgggtcatctctgaggtcctcaaaccaaatctggagtgtactggatttattgacgtgtcacagatacatatgctccgcgttgaaaaattcttggccaatgccgaaaaatctcatggtaaatatccttcattcgattatatcagtgtaacaccaccatatctggaggtcaactatagcacactgctcgcccaacttgcaaggtcaccattggttggaaaagactgcttcatcctagttgagtacccgctgaaaacagacatggctgaatcatgcggaaaccttgtacagatagctgacaggaggtttggtaggaccaacttgctgatatatgggccaacttggtcagagaaaaagaagaaaagatgatttctgaagggggggttcaggcaaggtgtcatgataatcacggttgggaatggttaaggtttcaagatttgcacaggggatatttggcctagtgtaaggcataagaaggtggttgatcttggttcactgggcctatacctgaataacttgcacagcacagagagctcgcatttcgctttcctttgtggtcagagatccacatccgacaagagggggggggggggggggaa

SEQ ID NO: 52460 - DNA, 1277 bp, Zea Mays
ccctcttatccgttctcgtctcctgtcccggactcccgggaccggggaggccgggatcgagaagggcaacgagcgcgtcccgtgctcgccgctcctcgccgatggcgtcctccactctgccagcctaccccttccgtatgtctcttcccggactacgagccccggaccctgctaaggttaagcacgtatccgttcgagcccccgctcgccgtcttcccgttgcagcctccgcggcaccatcaggcgccgcggcggcggcggcgagggagcgcaggcgtttcctggagagctacgggctcaacccaaacgacttcgaggaagatgcagaggagaatccgagggtctactccaattattctgaacttattcgtaatgattgtcgctgcgaattggtgtgattttgagtggtatgctttctcttttcattttttgcaggaagagagaaaggacaggcggagacgtcggcagtcggggagaggggagcaaactgcggaagcggcagtgactccagcgaaggtggaggagcctcgggagactcacaaaatgctccaggtgctaggtggaaaagtccgcagaaggaaattactttcacccaaagataggaatgtccgtccaatgatggaagttgtccgaggagcagcctttgacattttacaggcacatttcgttgagatggatccttgggtcatctctgaggtcctcaaaccaaatctggagtgtactggatttattgacgtgtcacagatacatatgctccgcgttgaaaaattcttggccaatgccgaaaaatctcatggtaaatatccttcattcgattatatcagtgtaacaccaccatatctggaggtcaactatagcacactgctcgcccaacttgcaaggtcaccattggttggaaaagactgcttcatcctagttgagtacccgctgaaaacagacatggctgaatcatgcggaaaccttgtacagatagctgacaggaggtttggtaggaccaacttgctgatatatgggccaacttggtcagagaaaaagaagaaaagatgatttctgaagggggggttcaggcaaggtgtcatgataatcacggttgggaatggttaaggtttcaagatttgcacaggggatatttggcctagtgtaaggcataagaaggtggttgatcttggttcactgggcctatacctgaataacttgcacagcacagagagctcgcatttcgctttcctttgtggtcagagatccacatccgacaagagggggggggggggggggaa

SEQ ID NO: 52461 - DNA, 1244 bp, Zea Mays
ccctcttatccgttctcgtctcctgtcccggactcccgggaccggggaggccgggatcgagaagggcaacgagcgcgtcccgtgctcgccgctcctcgccgatggcgtcctccactctgccagcctaccccttccgtatgtctcttcccggactacgagccccggaccctgctaaggttaagcacgtatccgttcgagcccccgctcgccgtcttcccgttgcagcctccgcggcaccatcaggcgccgcggcggcggcggcgagggagcgcaggcgtttcctggagagctacgggctcaacccaaacgacttcgaggaagatgcagaggagaatccgagggaagagagaaaggacaggcggagacgtcggcagtcggggagaggggagcaaactgcggaagcggcagtgactccagcgaaggtggaggagcctcgggagactcacaaaatgctccaggtgctaggtggaaaagtccgcagaaggaaattactttcacccaaagataggaatgtccgtccaatgatggaagttgtccgaggagcagcctttgacattttacagtcagctggtggttctcctgcttcactcagaccgggtcggtggctagacttgtatagtggtactggatccgttggaattgaagctatgagccgaggatgttcagaggcacatttcgttgagatggatccttgggtcatctctgaggtcctcaaaccaaatctggagtgtactggatttattgacgtgtcacagatacatatgctccgcgttgaaaaattcttggccaatgccgaaaaatctcatggtaaatatccttcattcgattatatcagtgtaacaccaccatatctggaggtcaactatagcacactgctcgcccaacttgcaaggtcaccattggttggaaaagactgcttcatcatagctgacaggaggtttggtaggaccaacttgctgatatatgggccaacttggtcagagaaaaagaagaaaagatgatttctgaagggggggttcaggcaaggtttgcatgcagggtgtcatgataatcacggttgggaatggttaaggtttcaagatttgcacaggggatatttggcctagtgtaaggcataagaaggtggttgatcttggttcactgggcctatacctgaataacttgcacagcacagagagctcgcatttcgctttcctttgtggtcagagatccacatccgacaagagggggggggggggggggaa

SEQ ID NO: 52462 - DNA, 1283 bp, Zea Mays
ccctcttatccgttctcgtctcctgtcccggactcccgggaccggggaggccgggatcgagaagggcaacgagcgcgtcccgtgctcgccgctcctcgccgatggcgtcctccactctgccagcctaccccttccgtatgtctcttcccggactacgagccccggaccctgctaaggttaagcacgtatccgttcgagcccccgctcgccgtcttcccgttgcagcctccgcggcaccatcaggcgccgcggcggcggcggcgagggagcgcaggcgtttcctggagagctacgggctcaacccaaacgacttcgaggaagatgcagaggagaatccgagggaagagagaaaggacaggcggagacgtcggcagtcggggagaggggagcaaactgcggaagcggcagtgactccagcgaaggtggaggagcctcgggagactcacaaaatgctccaggtgctaggtggaaaagtccgcagaaggaaattactttcacccaaagataggaatgtccgtccaatgatggaagttgtccgaggagcagcctttgacattttacagtcagctggtggttctcctgcttcactcagaccgggtcggtggctagacttgtatagtggtactggatccgttggaattgaagctatgagccgaggatgttcagaggcacatttcgttgagatggatccttgggtcatctctgaggtcctcaaaccaaatctggagtgtactggatttattgacgtgtcacagatacatatgctccgcgttgaaaaattcttggccaatgccgaaaaatctcatggtaaatatccttcattcgattatatcagtgtaacaccaccatatctggaggtcaactatagcacactgctcgcccaacttgcaaggtcaccattggttggaaaagactgcttcatcctagttgagtacccgctgaaaacagacatggctgaatcatgcggaaaccttgtacagatagctgacaggaggtttggtaggaccaacttgctgatatatgggccaacttggtcagagaaaaagaagaaaagatgatttctgaagggggggttcaggtgtcatgataatcacggttgggaatggttaaggtttcaagatttgcacaggggatatttggcctagtgtaaggcataagaaggtggttgatcttggttcactgggcctatacctgaataacttgcacagcacagagagctcgcatttcgctttcctttgtggtcagagatccacatccgacaagagggggggggggggggggaa

SEQ ID NO: 52463 - DNA, 1315 bp, Zea Mays
attcccagtaggaaccctcttatccgttctcgtctcctgtcccggactcccgggaccggggaggccgggatcgagaagggcaacgagcgcgtcccgtgctcgccgctcctcgccgatggcgtcctccactctgccagcctaccccttccgtatgtctcttcccggactacgagccccggaccctgctaaggttaagcacgtatccgttcgagcccccgctcgccgtcttcccgttgcagcctccgcggcaccatcaggcgccgcggcggcggcggcgagggagcgcaggcgtttcctggagagctacgggctcaacccaaacgacttcgaggaagatgcagaggagaatccgagggaagagagaaaggacaggcggagacgtcggcagtcggggagaggggagcaaactgcggaagcggcagtgactccagcgaaggtggaggagcctcgggagactcacaaaatgctccaggtgctaggtggaaaagtccgcagaaggaaattactttcacccaaagataggaatgtccgtccaatgatggaagttgtccgaggagcagcctttgacattttacagtcagctggtggttctcctgcttcactcagaccgggtcggtggctagacttgtatagtggtactggatccgttggaattgaagctatgagccgaggatgttcagaggcacatttcgttgagatggatccttgggtcatctctgaggtcctcaaaccaaatctggagtgtactggatttattgacgtgtcacagatacatatgctccgcgttgaaaaattcttggccaatgccgaaaaatctcatggtaaatatccttcattcgattatatcagtgtaacaccaccatatctggaggtcaactatagcacactgctcgcccaacttgcaaggtcaccattggttggaaaagactgcttcatcctagttgagtacccgctgaaaacagacatggctgaatcatgcggaaaccttgtacagatagctgacaggaggtttggtaggaccaacttgctgatatatgggccaacttggtcagagaaaaagaagaaaagatgatttctgaagggggggttcaggcaaggtttgcatgcagggtgtcatgataatcacggttgggaatggttaaggtttcaagatttgcacaggggatatttggcctagtgtaaggcataagaaggtggttgatcttggttcactgggcctatacctgaataacttgcacagcacagagagctcgcatttcgctttcctttgtggtcagagatccacatccgacaagagggggggggggggggggaa

SEQ ID NO: 52464 - DNA, 1510 bp, Zea Mays
gtcggttttaagcccaaagcaccctctgttttactgggccactgaataggtccgatgggacaagtccactagtgcattccatcttcaaacaacttgcttccaaggctcaactctcgtaggccagaagcccacaaccatcagcccagtgctgaccagaacccgatgtcgttcctgtctcggtcagcagttccttttccttcctcatgaaggcgccgcgccggcgtgggggcatcgatcgccgcgccggtgattcggcgcaccgccctgccctgcccgcccagcggattcggtgcggcagacgtacgcggacagccggacccggacgcgatgtgaagtgcgaaccccaaaaatattccacttgtcttcccccctcgtcgacccacagaaccttcgactcgtcgccactggagaagtggctggctacctccgattcagcacgtaaagaaagcaaaccgcccgcagttccgttccgcaagaccagatcgcccgcttttctcctccggtcctctcctccctcccctctcccctgagccctgatcgaatcgatccacggtgccggcggacgcctcgacccctccagttccatccaatccgccagtgaacagatggcgtcgcagtgggctgctccgccgccgggctacccggccgggcacgggcaggcgtacggcgaccagcagctggccacgccgccgcctcaggcagcgacggccgtggccgtgacggcggcgagcaacggcgtgggcaacccctacgtcgtcgtcacccccgcgtctgccgcaccgtccacctgccagaccgtcaggaaggcgctgggccgctacggcaagctgctcgaggacggaacccgcaaggccgccgacgccaccggcaacatctggcaccacctccggacggcgccgaacatggcggacgcggcggtggcgcggctgacgcaggggaccaaggtgtacgcggagggcggccacgacagggtgttctaccagacgttcggcgccatgcccggggagcagctccgcaaggcctacgcctgctacctctccacctcctcggggcccgtcatcggcacgctctacctctccacggcgcgcctcgccttctgcagcgacagcccgctctgctaccagggccctgccggccagccgcacgagtgcatgtactacaaggtggtgcttcctctgagccaggtgacatccgtgaacccttcttccagcatgcgcaaccgggcagaaaggtacattcagatcaggaccatggataaccacgagttctggttcatggggttcgtgaactacgacaaggccctcaagaatctctacgaggccctgcagcaccgcgatgtcagcgcccaccagcgctgctgatgctgatcaggcttgggttaggggaaaagctggattggtgtgctcaagctgacggagagagtgggccagactatgagctgctggaagatggccttcaagacaagtgtctggaggaagatcgattcatacattggtatcttggagaaaag

SEQ ID NO: 52465 - DNA, 2714 bp, Zea Mays
ccttcctcatgaaggcgccgcgccggcgtgggggcatcgatcgccgcgccggtgattcggcgcaccgccctgccctgcccgcccagcggattcggtgcggcagacgtacgcggacagccggacccggacgcgatgtgaagtgcgaaccccaaaaatattccacttgtcttcccccctcgtcgacccacagaaccttcgactcgtcgccactggagaagtggctggctacctccgattcagcacgtaaagaaagcaaaccgcccgcagttccgttccgcaagaccagatcgcccgcttttctcctccggtcctctcctccctcccctctcccctgagccctgatcgaatcgatccacggtgccggcggacgcctcgacccctccagttccatccaatccgccagtgaacagatggcgtcgcagtgggctgctccgccgccgggctacccggccgggcacgggcaggcgtacggcgaccagcagctggccacgccgccgcctcaggcagcgacggccgtggccgtgacggcggcgagcaacggcgtgggcaacccctacgtcgtcgtcacccccgcgtctgccgcaccgtccacctgccagaccgtcaggaaggcgctgggccgctacggcaagctgctcgaggacggaacccgcaaggcctacgcctgctacctctccacctcctcggggcccgtcatcggcacgctctacctctccacggcgcgcctcgccttctgcagcgacagcccgctctgctaccagggccctgccggccagccgcacgagtgcatgtactacaaggtggtgcttcctctgagccaggtgacatccgtgaacccttcttccagcatgcgcaaccgggcagaaaggtacattcagatcaggaccatggataaccacgagttctggttcatggggttcgtgaactacgacaaggccctcaagaatctctacgaggccctgcagcaccgcgatgtcagcgcccaccagcgctgctgatgctgatcaggcttgggttaggtccgacagtcctactgctacttatttcgtccatgatgaactgtgatacctttatctcatctgatgttcttgatgaataagagaaccaccgaaaactcctggtgtgcttgcgtcgctaatctgatcggtgcagagagaatatggtgcatctcacaaaataacatttctttaatccttgatacattctcatttagccaaatttttttcatggtcatggagtccattacaatgctgcaggcctgatcctccatatacaaacttcaaccttgcaatagcatattagactttacaccatagaggctgcatgctgtctccacatcgatcaaatatacaatcaatagcgttcgtttctttagcaatagaaacgtatacaagctcagcaggaaggaaggtagcagcaattaagttttctcgctatcgatttacaacaacattacctaggaaaactgttgttgccatggcgcgcgttcggttctgttctgtcattctgtgcgtgtacagtataggcttgtattgtaagctgtagcacggtgacggcgcgctgtgctttgctccggtgcctcaggtgttggatcgacggtcagtggtggtgtgggtgtccgtgggcatgcgcggtctggtcgatggagtcgacgcggctcttgagcgccgcgagctggcccctgacgctgaggtcgatgacgtgcgagtcgtcggtgccgtagcagacgacgaagccggcgatgagggacgcgtccacggcggtctctaccttgaggtcgacaaagccggtgaggcggcgcatcttgcgcgcgatgcgctcggcctggcgcgcgtccagctccacggcggaggtcaccagcacccggagcgcgaccatctgcggcggcggcggggcgctggcctcgccgtccgggacggcgggggccatgctgcagttccggtccaggagcgaccgcaggaagtcgagcgtgagcggcttgaacggggccgcgactgggactgggactgggactgggacggacgcggtggtcccgtcgatgtgctcgacgccgacgtagctgctgtcccggcgcagcgtctgcgcctgccaccgagggcagtgcgcatgggaccgccccgcggccgccgtggtgctcggctgcgccggcacgagatggccgcctgggctgatgggctggttcaagatcttcatcgctaccctgcacgtgaacaataatagttcaaaatctatagcagcaagcacaaagaagaggaacatgtatgggactgagcaaggactcgaacaatgaaacgcggtggttcttgcctcagcactcagcagcacaagcagctggtgatcggagggaacggcagggaagctgaggcgagggtggggagaagcagaagactgcgcggcgcagcagtgtggggaagggtaatagctgccagagtgccagcgggggggataagatagctgctgctgcgtagcgtcgctagcttggtgtcgaggaggggaagaggacgggagagtttggcgtgcacacgatgcggccccggcagccgcacacgccccatccggggaaatctgcatctgcgtgccgcacacgccccagtccccgccccgtgtggtcaccaccggtcattccatcacgcgcccccgcccggccgccccctatccgctgtctgttccatgcgcgcgacggggcgccacggctttggtcggccgcgcctcgc

SEQ ID NO: 52466 - DNA, 688 bp, Zea Mays
aaaggccatcccctagatgctaacttggctatgtgcaacatcgatttcggattgccagttgttgaggatgttggcttgccaaatggatcaggtgcaccagcagagaaggcagacgcaaaaaagagtaaaaaaacaaggcagaagcgtaaggcccgtgatgaagagtctacagaggagaaaaggaacaacttcaacttctttgcgtttaaagaaccagtgctctttgttgggcatctacaggacagttcaattttaatggtagagaagcgatggatggatgttgttgaaggtttcagcgcaccagttgacagacatatatatggcacatgattcttgctaacatcggcctttggcgctcgtgacaagcaaaccattgtttttgtttttttttctcaagtaatgcaaaacatccgtcctcaagcatgtcaacggttgaaaggggctacaagatattgcagcacaaagtgaaagctgcacgtagactttagagtcggggattgtggcaatggtgtattttcttttgttctctagtaatgtagtggactccctgcgccagtttgtcataccttgtcgctgcgcaaaattttgtcacatgtaaacactgtatcatcacttctgttattgttgagctgatatcttctgtttgcctcaggaaaaaaataatagtaggaaaaaaacagtaaaacta

SEQ ID NO: 52467 - DNA, 2988 bp, Zea Mays
cgcacgctgccgtcgaccgctagttgaccttcccttccctcagaaccctaacgagcggtgagccgcctctctcgagcgcctaccactctgccccctgcgccgcctgcggcctgcccccaactcccgcaccatcgcgaagtcctcgacgtctaggtcgccattccagtaccttctagaatatcaggatcgccagcgccgccgcatcgggcggccctgtggcccatggacaagctccgcgtccaccgctgcaccggcgacgcggtcgagtggtccccctctcccatcgtcgcgctcgccgcctctccctgcgcctcccaggtcgccgccgcgcgtgaagacggctcgctcgagctctggctcgtctccccgggctccgtcggctggcacaaccagctcactatacaaggcaacgccgcgtcgagggtcacatcactggtgtgggggcggagaggtggagtgaccggccggctgctctcgtccagcattgatgggtcggtgtccgaatgggatctctttcacctgcagcaaaagactgttctagatactgttggagttccaatctggcaaatggccatcgaacctttggatgatgctaaaaatactgaaaataatagctcagagtttgctgtcaatggtcatacaaaccaaaatgactccagcgattctgactttagtaacattgatgatggtgacaactctgaggatgaagatggttctaccaacacaagatcttcatatcatgggaatgatttccagcgaatggctcttgcatgtgatgatggttctgtacgattgtttaacgtgcctgattcaggtgcattgacttactatagatttcttcccagagtgagcgggcggtctctcagcgtgacatggagtagtaacgccaaatttgtattttctggcagcagtgatggtttaatcagatgctgggattcaacatctttccatgaaatgtatcgtattactgctggattaggaggggctggtacctcacctgaactttgcatctggacactattgtttctgaggtgtggaactattgttagtggagatagtaccgggagtgtacagttttgggatagccgccatggaacacttctgcaagctcactcctatcataaaggcgacgtgaatgcactaacaactgtgcctggtgagaacagggtattttccgcagggtccgatggccaggtaattttatacaaaatatcaaaagatgaatttggtgctactaaaaatgtggtcaaagagcaagttcacaaatgggtctatgtgggatatgtgagagctcacactcatgatatacatcacctgaggaaaaggtggtgaagattcgccggcgtgaaaaacatgaatttagttaccacaaatgggctcatcttggtgttccaatgcttatatctggtggtgatgacaccaagctgtttgcatattcagcaagagagtttactcagtttgcacctcataatttctgccctgcacctcaacgccctttgataaagatggctagggatagcacagtcaatggagattctgtaatgcttgtccagtctccaaactggttggatattttacttgtgacagttcagaacaaattgacgactccaagtacatcatcatctagaggagatgctacagtccgacaacttgctcgtttgaaaagcaaggggtccagaaaaatcatttctagtgctgcctctgccaatggaacacttttggcctattcagatggtgtgagaccctgcctctttgcactaaggcataagggtggaaagaagtatacccttgacaaattagagctaccaaaaggattgccctgttctcagagtatggcgtttacggttgattcgtccaatttgatacttgcgggacgtaatggaaaaatatacatcattgacattgcaacaagagaaatttcaaatgtatttcaccctacaagaaaggcagatggagcaaaaatctcaagagaatcacctataacgaagatgttcctaagtgcagatgggcaatggctggctgcagttaactgctatggcgatatttatgtatttaatcttgaggtgcaaaggcaacactggttcatatcccgaatgaacggtggttctgttacatctggtggattttgccccaaaaacaacacacttgtgataactacatctaaaaatgaggtgtatgtatttgatgtggaagcaaaacaattaggcgaatggtccaagcgatatacacaccagttgcccagaagtttccaggaattccctggagaggtcattggcttatcatttcctccgcaaagctcatcgtcagttgttgtatacagtaccagggctatgtgcaacatcgatttcggattgccagttgttgaggatgttggcttgccaaatggatcaggtgcaccagcagagaaggcagacgcaaaaaagagtaaaaaaacaaggcagaagcgtaaggcccgtgatgaagagtctacagaggagaaaaggaacaacttcaacttctttgcgtttaaagaaccagtgctctttgttgggcatctacaggacagttcaattttaatggtagagaagcgatggatggatgttgttgaaggtttcagcgcaccagttgacagacatatatatggcacatgattcttgctaacatcggcctttggcgctcgtgacaagcaaaccattgtttttgtttttttttctcaagtaatgcaaaacatccgtcctcaagcatgtcaacggttgaaaggggctacaagatattgcagcacaaagtgaaagctgcacgtagactttagagtcggggattgtggcaatggtgtattttcttttgttctctagtaatgtagtggactccctgcgccagtttgtcataccttgtcgctgcgcaaaattttgtcacatgtaaacactgtatcatcacttctgttattgttgagctgatatcttctgtttgcctcaggaaaaaaataatagtaggaaaaaaacagtaaaacta

SEQ ID NO: 52468 - DNA, 3019 bp, Zea Mays
cgcacgctgccgtcgaccgctagttgaccttcccttccctcagaaccctaacgagcggtgagccgcctctctcgagcgcctaccactctgccccctgcgccgcctgcggcctgcccccaactcccgcaccatcgcgaagtcctcgacgtctaggtcgccattccagtaccttctagaatatcaggatcgccagcgccgccgcatcgggcggccctgtggcccatggacaagctccgcgtccaccgctgcaccggcgacgcggtcgagtggtccccctctcccatcgtcgcgctcgccgcctctccctgcgcctcccaggtcgccgccgcgcgtgaagacggctcgctcgagctctggctcgtctccccgggctccgtcggctggcacaaccagctcactatacaaggcaacgccgcgtcgagggtcacatcactggtgtgggggcggagaggtggagtgaccggccggctgctctcgtccagcattgatgggtcggtgtccgaatgggatctctttcacctgcagcaaaaggatactgttggagttccaatctggcaaatggccatcgaacctttggatgatgctaaaaatactgaaaataatagctcagagtttgctgtcaatggtcatacaaaccaaaatgactccagcgattctgactttagtaacattgatgatggtgacaactctgaggatgaagatggttctaccaacacaagatcttcatatcatgggaatgatttccagcgaatggctcttgcatgtgatgatggttctgtacgattgtttaacgtgcctgattcaggtgcattgacttactatagatttcttcccagagtgagcgggcggtctctcagcgtgacatggagtagtaacgccaaatttgtattttctggcagcagtgatggtttaatcagatgctgggattcaacatctttccatgaaatgtatcgtattactgctggattaggaggggctggtacctcacctgaactttgcatctggacactattgtttctgaggtgtggaactattgttagtggagatagtaccgggagtgtacagttttgggatagccgccatggaacacttctgcaagctcactcctatcataaaggcgacgtgaatgcactaacaactgtgcctggtgagaacagggtattttccgcagggtccgatggccaggtaattttatacaaaatatcaaaagatgaatttggtgctactaaaaatgtggtcaaagagcaagttcacaaatgggtctatgtgggatatgtgagagctcacactcatgatgtaagggcactgaccatggctgtacctatctgtagagaagatacatcacctgaggaaaaggtggtgaagattcgccggcgtgaaaaacatgaatttagttaccacaaatgggctcatcttggtgttccaatgcttatatctggtggtgatgacaccaagctgtttgcatattcagcaagagagtttactcagtttgcacctcataatttctgccctgcacctcaacgccctttgataaagatggctagggatagcacagtcaatggagattctgtaatgcttgtccagtctccaaactggttggatattttacttgtgacagttcagaacaaattgacgactccaagtacatcatcatctagaggagatgctacagtccgacaacttgctcgtttgaaaagcaaggggtccagaaaaatcatttctagtgctgcctctgccaatggaacacttttggcctattcagatggtgtgagaccctgcctctttgcactaaggcataagggtggaaagaagtatacccttgacaaattagagctaccaaaaggattgccctgttctcagagtatggcgtttacggttgattcgtccaatttgatacttgcgggacgtaatggaaaaatatacatcattgacattgcaacaagagaaatttcaaatgtatttcaccctacaagaaaggcagatggagcaaaaatctcaagagaatcacctataacgaagatgttcctaagtgcagatgggcaatggctggctgcagttaactgctatggcgatatttatgtatttaatcttgaggtgcaaaggcaacactggttcatatcccgaatgaacggtggttctgttacatctggtggattttgccccaaaaacaacacacttgtgataactacatctaaaaatgaggtgtatgtatttgatgtggaagcaaaacaattaggcgaatggtccaagcgatatacacaccagttgcccagaagtttccaggaattccctggagaggtcattggcttatcatttcctccgcaaagctcatcgtcagttgttgtatacagtaccagggctatgtgcaacatcgatttcggattgccagttgttgaggatgttggcttgccaaatggatcaggtgcaccagcagagaaggcagacgcaaaaaagagtaaaaaaacaaggcagaagcgtaaggcccgtgatgaagagtctacagaggagaaaaggaacaacttcaacttctttgcgtttaaagaaccagtgctctttgttgggcatctacaggacagttcaattttaatggtagagaagcgatggatggatgttgttgaaggtttcagcgcaccagttgacagacatatatatggcacatgattcttgctaacatcggcctttggcgctcgtgacaagcaaaccattgtttttgtttttttttctcaagtaatgcaaaacatccgtcctcaagcatgtcaacggttgaaaggggctacaagatattgcagcacaaagtgaaagctgcacgtagactttagagtcggggattgtggcaatggtgtattttcttttgttctctagtaatgtagtggactccctgcgccagtttgtcataccttgtcgctgcgcaaaattttgtcacatgtaaacactgtatcatcacttctgttattgttgagctgatatcttctgtttgcctcaggaaaaaaataatagtaggaaaaaaacagtaaaacta

SEQ ID NO: 52469 - DNA, 2990 bp, Zea Mays
cgcacgctgccgtcgaccgctagttgaccttcccttccctcagaaccctaacgagcggtgagccgcctctctcgagcgcctaccactctgccccctgcgccgcctgcggcctgcccccaactcccgcaccatcgcgaagtcctcgacgtctaggtcgccattccagtaccttctagaatatcaggatcgccagcgccgccgcatcgggcggccctgtggcccatggacaagctccgcgtccaccgctgcaccggcgacgcggtcgagtggtccccctctcccatcgtcgcgctcgccgcctctccctgcgcctcccaggtcgccgccgcgcgtgaagacggctcgctcgagctctggctcgtctccccgggctccgtcggctggcacaaccagctcactatacaaggcaacgccgcgtcgagggtcacatcactggtgtgggggcggagaggtggagtgaccggccggctgctctcgtccagcattgatgggtcggtgtccgaatgggatctctttcacctgcagcaaaagactgttctagatactgttggagttccaatctggcaaatggccatcgaacctttggatgatgctaaaaatactgaaaataatagctcagagtttgctgtcaatggtcatacaaaccaaaatgactccagcgattctgactttagtaacattgatgatggtgacaactctgaggatgaagatggttctaccaacacaagatcttcatatcatgggaatgatttccagcgaatggctcttgcatgtgatgatggttctgtacgattgtttaacgtgcctgattcaggtgcattgacttactatagatttcttcccagagtgagcgggcggtctctcagcgtgacatggagtagtaacgccaaatttgtattttctggcagcagtgatggtttaatcagatgctgggattcaacatctttccatgaaatgtatcgtattactgctggattaggaggggctggtacctcacctgaactttgcatctggacactattgtttctgaggtgtggaactattgttagtggagatagtaccgggagtgtacagttttgggatagccgccatggaacacttctgcaagctcactcctatcataaaggcgacgtgaatgcactaacaactgtgcctggtaattttatacaaaatatcaaaagatgaatttggtgctactaaaaatgtggtcaaagagcaagttcacaaatgggtctatgtgggatatgtgagagctcacactcatgatgtaagggcactgaccatggctgtacctatctgtagagaagatacatcacctgaggaaaaggtggtgaagattcgccggcgtgaaaaacatgaatttagttaccacaaatgggctcatcttggtgttccaatgcttatatctggtggtgatgacaccaagctgtttgcatattcagcaagagagtttactcagtttgcacctcataatttctgccctgcacctcaacgccctttgataaagatggctagggatagcacagtcaatggagattctgtaatgcttgtccagtctccaaactggttggatattttacttgtgacagttcagaacaaattgacgactccaagtacatcatcatctagaggagatgctacagtccgacaacttgctcgtttgaaaagcaaggggtccagaaaaatcatttctagtgctgcctctgccaatggaacacttttggcctattcagatggtgtgagaccctgcctctttgcactaaggcataagggtggaaagaagtatacccttgacaaattagagctaccaaaaggattgccctgttctcagagtatggcgtttacggttgattcgtccaatttgatacttgcgggacgtaatggaaaaatatacatcattgacattgcaacaagagaaatttcaaatgtatttcaccctacaagaaaggcagatggagcaaaaatctcaagagaatcacctataacgaagatgttcctaagtgcagatgggcaatggctggctgcagttaactgctatggcgatatttatgtatttaatcttgaggtgcaaaggcaacactggttcatatcccgaatgaacggtggttctgttacatctggtggattttgccccaaaaacaacacacttgtgataactacatctaaaaatgaggtgtatgtatttgatgtggaagcaaaacaattaggcgaatggtccaagcgatatacacaccagttgcccagaagtttccaggaattccctggagaggtcattggcttatcatttcctccgcaaagctcatcgtcagttgttgtatacagtaccagggctatgtgcaacatcgatttcggattgccagttgttgaggatgttggcttgccaaatggatcaggtgcaccagcagagaaggcagacgcaaaaaagagtaaaaaaacaaggcagaagcgtaaggcccgtgatgaagagtctacagaggagaaaaggaacaacttcaacttctttgcgtttaaagaaccagtgctctttgttgggcatctacaggacagttcaattttaatggtagagaagcgatggatggatgttgttgaaggtttcagcgcaccagttgacagacatatatatggcacatgattcttgctaacatcggcctttggcgctcgtgacaagcaaaccattgtttttgtttttttttctcaagtaatgcaaaacatccgtcctcaagcatgtcaacggttgaaaggggctacaagatattgcagcacaaagtgaaagctgcacgtagactttagagtcggggattgtggcaatggtgtattttcttttgttctctagtaatgtagtggactccctgcgccagtttgtcataccttgtcgctgcgcaaaattttgtcacatgtaaacactgtatcatcacttctgttattgttgagctgatatcttctgtttgcctcaggaaaaaaataatagtaggaaaaaaacagtaaaacta

SEQ ID NO: 52470 - DNA, 2988 bp, Zea Mays
cgcacgctgccgtcgaccgctagttgaccttcccttccctcagaaccctaacgagcggtgagccgcctctctcgagcgcctaccactctgccccctgcgccgcctgcggcctgcccccaactcccgcaccatcgcgaagtcctcgacgtctaggtcgccattccagtaccttctagaatatcaggatcgccagcgccgccgcatcgggcggccctgtggcccatggacaagctccgcgtccaccgctgcaccggcgacgcggtcgagtggtccccctctcccatcgtcgcgctcgccgcctctccctgcgcctcccaggtcgccgccgcgcgtgaagacggctcgctcgagctctggctcgtctccccgggctccgtcggctggcacaaccagctcactatacaaggcaacgccgcgtcgagggtcacatcactggtgtgggggcggagaggtggagtgaccggccggctgctctcgtccagcattgatggactgttctagatactgttggagttccaatctggcaaatggccatcgaacctttggatgatgctaaaaatactgaaaataatagctcagagtttgctgtcaatggtcatacaaaccaaaatgactccagcgattctgactttagtaacattgatgatggtgacaactctgaggatgaagatggttctaccaacacaagatcttcatatcatgggaatgatttccagcgaatggctcttgcatgtgatgatggttctgtacgattgtttaacgtgcctgattcaggtgcattgacttactatagatttcttcccagagtgagcgggcggtctctcagcgtgacatggagtagtaacgccaaatttgtattttctggcagcagtgatggtttaatcagatgctgggattcaacatctttccatgaaatgtatcgtattactgctggattaggaggggctggtacctcacctgaactttgcatctggacactattgtttctgaggtgtggaactattgttagtggagatagtaccgggagtgtacagttttgggatagccgccatggaacacttctgcaagctcactcctatcataaaggcgacgtgaatgcactaacaactgtgcctggtgagaacagggtattttccgcagggtccgatggccaggtaattttatacaaaatatcaaaagatgaatttggtgctactaaaaatgtggtcaaagagcaagttcacaaatgggtctatgtgggatatgtgagagctcacactcatgatgtaagggcactgaccatggctgtacctatctgtagagaagatacatcacctgaggaaaaggtggtgaagattcgccggcgtgaaaaacatgaatttagttaccacaaatgggctcatcttggtgttccaatgcttatatctggtggtgatgacaccaagctgtttgcatattcagcaagagagtttactcagtttgcacctcataatttctgccctgcacctcaacgccctttgataaagatggctagggatagcacagtcaatggagattctgtaatgcttgtccagtctccaaactggttggatattttacttgtgacagttcagaacaaattgacgactccaagtacatcatcatctagaggagatgctacagtccgacaacttgctcgtttgaaaagcaaggggtccagaaaaatcatttctagtgctgcctctgccaatggaacacttttggcctattcagatggtgtgagaccctgcctctttgcactaaggcataagggtggaaagaagtatacccttgacaaattagagctaccaaaaggattgccctgttctcagagtatggcgtttacggttgattcgtccaatttgatacttgcgggacgtaatggaaaaatatacatcattgacattgcaacaagagaaatttcaaatgtatttcaccctacaagaaaggcagatggagcaaaaatctcaagagaatcacctataacgaagatgttcctaagtgcagatgggcaatggctggctgcagttaactgctatggcgatatttatgtatttaatcttgaggtgcaaaggcaacactggttcatatcccgaatgaacggtggttctgttacatctggtggattttgccccaaaaacaacacacttgtgataactacatctaaaaatgaggtgtatgtatttgatgtggaagcaaaacaattaggcgaatggtccaagcgatatacacaccagttgcccagaagtttccaggaattccctggagaggtcattggcttatcatttcctccgcaaagctcatcgtcagttgttgtatacagtaccagggctatgtgcaacatcgatttcggattgccagttgttgaggatgttggcttgccaaatggatcaggtgcaccagcagagaaggcagacgcaaaaaagagtaaaaaaacaaggcagaagcgtaaggcccgtgatgaagagtctacagaggagaaaaggaacaacttcaacttctttgcgtttaaagaaccagtgctctttgttgggcatctacaggacagttcaattttaatggtagagaagcgatggatggatgttgttgaaggtttcagcgcaccagttgacagacatatatatggcacatgattcttgctaacatcggcctttggcgctcgtgacaagcaaaccattgtttttgtttttttttctcaagtaatgcaaaacatccgtcctcaagcatgtcaacggttgaaaggggctacaagatattgcagcacaaagtgaaagctgcacgtagactttagagtcggggattgtggcaatggtgtattttcttttgttctctagtaatgtagtggactccctgcgccagtttgtcataccttgtcgctgcgcaaaattttgtcacatgtaaacactgtatcatcacttctgttattgttgagctgatatcttctgtttgcctcaggaaaaaaataatagtaggaaaaaaacagtaaaacta

SEQ ID NO: 52471 - DNA, 1967 bp, Zea Mays
ctcaggtcacgtagcccgcacgcacgctgccgtcgaccgctagttgaccttcccttccctcagaaccctaacgagcgactgttctagatactgttggagttccaatctggcaaatggccatcgaacctttggatgatgctaaaaatactgaaaataatagctcagagtttgctgtcaatggtcatacaaaccaaaatgactccagcgattctgactttagtaacattgatgatggtgacaactctgaggatgaagatggttctaccaacacaagatcttcatatcatgggaatgatttccagcgaatggctcttgcatgtgatgatggttctgtacgattgtttaacgtgcctgattcaggtgcattgacttactatagatttcttcccagagtgagcgggcggtctctcagcgtgacatggagtagtaacgccaaatttgtattttctggcagcagtgatggtttaatcagatgctgggattcaacatctttccatgaaatgtatcgtattactgctggattaggaggggctggtacctcacctgaactttgcatctggacactattgtttctgaggtgtggaactattgttagtggagatagtaccgggagtgtacagttttgggatagccgccatggaacacttctgcaagctcactcctatcataaaggcgacgtgaatgcactaacaactgtgcctggtgagaacagggtattttccgcagggtccgatggccaggtaattttatacaaaatatcaaaagatgaatttggtgctactaaaaatgtggtcaaagagcaagttcacaaatgggtctatgtgggatatgtgagagctcacactcatgatgtaagggcactgaccatggctgtacctatctgtagagaagatacatcacctgaggaaaaggtggtgaagattcgccggcgtgaaaaacatgaatttagttaccacaaatgggctcatcttggtgttccaatgcttatatctggtggtgatgacaccaagctgtttgcatattcagcaagagagtttactcagtttgcacctcataatttctgccctgcacctcaacgccctttgataaagatggctagggatagcacagtcaatggagattctgtaatgcttgtccagtctccaaactggttggatattttacttgtgacagttcagaacaaattgacgactccaagtacatcatcatctagaggagatgctacagtccgacaacttgctcgtttgaaaagcaaggggtccagaaaaatcatttctagtgctgcctctgccaatggaacacttttggcctattcagatggtgtgagaccctgcctctttgcactaaggcataagggtggaaagaagtatacccttgacaaattagagctaccaaaaggattgccctgttctcagagtatggcgtttacggttgattcgtccaatttgatacttgcgggacgtaatggaaaaatatacatcattgacattgcaacaagagaaatttcaaatgtatttcaccctacaagaaaggcagatggagcaaaaatctcaagagaatcacctataacgaagatgttcctaagtgcagatgggcaatggctggctgcagttaactgctatggcgatatttatgtatttaatcttgaggtgcaaaggcaacactggttcatatcccgaatgaacggtggttctgttacatctggtggattttgccccaaaaacaacacacttgtgataactacatctaaaaatgaggtgtatgtatttgatgtggaagcaaaacaattaggcgaatggtccaagcgatatacacaccagttgcccagaagtttccaggaattccctggagaggtcattggcttatcatttcctccgcaaagctcatcgtcagttgttgtatacagtaccagatcattttttttttgcacagagggaccaccctgaatcaaattacttagcaatgat

SEQ ID NO: 52472 - DNA, 1540 bp, Zea Mays
gagaagtataaattctttgttccttaagttttattagtgttttaaacccaaatatgaaaatttggaactatgtttcatctttggtcctggactaagctcactcatatgatttgcttttctcattggcaagttgaggattatttttgttctagctattagggaagattatttggaaagatggaagcaactagattagggaacttctgtgagtaagaagttgagatgacttgcctggattggtcagagtcatagtcataactttcaaaatgttactagagatctaatcatgaaacaacataaatattttgtcttcacggttacaaggtgattttgccagtcttccatttgaacgtgtttttgaaatctatttggtctatttttcttcaaaaaaaaatctatttggtctatctcaattccttatctgcttattagtgagaatgcctataaatgcaatcatgagccctagtgatgtcgtttgtagtgaaaagcttcactgggatgtatgtcctaagataaaccaagaccaaagtaagcatgatgcgaccatactgaaggttttcagggttcaggctgttcttttggtacttggagggtacgaggttccgcctggtttggtaaacatggctgtttcttcagcaaatgatgagaagaatacaactgtggctgctagaagggttgcttccttaatgagattccgtgagaagagaaaggaaagatgtttcgataaaaggattagatacagtgtgcgcaaggaggttgcccaaaagatgaaacggcgtaaaggccaatttgctgggagatcagattttggcgatggtgcctgttcttctgcagcttgtggctctccagctaacggcgaggatgatcattttcgagaaacccattgccaaaattgtggtatcagctcaaggcttactccagcgatgcgtcggggcccagctggtccgaggtccctctgcaatgcttgtggcttaatgtgggcaaataagggtactctacgaagtcctctaaatgcacccaaaatgactcagcagcttcttgccaatccatgtaacatggtagatactgatgacaaaaactcaaatgttcttcctgtggagcataatcaagccacacccaaaactgactcgatgatgccaaaagaggagcagaagctggacatacgcttgcccaccgaagaagatacgaaggcagtttcatgacaaatgctcaaacatgtatatagatcgagacaggtttctgagtttaggatgacatataaatcagtaaaactaacaaaggcagcacaaaaaaaattacatgcattgtgttgccacatttatctccgtacccgattcatattgtattgctaactgatgcagttcttactccttaccctgtgtcaacctgaccaggtgacttggcaggaactcaaaatgttttcaagaatacgacgcattcttgagaaacgttttgtttattgttgtaaaaaccacttcaatagtaatttgcatcaactttgatgcaatttattttatagaaaaacatgtgatattttggt

SEQ ID NO: 52473 - DNA, 1304 bp, Zea Mays
cagagtgggaccagcaagccgcgccagtgtacatgtcttcaccgtcacacgtgcgctcctctcgtccatcctccacacgtgcgctcaaaccgagcttgtccacggaccgcaccctgtctgcacgcatctccaccgtccgatccccagccgatggcggcggagcccgcggcggccgaccacgatctccggccacccctggcggatggcgccgctgctgccggcgtgggcgccgcctccttggcggcggcggcgggcgcggcagaggcgctgatgagcgcgacgtcggagcagctcacgctggtgtatcagggcgacgtctacgtcttcgaccccgtcccgccccaaaaggttcaggctgttcttttggtacttggagggtacgaggttccgcctggtttggtaaacatggctgtttcttcagcaaatgatgagaagaatacaactgtggctgctagaagggttgcttccttaatgagattccgtgagaagagaaaggaaagatgtttcgataaaaggattagatacagtgtgcgcaaggaggttgcccaaaagatgaaacggcgtaaaggccaatttgctgggagatcagattttggcgatggtgcctgttcttctgcagcttgtggctctccagctaacggcgaggatgatcattttcgagaaacccactcaaggcttactccagcgatgcgtcggggcccagctggtccgaggtccctctgcaatgcttgtggcttaatgtgggcaaataagggtactctacgaagtcctctaaatgcacccaaaatgactcagcagcttcttgccaatccatgtaacatggtagatactgatgacaaaaactcaaatgttcttcctgtggagcataatcaagccacacccaaaactgactcgatgatgccaaaagaggagcagaagctggacatacgcttgcccaccgaagaagatacgaaggcagtttcatgacaaatgctcaaacatgtatatagatcgagacaggtttctgagtttaggatgacatataaatcagtaaaactaacaaaggcagcacaaaaaaaattacatgcattgtgttgccacatttatctccgtacccgattcatattgtattgctaactgatgcagttcttactccttaccctgtgtcaacctgaccaggtgacttggcaggaactcaaaatgttttcaagaatacgacgcattcttgagaaacgttttgtttattgttgtaaaaaccacttcaatagtaatttgcatcaactttgatgcaatttattttatagaaaaacatgtgatattttggt

SEQ ID NO: 52474 - DNA, 1368 bp, Zea Mays
cagagtgggaccagcaagccgcgccagtgtacatgtcttcaccgtcacacgtgcgctcctctcgtccatcctccacacgtgcgctcaaaccgagcttgtccacggaccgcaccctgtctgcacgcatctccaccgtccgatccccagccgatggcggcggagcccgcggcggccgaccacgatctccggccacccctggcggatggcgccgctgctgccggcgtgggcgccgcctccttggcggcggcggcgggcgcggcagaggcgctgatgagcgcgacgtcggagcagctcacgctggtgtatcagggcgacgtctacgtcttcgaccccgtcccgccccaaaaggttcaggctgttcttttggtacttggagggtacgaggttccgcctggtttggtaaacatggctgtttcttcagcaaatgatgagaagaatacaactgtggctgctagaagggttgcttccttaatgagattccgtgagaagagaaaggaaagatgtttcgataaaaggattagatacagtgtgcgcaaggaggttgcccaaaagatgaaacggcgtaaaggccaatttgctgggagatcagattttggcgatggtgcctgttcttctgcagcttgtggctctccagctaacggcgaggatgatcattttcgagaaacccagtgagttagttgccatgtgccaactatcactttgtgattgtgtttgccaaaattgtggtatcagctcaaggcttactccagcgatgcgtcggggcccagctggtccgaggtccctctgcaatgcttgtggcttaatgtgggcaaataagggtactctacgaagtcctctaaatgcacccaaaatgactcagcagcttcttgccaatccatgtaacatggtagatactgatgacaaaaactcaaatgttcttcctgtggagcataatcaagccacacccaaaactgactcgatgatgccaaaagaggagcagaagctggacatacgcttgcccaccgaagaagatacgaaggcagtttcatgacaaatgctcaaacatgtatatagatcgagacaggtttctgagtttaggatgacatataaatcagtaaaactaacaaaggcagcacaaaaaaaattacatgcattgtgttgccacatttatctccgtacccgattcatattgtattgctaactgatgcagttcttactccttaccctgtgtcaacctgaccaggtgacttggcaggaactcaaaatgttttcaagaatacgacgcattcttgagaaacgttttgtttattgttgtaaaaaccacttcaatagtaatttgcatcaactttgatgcaatttattttatagaaaaacatgtgatattttggt

SEQ ID NO: 52475 - DNA, 1362 bp, Zea Mays
cagagtgggaccagcaagccgcgccagtgtacatgtcttcaccgtcacacgtgcgctcctctcgtccatcctccacacgtgcgctcaaaccgagcttgtccacggaccgcaccctgtctgcacgcatctccaccgtccgatccccagccgatggcggcggagcccgcggcggccgaccacgatctccggccacccctggcggatggcgccgctgctgccggcgtgggcgccgcctccttggcggcggcggcgggcgcggcagaggcgctgatgagcgcgacgtcggagcagctcacgctggtgtatcagggcgacgtctacgtcttcgaccccgtcccgccccaaaaggctgttcttttggtacttggagggtacgaggttccgcctggtttggtaaacatggctgtttcttcagcaaatgatgagaagaatacaactgtggctgctagaagggttgcttccttaatgagattccgtgagaagagaaaggaaagatgtttcgataaaaggattagatacagtgtgcgcaaggaggttgcccaaaagatgaaacggcgtaaaggccaatttgctgggagatcagattttggcgatggtgcctgttcttctgcagcttgtggctctccagctaacggcgaggatgatcattttcgagaaacccagtgagttagttgccatgtgccaactatcactttgtgattgtgtttgccaaaattgtggtatcagctcaaggcttactccagcgatgcgtcggggcccagctggtccgaggtccctctgcaatgcttgtggcttaatgtgggcaaataagggtactctacgaagtcctctaaatgcacccaaaatgactcagcagcttcttgccaatccatgtaacatggtagatactgatgacaaaaactcaaatgttcttcctgtggagcataatcaagccacacccaaaactgactcgatgatgccaaaagaggagcagaagctggacatacgcttgcccaccgaagaagatacgaaggcagtttcatgacaaatgctcaaacatgtatatagatcgagacaggtttctgagtttaggatgacatataaatcagtaaaactaacaaaggcagcacaaaaaaaattacatgcattgtgttgccacatttatctccgtacccgattcatattgtattgctaactgatgcagttcttactccttaccctgtgtcaacctgaccaggtgacttggcaggaactcaaaatgttttcaagaatacgacgcattcttgagaaacgttttgtttattgttgtaaaaaccacttcaatagtaatttgcatcaactttgatgcaatttattttatagaaaaacatgtgatattttggt

SEQ ID NO: 52476 - DNA, 1428 bp, Zea Mays
aaatcattacacaattagactttttagttgaagataagacggtatcataaaactggctgtgggctgtacaaccttgctttaatggagatgcgttgaaggcggaaagctgcagagtgggaccagcaagccgcgccagtgtacatgtcttcaccgtcacacgtgcgctcctctcgtccatcctccacacgtgcgctcaaaccgagcttgtccacggaccgcaccctgtctgcacgcatctccaccgtccgatccccagccgatggcggcggagcccgcggcggccgaccacgatctccggccacccctggcggatggcgccgctgctgccggcgtgggcgccgcctccttggcggcggcggcgggcgcggcagaggcgctgatgagcgcgacgtcggagcagctcacgctggtgtatcagggcgacgtctacgtcttcgaccccgtcccgccccaaaaggctgttcttttggtacttggagggtacgaggttccgcctggtttggtaaacatggctgtttcttcagcaaatgatgagaagaatacaactgtggctgctagaagggttgcttccttaatgagattccgtgagaagagaaaggaaagatgtttcgataaaaggattagatacagtgtgcgcaaggaggttgcccaaaagatgaaacggcgtaaaggccaatttgctgggagatcagattttggcgatggtgcctgttcttctgcagcttgtggctctccagctaacggcgaggatgatcattttcgagaaacccattgccaaaattgtggtatcagctcaaggcttactccagcgatgcgtcggggcccagctggtccgaggtccctctgcaatgcttgtggcttaatgtgggcaaataagggtactctacgaagtcctctaaatgcacccaaaatgactcagcagcttcttgccaatccatgtaacatggtagatactgatgacaaaaactcaaatgttcttcctgtggagcataatcaagccacacccaaaactgactcgatgatgccaaaagaggagcagaagctggacatacgcttgcccaccgaagaagatacgaaggcagtttcatgacaaatgctcaaacatgtatatagatcgagacaggtttctgagtttaggatgacatataaatcagtaaaactaacaaaggcagcacaaaaaaaattacatgcattgtgttgccacatttatctccgtacccgattcatattgtattgctaactgatgcagttcttactccttaccctgtgtcaacctgaccaggtgacttggcaggaactcaaaatgttttcaagaatacgacgcattcttgagaaacgttttgtttattgttgtaaaaaccacttcaatagtaatttgcatcaactttgatgcaatttattttatagaaaaacatgtgatattttggt

SEQ ID NO: 52477 - DNA, 636 bp, Zea Mays
agtgacaaactgaaactgaccatgaagccatgaaacaggctccgctccggcctgtagccgtgaccccccacgaaaaccctaatggcgtcccgcctccttcacctccgccgcctcattactcctccctccaccgtccccgccgcttccttctccaccgccgtcagcgcgaccccgcgcgtctccgcgctcgtcgacgagatctgcgggctcaccctcctcgaggcctcttccctggccgatgccctgcgcggccgcctcggcgtcgaccagttgccgccactagctatcctcacgggcggcggcgcaccgctcgtcggcggcggagtaggtcccggcgcggccggcgaggaggcgaaggccaaggaggagaagatggcgttcgacgtgaagctggaggggttcgacgccgcggcgaagctcaagatcatcaaggagctgagggcgttcacgaatctgggtctgaaggaggccaaggatctcgtggagaaggcgcccgccgtgctgaaggctggagttcccaaagaggaggcggagagtatcgccgagaagatgcgggcgctcggcgccaagattgttctcgagtgaacgacgagagctgtaatttgatatgaattttttgcagagtcaatgttctag

SEQ ID NO: 52478 - DNA, 1080 bp, Zea Mays
ctcaataacctagttcgatatggatggagactagcagtaacattttactcaacacattctgaattgtgttagcttcgatgatgcacgaaagggaggggaggagatgaacgaccaacatggttatttcagcacgtgtttggttgcgaaacagatcagaggaatgagatgagcccttgtttaaaagatgaaaagcaataggctccgctccggcctgtagccgtgaccccccacgaaaaccctaatggcgtcccgcctccttcacctccgccgcctcattactcctccctccaccgtccccgccgcttccttctccaccgccgtcagcgcgaccccgcgcgtctccgcgctcgtcgacgagatctgcgggctcaccctcctcgaggcctcttccctggccgatgccctgcgcggccgcctcggcgtcgaccagttgccgccactagctatcctcacgggcggcggcgcaccgctcgtcggcggcggagtaggtcccggcgcggccggcgaggaggcgaaggccaaggaggagaagatggcgttcgacgtgaagctggaggggttcgacgccgcggcgaagctcaagatcatcaaggagctgagggcgttcacgaatctgggtctgaaggaggccaaggatctcgtggagaaggcgcccgccgtgctgaaggctggagttcccaaagaggaggcggagagtatcgccgagaagatgcgggcgctcggcgccaagattgttctcgagtgaacgacgagagctgtgtatgccctcgtttcttgatttgtttcgtgtttcttgtatgaaaaaaagagagaattttggaacaaggagataataattagtaaatttgactagagatcttttcactgcgagtgcaaacaccaattgagcttcggtgaatacgaacttagacttagtgatcaactttcgagttctatatcaatgctttttatgagatgtatgacatatagcgaactctagcatcagagtaccatcttctgctgattctgtttaccatcttttgctgattctgtttttaaggagaggattgcaattaggtggctttcacttgtcgttttgtg

SEQ ID NO: 52479 - DNA, 2315 bp, Zea Mays
tttgcaaaaactgttaatccaggatccaaagagattttcaacattattgggaatagagttaaagttcagagctgtttgaatgattctccatataaaccgagcaacagaacattggaagaaaagatgatctatggactctggtatcacagtcaaagcttgctttcttagcatcagcggaagcgcctcctctttttagtgttctgccagaatccagcattgaacaaagtgggcttctgattattgggcctgaaggagacttcacagcagaggaggtacattcactgaaatcagcaggtgcggcccctgttggtcttggtccatgcaggctacgggttgagacagccacgatatccctcctatctgctctcatgctctggtcagatgctaaacaccggtaaagacagcaatgcagaagaaaaaaagacacaagaaacgtggagtcggaaggattcagcaacgaaccggacaaaggatacgccagcaaccagggtgcctccgccacgtgtccgcgcgcccgtccgacgtggcgcagcggccgtaaccagaaaccgatcgttgccgcgtccccagcgagcgtgccgccattgcgccgccacgccggcgacccgcggcgtcgcatcgcatgtgaacacggggcgcgtttctcgtgcctgtcaagtaagatcggtggcgatgaagtgcgtctccggcgcgtacttcgagccggacttcgacccgctcctcgaccgcctcggcacccccggggtcgtcgtcgataacgagacgcgcgaggactgcacgctcgtcaaggtcgacagcgtgaaccgggacggcgtgctgctggacatggtgcagctgctcaccgacctcgacctcgtcatctccaagtcgtacatctgctccgacggcggctggctcatggatgtgttccatgtgacggaccggacagggcgcaagctgacggacccgtcgctccccgagttcatccagcgcgcgctcgtgcggttccaccggaccgtcaactgcgcgtcgcccaggttcaccacgtgcctcggcaacgtggtggggccggccggccccgacgtgtcgggctgcgccgcgctcgagttcacggtgaacgaccgcccgggcctgctgtcgtccatcacgtccgtgctggccgacagcggctgccacgtcgcgtcggggcaggcgtggacgcacaacggccgcgcggccggggtgctgtacgtcacgccgccgctcccgagccggtgggcgcgcgtcgagcggctggtggaggccgtggtgggcgcgcgcgagaacgtggccggcgagcgacactggacgcgcgtgtcggggcccgcgcggggccgcgtccacacggagcgccgcctgcaccagctcatgcgcgacgaccgggactacgagtccggcccggcgccgacccccgtcgacgaggggctcttcggcgtgggcgacaaggccgcgaccaccgcgcggacggcccgccgcgcccgcgccgcgacgcgggtgtccgtcgacagctgggaggagcggggctacgtcgtcgtcaagatgacgagcagggaccgacccagtctgctcttcgacacggtgtgcgcgctcaccgacatgcagtacgtcgtcttccacgctaccgtcgggtcccagggggttctcgccattcaggaatattacatccggcacaaggacgggggcacggtcgacagcagcgccgagcggcagaaggtctcccggtgcctcgtggccgcggtggagcggagggccactcatggcgtgagagtggaggtgcacgccgccgaccgctcggggctgctatcggacttcaccagagtgctgcgggagcacggcctgtcgctgctgagagttgagctcaagaggcacagggacgaggccttcggcgtattttacctcgacacggacaccggcggcgaggtgcgcactgaggcattgcgcgccgtgcagatgagggtcgccgagatgggcatctcgctcgacgttgtaaaggagaccaaggcccctggctggccgcctgtgaggaagaccagcgtgccagccccacccgtcgccgggcagcagcctcaggagaagcccagaccttctcttgggagcctcctatggtcaaaccttgaaaagctctcaaataacttcaactacatcaggtctccagcatagacgcttccattggtgcgtcggttccagtcattttccggatctcgggtactaacaattaaaatgtcatgaaaccgtacaaatttgtatatatagtatagcatgttggcatgttgcattgcacatgaaattctttagatatttgaagatcactctgcttt

SEQ ID NO: 52480 - DNA, 3445 bp, Zea Mays
atcaatggtgggctgcaaaacaatttccgcaagcaggttcgcaaattgcttccatcttcttagcaactggactggacgggccggcgggctacgtacggcccaaaagcaaagctccctctctgctactccgaccgacatcctcagaaagaccagttagactagaccaccgccgctccacgcttccaccctctgctgcgggacgagctcgagaggttcgccggcgctcctgctcggccgacggccgtcgccgcgcgataataggccaggagacgcggagagatgctgtcgtccgccgccttctcctcctcaccgctgctgcgcggagccccgctgcggacccggcacctgctcctggcccctcccgcgcgcgcgcacggcggcgcggcgagccgcgcccgcggtggccttccgaggttccacgccccgtctctcccttcgtccaaggtaggcgtgtttgttacagccccgcgccagcagccgtcggccgcctaggcatttcgtcgagcgcccctgtgtgtgctccttcctgttgagcgcgcggtggtcttcgtttgcactatcctggtagatcgtgtgtttcgtacagaaatatcatccaccttgtttgtgcactgaattgtcgaggggtggatttggatgtggttgcatgaaacgtcgtatacttcccctttgcatcattgtgtttttttattattatttgagacaaccgttgcctcttgcctcattgtcgtggcattttgttgagctgtggtgccgtgcattaggttattcatttcatcatgtgtagttccgtggaaacatatcgcctgtgactgagatggatgttacattgcagggtgaggtgattcgcatccaaggagacgagttctggcacatgacgcgggttttgcgccttggcgttaacgacaaggttgaactattcaatggggtgggcagtttagctgaaggattcatacataaagttgacaaaggtggctcaggtgttgagttattagaggatgctaggatcatagctcctcaaggcatccaatggcatgtctttgctgcgtttgggacactgaaaggcggacgtgcggattggcttatagagaaatgtactgaacttggagcttctagtgttacccctctcctgacagaacgatgtcacacaatagcggaaaatcgggtggataggttgcaacgccttgtgctggctgcagttaaacaatgccagaggatacatgaaatgtcgctgaaatccccaattcagataaggcaccttctacctgttgtatcacagtcaaagcttgctttcttagcatcagcggaagcgcctcctctttttagtgttctgccagaatccagcattgaacaaagtgggcttctgattattgggcctgaaggagacttcacagcagaggaggtacattcactgaaatcagcaggtgcggcccctgttggtcttggtccatgcaggctacgggttgagacagccacgatatccctcctatctgctctcatgctctggtcagatgctaaacaccggtaaagacagcaatgcagaagaaaaaaagacacaagaaacgtggagtcggaaggattcagcaacgaaccggacaaaggatacgccagcaaccagggtgcctccgccacgtgtccgcgcgcccgtccgacgtggcgcagcggccgtaaccagaaaccgatcgttgccgcgtccccagcgagcgtgccgccattgcgccgccacgccggcgacccgcggcgtcgcatcgcatgtgaacacggggcgcgtttctcgtgcctgtcaagtaagatcggtggcgatgaagtgcgtctccggcgcgtacttcgagccggacttcgacccgctcctcgaccgcctcggcacccccggggtcgtcgtcgataacgagacgcgcgaggactgcacgctcgtcaaggtcgacagcgtgaaccgggacggcgtgctgctggacatggtgcagctgctcaccgacctcgacctcgtcatctccaagtcgtacatctgctccgacggcggctggctcatggatgtgttccatgtgacggaccggacagggcgcaagctgacggacccgtcgctccccgagttcatccagcgcgcgctcgtgcggttccaccggaccgtcaactgcgcgtcgcccaggttcaccacgtgcctcggcaacgtggtggggccggccggccccgacgtgtcgggctgcgccgcgctcgagttcacggtgaacgaccgcccgggcctgctgtcgtccatcacgtccgtgctggccgacagcggctgccacgtcgcgtcggggcaggcgtggacgcacaacggccgcgcggccggggtgctgtacgtcacgccgccgctcccgagccggtgggcgcgcgtcgagcggctggtggaggccgtggtgggcgcgcgcgagaacgtggccggcgagcgacactggacgcgcgtgtcggggcccgcgcggggccgcgtccacacggagcgccgcctgcaccagctcatgcgcgacgaccgggactacgagtccggcccggcgccgacccccgtcgacgaggggctcttcggcgtgggcgacaaggccgcgaccaccgcgcggacggcccgccgcgcccgcgccgcgacgcgggtgtccgtcgacagctgggaggagcggggctacgtcgtcgtcaagatgacgagcagggaccgacccagtctgctcttcgacacggtgtgcgcgctcaccgacatgcagtacgtcgtcttccacgctaccgtcgggtcccagggggttctcgccattcaggaatattacatccggcacaaggacgggggcacggtcgacagcagcgccgagcggcagaaggtctcccggtgcctcgtggccgcggtggagcggagggccactcatggcgtgagagtggaggtgcacgccgccgaccgctcggggctgctatcggacttcaccagagtgctgcgggagcacggcctgtcgctgctgagagttgagctcaagaggcacagggacgaggccttcggcgtattttacctcgacacggacaccggcggcgaggtgcgcactgaggcattgcgcgccgtgcagatgagggtcgccgagatgggcatctcgctcgacgttgtaaaggagaccaaggcccctggctggccgcctgtgaggaagaccagcgtgccagccccacccgtcgccgggcagcagcctcaggagaagcccagaccttctcttgggagcctcctatggtcaaaccttgaaaagctctcaaataacttcaactacatcaggtctccagcatagacgcttccattggtgcgtcggttccagtcattttccggatctcgggtactaacaattaaaatgtcatgaaaccgtacaaatttgtatatatagtatagcatgttggcatgttgcattgcacatgaaattctttagatatttgaagatcactctgcttt

SEQ ID NO: 52481 - DNA, 1892 bp, Zea Mays
atcaatggtgggctgcaaaacaatttccgcaagcaggttcgcaaattgcttccatcttcttagcaactggactggacgggccggcgggctacgtacggcccaaaagcaaagctccctctctgctactccgaccgacatcctcagaaagaccagttagactagaccaccgccgctccacgcttccaccctctgctgcgggacgagctcgagaggttcgccggcgctcctgctcggccgacggccgtcgccgcgcgataataggccaggagacgcggagagatgctgtcgtccgccgccttctcctcctcaccgctgctgcgcggagccccgctgcggacccggcacctgctcctggcccctcccgcgcgcgcgcacggcggcgcggcgagccgcgcccgcggtggccttccgaggttccacgccccgtctctcccttcgtccaaggtaggcgtgtttgttacagccccgcgccagcagccgtcggccgcctaggcatttcgtcgagcgcccctgtgtgtgctccttcctgttgagcgcgcggtggtcttcgtttgcactatcctggtagatcgtgtgtttcgtacagaaatatcatccaccttgtttgtgcactgaattgtcgaggggtggatttggatgtggttgcatgaaacgtcgtatacttcccctttgcatcattgtgtttttttattattatttgagacaaccgttgcctcttgcctcattgtcgtggcattttgttgagctgtggtgccgtgcattaggttattcatttcatcatgtgtagttccgtggaaacatatcgcctgtgactgagatggatgttacattgcagggtgaggtgattcgcatccaaggagacgagttctggcacatgacgcgggttttgcgccttggcgttaacgacaaggttgaactattcaatggggtgggcagtttagctgaaggattcatacataaagttgacaaaggtggctcaggtgttgagttattagaggatgctaggatcatagctcctcaaggcatccaatggcatgtctttgctgcgtttgggacactgaaaggcggacgtgcggattggcttatagagaaatgaacttggagcttctagtgttacccctctcctgacagaacgatgtcacacaatagcggaaaatcgggtggataggttgcaacgccttgtgctggctgcagttaaacaatgccagaggatacatgaaatgtcgctgaaatccccaattcagataaggcaccttctacctgttgtatcacagtcaaagcttgctttcttagcatcagcggaagcgcctcctctttttagtgttctgccagaatccagcattgaacaaagtgggcttctgattattgggcctgaaggaggttgcactagaggttaaaaatgttttatataacggaaagcaaatctcaacatttttaaactaaacagttataaagtaaggatttacaaatgtagatttagacaatcaggcaggagaagctagccgagtgctaagcatcatatggggttacattagattttgcttatgttaaactttatagtaccgctgattaagggagtatttttaacttcaaaagaaagaacctcgtctccaaagaaaatcatgcatgatgtcttattgttatgttagtggatccaatatgaccatccatatttctcagacttcacagcagaggaggtacattcactgaaatcagcaggtgcggcccctgttggtcttggtccatgcaggctacgggttgagacagccacgatatccctcctatctgctctcatgctctggtcagatgctaaacaccggtaaagacagcaatgcagaagaaaaaaagacacaagaaacgtggagtcggaaggattcagcaacgaaccggac

SEQ ID NO: 52482 - DNA, 1507 bp, Zea Mays
atcaatggtgggctgcaaaacaatttccgcaagcaggttcgcaaattgcttccatcttcttagcaactggactggacgggccggcgggctacgtacggcccaaaagcaaagctccctctctgctactccgaccgacatcctcagaaagaccagttagactagaccaccgccgctccacgcttccaccctctgctgcgggacgagctcgagaggttcgccggcgctcctgctcggccgacggccgtcgccgcgcgataataggccaggagacgcggagagatgctgtcgtccgccgccttctcctcctcaccgctgctgcgcggagccccgctgcggacccggcacctgctcctggcccctcccgcgcgcgcgcacggcggcgcggcgagccgcgcccgcggtggccttccgaggttccacgccccgtctctcccttcgtccaagggtgaggtgattcgcatccaaggagacgagttctggcacatgacgcgggttttgcgccttggcgttaacgacaaggttgaactattcaatggggtgggcagtttagctgaaggattcatacataaagttgacaaaggtggctcaggtgttgagttattagaggatgctaggatcatagctcctcaaggcatccaatggcatgtctttgctgcgtttgggacactgaaaggcggacgtgcggattggcttatagagaaatgaacttggagcttctagtgttacccctctcctgacagaacgatgtcacacaatagcggaaaatcgggtggataggttgcaacgccttgtgctggctgcagttaaacaatgccagaggatacatgaaatgtcgctgaaatccccaattcagataaggcaccttctacctgttgtatcacagtcaaagcttgctttcttagcatcagcggaagcgcctcctctttttagtgttctgccagaatccagcattgaacaaagtgggcttctgattattgggcctgaaggagacttcacagcagaggaggtacattcactgaaatcagcaggtgcggcccctgttggtcttggtccatgcaggctacgggttgagacagccacgatatccctcctatctgctctcatgctctggtcagatgctaaacaccggtaaagacagcaatgcaggtaatctaaggacagttctctcagtcatctttatggtatactagtcctctttcaggtgattagtaccatgaaataccattcaggatctagttggattcagtaaccaaaaccatgggtaattattccattggatctcagaacgcatttcagtaagagcttggtcttgggcttgaccagcatggacgatgagcatctcaatacacgatgttttgtttgagttatgttatcttagggctagtttggaaacctcaatttctcaaaggatttctattttctcatgggaaaatgaattaattttacttaggaaaatagaaattcctttggaaattgtggttcccaaactagcccttatggggcgttt

SEQ ID NO: 52483 - DNA, 1705 bp, Zea Mays
caacctgtcactggcgaactctggtggtgactggtttcttgacactggggcatcatcacacatggcctccggctctggattgatgagctcggcgagggtgagaggccccttcacgccgccgcagtggatcgagctggagcaccaggccctgatctacaagtacctgtccgcgaacagccccgtacctcacagcctcctcgtccccatcaggaggagcgggagcctcgcatcgtctccctacccgcctccctacttcggcacgagcacattcgggtggggctccttccagctgggctactccggcaatgcggatctggagcctgggcggtgccgccggacggacggcaagaagtggcggtgctccagggacgcggtcgccgaccagaagtactgcgagcgacacatgaaccggggacgccatcgttcaagaaagcatgtggaagaccagcctggccatgccgcgaaagccatgtccgcggtggccgtggcggctgctgctgctgctgctacccagcatgctgctgctctggccggcgccggagctactgctgctgctggcctcgctgtcaatcggcaccggcagccggggaagagctatgccacgggtgcgactgatccatgctctctgcaatatagcagggaactggcgaacaaactgtcgaacgagagcgaaaacatgcaggactctgacaatgtctcgatgctgacttccatgaacacaggaaacactgcaggcagcgtgtttccgttctcgaaacagaacactgctcttttcgaagtgagcagctcaaggccagagtttggccttgttccatcggattcactgacgagttcacctcatagttccttgaagagtgtcaaaaatctgctcagctcacggagtctgagtgagcaccagagctccgcctccctgcaacactttgtggactggcccaggacgccacctgcccagggaggtctttcatggcccgaggcagaggacatgcccagagctcagaggtcccagctctcagtatccgctccaatggcatcctccgagctatcatcggcctccacatctcccatccacgaccacgagaagctgattctgtcacctctcaagctgggccgcgagtataccccatctggcgtcgtcagcgctgcagcgaacagatacgaggttagccagctagaagcgacctgggcgacgatgttccgcgactcttcgacgggcggcccgttgggggaggttctggccaagaacaacagcaacgcggaagcaagaggttgcccgtcggcggcgccacctctaaccgactactactgctgggattcaggccacggcatgcagtcgtcccccgtgggagttctgcagatctcggttcagttgtagtgagacatcccagcatccgcctcttgtgagcccgctgggttctggccatggaaaaagcgtgagggggagcatttaccacgtagtttgtcatttgagactgatctcctgtttctgtcacctgagttcttcttttgttgcccttatacctggctttgtaactctcaccttcgttggatcgtgataggcgccgtgatgtgtggtgtggctgggtttttggtgcgccgttgatgcgtagtaccatcatataaactagtggactggcgcgctccatcgcgcgcgtttgaatttagcaatacaaagttttgaaataacgattagtattaaatacaaagt

SEQ ID NO: 52484 - DNA, 2437 bp, Zea Mays
ccaaaagaaaaaccagactggtttcccgagcgcaggccgcaaccgcaaccactcctcccggccggcacaaaaccaaccgagcaccgcgcgcgcacagacacacactcaccagcaggcagcagctagctagctctctagcaacgagcacaaaacgagcaatgccgctagttccgtcccactccctcgcttcccatcccgcaccccatggaagggagcagcactagctagcgtgggacagggcggggtggtgtcgtggtgatggaagcgggcggcggcgcctcggaactcggcctgctcggcgccggatctggcaggctgctcaagcacgggcggggcgacgcggcggggggagaggaccacgggtgggtcgtcgtcgtcggcggcggcggcagggccaagcaggccaggaccgcgtccgtcggcaccggggacgcggcggccacggcggccgtgccgttcctgctgggctcctgcggcggccccggccacggcggggaacggatgctcagcttctcgtccgccgccgccgccgccccggatgatggcggtgccatgccgccgctgtactacgggaccccggcctcttgctcaggattgatgagctcggcgagggtgagaggccccttcacgccgccgcagtggatcgagctggagcaccaggccctgatctacaagtacctgtccgcgaacagccccgtacctcacagcctcctcgtccccatcaggaggagcgggagcctcgcatcgtctccctacccgcctccctacttcggcacgagcacattcgggtggggctccttccagctgggctactccggcaatgcggatctggagcctgggcggtgccgccggacggacggcaagaagtggcggtgctccagggacgcggtcgccgaccagaagtactgcgagcgacacatgaaccggggacgccatcgttcaagaaagcatgtggaagaccagcctggccatgccgcgaaagccatgtccgcggtggccgtggcggctgctgctgctgctgctacccagcatgctgctgctctggccggcgccggagctactgctgctgctggcctcgctgtcaatcggcaccggcagccggggaagagctatgccacgggtgcgactgatccatgctctctgcaatatagcaggtattctcttctgtagtgggatactgcacttttggatatgatattagtacgatacttgtcggcactgtagttttcacagtagatacttccatctcaaagtcttcggtcaagtgtttccatggatttgcaaacatgaacatgttcaaaaaacgctcaaggttcccgtcgttcttcgatacacatgccacctaatcccactgtcgaacgattcgtgcagggaactggcgaacaaactgtcgaacgagagcgaaaacatgcaggactctgacaatgtctcgatgctgacttccatgaacacaggaaacactgcaggcagcgtgtttccgttctcgaaacagaacactgctcttttcgaagtgagcagctcaaggccagagtttggccttgttccatcggattcactgacgagttcacctcatagttccttgaagagtgtcaaaaatctgctcagctcacggagtctgagtgagcaccagagctccgcctccctgcaacactttgtggactggcccaggacgccacctgcccagggaggtctttcatggcccgaggcagaggacatgcccagagctcagaggtcccagctctcagtatccgctccaatggcatcctccgagctatcatcggcctccacatctcccatccacgaccacgagaagctgattctgtcacctctcaagctgggccgcgagtataccccatctggcgtcgtcagcgctgcagcgaacagatacgaggttagccagctagaagcgacctgggcgacgatgttccgcgactcttcgacgggcggcccgttgggggaggttctggccaagaacaacagcaacgcggaagcaagaggttgcccgtcggcggcgccacctctaaccgactactactgctgggattcaggccacggcatgcagtcgtcccccgtgggagttctgcagatctcggttcagttgtagtgagacatcccagcatccgcctcttgtgagcccgctgggttctggccatggaaaaagcgtgagggggagcatttaccacgtagtttgtcatttgagactgatctcctgtttctgtcacctgagttcttcttttgttgcccttatacctggctttgtaactctcaccttcgttggatcgtgataggcgccgtgatgtgtggtgtggctgggtttttggtgcgccgttgatgcgtagtaccatcatataaactagtggactggcgcgctccatcgcgcgcgtttgaatttagcaatacaaagttttgaaataacgattagtattaaatacaaagt

SEQ ID NO: 52485 - DNA, 1658 bp, Zea Mays
ccaaaagaaaaaccagactggtttcccgagcgcaggccgcaaccgcaaccactcctcccggccggcacaaaaccaaccgagcaccgcgcgcgcacagacacacactcaccagcaggcagcagctagctagctctctagcaacgagcacaaaacgagcaatgccgctagttccgtcccactccctcgcttcccatcccgcaccccatggaagggagcagcactagctagcgtgggacagggcggggtggtgtcgtggtgatggaagcgggcggcggcgcctcggaactcggcctgctcggcgccggatctggcaggctgctcaagcacgggcggggcgacgcggcggggggagaggaccacgggtgggtcgtcgtcgtcggcggcggcggcagggccaagcaggccaggaccgcgtccgtcggcaccggggacgcggcggccacggcggccgtgccgttcctgctgggctcctgcggcggccccggccacggcggggaacggatgctcagcttctcgtccgccgccgccgccgccccggatgatggcggtgccatgccgccgctgtactacgggaccccggcctcttgctcagggaactggcgaacaaactgtcgaacgagagcgaaaacatgcaggactctgacaatgtctcgatgctgacttccatgaacacaggaaacactgcaggcagcgtgtttccgttctcgaaacagaacactgctcttttcgaagtgagcagctcaaggccagagtttggccttgttccatcggattcactgacgagttcacctcatagttccttgaagagtgtcaaaaatctgctcagctcacggagtctgagtgagcaccagagctccgcctccctgcaacactttgtggactggcccaggacgccacctgcccagggaggtctttcatggcccgaggcagaggacatgcccagagctcagaggtcccagctctcagtatccgctccaatggcatcctccgagctatcatcggcctccacatctcccatccacgaccacgagaagctgattctgtcacctctcaagctgggccgcgagtataccccatctggcgtcgtcagcgctgcagcgaacagatacgaggttagccagctagaagcgacctgggcgacgatgttccgcgactcttcgacgggcggcccgttgggggaggttctggccaagaacaacagcaacgcggaagcaagaggttgcccgtcggcggcgccacctctaaccgactactactgctgggattcaggccacggcatgcagtcgtcccccgtgggagttctgcagatctcggttcagttgtagtgagacatcccagcatccgcctcttgtgagcccgctgggttctggccatggaaaaagcgtgagggggagcatttaccacgtagtttgtcatttgagactgatctcctgtttctgtcacctgagttcttcttttgttgcccttatacctggctttgtaactctcaccttcgttggatcgtgataggcgccgtgatgtgtggtgtggctgggtttttggtgcgccgttgatgcgtagtaccatcatataaactagtggactggcgcgctccatcgcgcgcgtttgaatttagcaatacaaagttttgaaataacgattagtattaaatacaaagt

SEQ ID NO: 52486 - DNA, 2328 bp, Zea Mays
ccccgtccgtggtccgtgtctgcctccaaaagaaaaaccagactggtttcccgagcgcaggccgcaaccgcaaccactcctcccggccggcacaaaaccaaccgagcaccgcgcgcgcacagacacacactcaccagcaggcagcagctagctagctctctagcaacgagcacaaaacgagcaatgccgctagttccgtcccactccctcgcttcccatcccgcaccccatggaagggagcagcactagctagcgtgggacagggcggggtggtgtcgtggtgatggaagcgggcggcggcgcctcggaactcggcctgctcggcgccggatctggcaggctgctcaagcacgggcggggcgacgcggcggggggagaggaccacgggtgggtcgtcgtcgtcggcggcggcggcagggccaagcaggccaggaccgcgtccgtcggcaccggggacgcggcggccacggcggccgtgccgttcctgctgggctcctgcggcggccccggccacggcggggaacggatgctcagcttctcgtccgccgccgccgccgccccggatgatggcggtgccatgccgccgctgtactacgggaccccggcctcttgctcaggattgatgagctcggcgagggtgagaggccccttcacgccgccgcagtggatcgagctggagcaccaggccctgatctacaagtacctgtccgcgaacagccccgtacctcacagcctcctcgtccccatcaggaggagcgggagcctcgcatcgtctccctacccgcctccctacttcggcacgagcacatgtaagcgaagaaagagaggaggacgcaaaaagcaaaggcgaccgagagtgctgagtgctattgcctgggcgctagcttcagtatcgggtggggctccttccagctgggctactccggcaatgcggatctggagcctgggcggtgccgccggacggacggcaagaagtggcggtgctccagggacgcggtcgccgaccagaagtactgcgagcgacacatgaaccggggacgccatcgttcaagaaagcatgtggaagaccagcctggccatgccgcgaaagccatgtccgcggtggccgtggcggctgctgctgctgctgctacccagcatgctgctgctctggccggcgccggagctactgctgctgctggcctcgctgtcaatcggcaccggcagccggggaagagctatgccacgggtgcgactgatccatgctctctgcaatatagcagggaactggcgaacaaactgtcgaacgagagcgaaaacatgcaggactctgacaatgtctcgatgctgacttccatgaacacaggaaacactgcaggcagcgtgtttccgttctcgaaacagaacactgctcttttcgaagtgagcagctcaaggccagagtttggccttgttccatcggattcactgacgagttcacctcatagttccttgaagagtgtcaaaaatctgctcagctcacggagtctgagtgagcaccagagctccgcctccctgcaacactttgtggactggcccaggacgccacctgcccagggaggtctttcatggcccgaggcagaggacatgcccagagctcagaggtcccagctctcagtatccgctccaatggcatcctccgagctatcatcggcctccacatctcccatccacgaccacgagaagctgattctgtcacctctcaagctgggccgcgagtataccccatctggcgtcgtcagcgctgcagcgaacagatacgaggttagccagctagaagcgacctgggcgacgatgttccgcgactcttcgacgggcggcccgttgggggaggttctggccaagaacaacagcaacgcggaagcaagaggttgcccgtcggcggcgccacctctaaccgactactactgctgggattcaggccacggcatgcagtcgtcccccgtgggagttctgcagatctcggttcagttgtagtgagacatcccagcatccgcctcttgtgagcccgctgggttctggccatggaaaaagcgtgagggggagcatttaccacgtagtttgtcatttgagactgatctcctgtttctgtcacctgagttcttcttttgttgcccttatacctggctttgtaactctcaccttcgttggatcgtgataggcgccgtgatgtgtggtgtggctgggtttttggtgcgccgttgatgcgtagtaccatcatataaactagtggactggcgcgctccatcgcgcgcgtttgaatttagcaatacaaagttttgaaataacgattagtattaaatacaaagt

SEQ ID NO: 52487 - DNA, 2257 bp, Zea Mays
cctttctctctcccccgtccgtggtccgtgtctgcctccaaaagaaaaaccagactggtttcccgagcgcaggccgcaaccgcaaccactcctcccggccggcacaaaaccaaccgagcaccgcgcgcgcacagacacacactcaccagcaggcagcagctagctagctctctagcaacgagcacaaaacgagcaatgccgctagttccgtcccactccctcgcttcccatcccgcaccccatggaagggagcagcactagctagcgtgggacagggcggggtggtgtcgtggtgatggaagcgggcggcggcgcctcggaactcggcctgctcggcgccggatctggcaggctgctcaagcacgggcggggcgacgcggcggggggagaggaccacgggtgggtcgtcgtcgtcggcggcggcggcagggccaagcaggccaggaccgcgtccgtcggcaccggggacgcggcggccacggcggccgtgccgttcctgctgggctcctgcggcggccccggccacggcggggaacggatgctcagcttctcgtccgccgccgccgccgccccggatgatggcggtgccatgccgccgctgtactacgggaccccggcctcttgctcaggattgatgagctcggcgagggtgagaggccccttcacgccgccgcagtggatcgagctggagcaccaggccctgatctacaagtacctgtccgcgaacagccccgtacctcacagcctcctcgtccccatcaggaggagcgggagcctcgcatcgtctccctacccgcctccctacttcggcacgagcacattcgggtggggctccttccagctgggctactccggcaatgcggatctggagcctgggcggtgccgccggacggacggcaagaagtggcggtgctccagggacgcggtcgccgaccagaagtactgcgagcgacacatgaaccggggacgccatcgttcaagaaagcatgtggaagaccagcctggccatgccgcgaaagccatgtccgcggtggccgtggcggctgctgctgctgctgctacccagcatgctgctgctctggccggcgccggagctactgctgctgctggcctcgctgtcaatcggcaccggcagccggggaagagctatgccacgggtgcgactgatccatgctctctgcaatatagcagggaactggcgaacaaactgtcgaacgagagcgaaaacatgcaggactctgacaatgtctcgatgctgacttccatgaacacaggaaacactgcaggcagcgtgtttccgttctcgaaacagaacactgctcttttcgaagtgagcagctcaaggccagagtttggccttgttccatcggattcactgacgagttcacctcatagttccttgaagagtgtcaaaaatctgctcagctcacggagtctgagtgagcaccagagctccgcctccctgcaacactttgtggactggcccaggacgccacctgcccagggaggtctttcatggcccgaggcagaggacatgcccagagctcagaggtcccagctctcagtatccgctccaatggcatcctccgagctatcatcggcctccacatctcccatccacgaccacgagaagctgattctgtcacctctcaagctgggccgcgagtataccccatctggcgtcgtcagcgctgcagcgaacagatacgaggttagccagctagaagcgacctgggcgacgatgttccgcgactcttcgacgggcggcccgttgggggaggttctggccaagaacaacagcaacgcggaagcaagaggttgcccgtcggcggcgccacctctaaccgactactactgctgggattcaggccacggcatgcagtcgtcccccgtgggagttctgcagatctcggttcagttgtagtgagacatcccagcatccgcctcttgtgagcccgctgggttctggccatggaaaaagcgtgagggggagcatttaccacgtagtttgtcatttgagactgatctcctgtttctgtcacctgagttcttcttttgttgcccttatacctggctttgtaactctcaccttcgttggatcgtgataggcgccgtgatgtgtggtgtggctgggtttttggtgcgccgttgatgcgtagtaccatcatataaactagtggactggcgcgctccatcgcgcgcgtttgaatttagcaatacaaagttttgaaataacgattagtattaaatacaaagt

SEQ ID NO: 52488 - DNA, 2458 bp, Zea Mays
aaccgccgccgcaaagaacggcccacttgactacttgaggttgagggtttcttctcctcgtgcgcactcgcgtttcctcttcatccgctgccacaatctttgcggcgccctcacacaccgccgccgccggctagagcctagggccgtaaccgtaacagccacccctgagactgagatggatacagcggaggaggctgggcaggaagtagtcagcgctgttggggaggatagtatcccggaagctgccgcctgcagcagggaggagaggaaggaggaagaggaggaagaagtggaggtgagcttcgatgaacttggcctggacgagcagctgaagagggcgttgaggaagaagggcatcctcaaggccaccccgatacagcgggaagccatcccgctcatcctggaagggaaggatgtggttgcaaaggccaagactggctctgggaagacctttgcctatcttctcccacttctgcacgagctactgaagttgtcctcagaaggacgtatacgaaaacctgcaccaaatgctttcatcctggttcctactcgagatttatgccaccaggtgtataatgaggcattatctctccttgagctctgtacatgcaaattgagggttgtgcaagttaccgcgagcatgtcggataaggatattactgttgcattgtctggcccccctaacattctcgtatcaactccagcttgtgttgcaacatgcatatcaaagggaattattcgtggacctgcagttaaagagtcactttcaatgatgattcttgatgagttgccaggctgacctacttctatcctaccgctgcgaagttgacttgaaagctctcatcccacatatcccgagaagctgtcagtctattctgatgtctgcaacttcaagctctgatgttgacaagttgacaaaactacttctgcataacccatttgttctaactctttcggaggttggtcaagcaaaggatgatgtgatccccaaaaatgttcagcagttttggatctcctgtgatgccaaggataaaatacttcatatccttgcacttctaaagtttgagctcattcagaagaaagttcttatatttgtaaactcaattgatatggctttcagattacgactgatcttggaaaagtttgggataagatctgcagttttgaatgctgagttgccacaaaattcccgactacatattatagaggcattcaacgcaaggctatttgattatctaatagcaacggatgacactaaaacaaaggagaagcaaaccaatgaggaaaataaaaaagaggcaacattgtcccgcaaacggaagaagcaaaccaataaggaaaaccagaaagagcaaaaggtgtcccgcaaacatttgcaacagactttagatgctgaatttggagttgtcagaggaattgacttcaaaaatgtatttacagtagtcaattttgacatgcctctggatgctactgggtatgttcacagaattgggcgaacaggtagagcaaataagactggtgcatccatatcgcttgtttcaccaaaggaggatagtacttttaaagagattgagcatatgttgcaagatgtcgaaaagaaagatatggactgcatttcacctttcccattacttacgaaagatgctgttgaatctctacggtatagggctcaggatgttgcaaggagtgtgacaacacgtgatgtacaggaagcgcgtcgacaagacataaagaatgaaatcctcaattctgagaaattgaagtctcattttgaagagaatccaacggaccttgatttgctcaaacacgataagttgctatgcaacaaggaaattcctgcatacctgcgtgatgtccctgactacctaattgatccgaaaacaaaagaagccagcaatgctgtcaagctttccagggctgctatgcatatcgacaagccccaaaggcggaaaaggcaggggtttaagggaggatcagggaaaagcagagaccctctcaagacattctctgctgagggcaaacgagggagacggaggaaagaaagggagggagaaccagatagaagaaagaagagtaagaaggcgtgaagttgatttttcaagcagtttgctatcaagctcgcccaattttgtaggctttgtttgaagcaacttgacaaagtgctgtatcggtgacactcgtaggtcgtagctaaggagtatgtttttattgcctgatggcaactcttaatttttaaagtgtactcgcttccccccttttcctgtactgttaggaagcactaatgacgtgaaatttcattcaccaaatcaggggtatttaaagctaataatgttaagtccccccaggtggaacattcacacaaaactcgcccattccccgtggacctgtcccagatgaggccgcgcacaatgttccatttcttcacctatcaattttagatttactaaaaccatattca

SEQ ID NO: 52489 - DNA, 2467 bp, Zea Mays
aaccgccgccgcaaagaacggcccacttgactacttgaggttgagggtttcttctcctcgtgcgcactcgcgtttcctcttcatccgctgccacaatctttgcggcgccctcacacaccgccgccgccggctagagcctagggccgtaaccgtaacagccacccctgagactgagatggatacagcggaggaggctgggcaggaagtagtcagcgctgttggggaggatagtatcccggaagctgccgcctgcagcagggaggagaggaaggaggaagaggaggaagaagtggaggtgagcttcgatgaacttggcctggacgagcagctgaagagggcgttgaggaagaagggcatcctcaaggccaccccgatacagcgggaagccatcccgctcatcctggaagggaaggatgtggttgcaaaggccaagactggctctgggaagacctttgcctatcttctcccacttctgcacgagctactgaagttgtcctcagaaggacgtatacgaaaacctgcaccaaatgctttcatcctggttcctactcgagatttatgccaccaggtgtataatgaggcattatctctccttgagctctgtacatgcaaattgagggttgtgcaagttaccgcgagcatgtcggataaggatattactgttgcattgtctggcccccctaacattctcgtatcaactccagcttgtgttgcaacatgcatatcaaagggaattattcgtggacctgcagttaaagagtcactttcaatgatgattcttgatgaggctgacctacttctatcctaccgctgcgaagttgacttgaaagctctcatcccacatatcccgagaagctgtcagtctattctgatgtctgcaacttcaaggttaaatctggtcaatctctgatgttgacaagttgacaaaactacttctgcataacccatttgttctaactctttcggaggttggtcaagcaaaggatgatgtgatccccaaaaatgttcagcagttttggatctcctgtgatgccaaggataaaatacttcatatccttgcacttctaaagtttgagctcattcagaagaaagttcttatatttgtaaactcaattgatatggctttcagattacgactgatcttggaaaagtttgggataagatctgcagttttgaatgctgagttgccacaaaattcccgactacatattatagaggcattcaacgcaaggctatttgattatctaatagcaacggatgacactaaaacaaaggagaagcaaaccaatgaggaaaataaaaaagaggcaacattgtcccgcaaacggaagaagcaaaccaataaggaaaaccagaaagagcaaaaggtgtcccgcaaacatttgcaacagactttagatgctgaatttggagttgtcagaggaattgacttcaaaaatgtatttacagtagtcaattttgacatgcctctggatgctactgggtatgttcacagaattgggcgaacaggtagagcaaataagactggtgcatccatatcgcttgtttcaccaaaggaggatagtacttttaaagagattgagcatatgttgcaagatgtcgaaaagaaagatatggactgcatttcacctttcccattacttacgaaagatgctgttgaatctctacggtatagggctcaggatgttgcaaggagtgtgacaacacgtgatgtacaggaagcgcgtcgacaagacataaagaatgaaatcctcaattctgagaaattgaagtctcattttgaagagaatccaacggaccttgatttgctcaaacacgataagttgctatgcaacaaggaaattcctgcatacctgcgtgatgtccctgactacctaattgatccgaaaacaaaagaagccagcaatgctgtcaagctttccagggctgctatgcatatcgacaagccccaaaggcggaaaaggcaggggtttaagggaggatcagggaaaagcagagaccctctcaagacattctctgctgagggcaaacgagggagacggaggaaagaaagggagggagaaccagatagaagaaagaagagtaagaaggcgtgaagttgatttttcaagcagtttgctatcaagctcgcccaattttgtaggctttgtttgaagcaacttgacaaagtgctgtatcggtgacactcgtaggtcgtagctaaggagtatgtttttattgcctgatggcaactcttaatttttaaagtgtactcgcttccccccttttcctgtactgttaggaagcactaatgacgtgaaatttcattcaccaaatcaggggtatttaaagctaataatgttaagtccccccaggtggaacattcacacaaaactcgcccattccccgtggacctgtcccagatgaggccgcgcacaatgttccatttcttcacctatcaattttagatttactaaaaccatattca

SEQ ID NO: 52490 - DNA, 1389 bp, Zea Mays
aatggatccaattcggctgaaatcctgcttttcccatgcagtactgcagcggatcccgatcccatggcacacggtcgtttgaggcattgcgagtcccgagtcgactctctcccgtttcccggccgtccccttcaccaatccaatccaactccaattcgtcctccggtcctccccctcgaggcctacgcacaatagattcgatctcgagtcctcgaatcctgccttttcctctggtcaggaaagcatgagcttgatttccggcgcttctcgccgtcgagctcgaaccagaagataagaagaatccgctaggggcgagccccatagaagatggccccgcacccgcaggaggacaaatcagatcggcacagcagcggcgccggtgcgtcgagggagcaggaacggcggccgtccaaggcatggggaatcctcatcttcggcctcatcggcgtcaccaccgccagtttcgctattactcaagttcgcaaaagcatggactggttctacactcagtcaacatcatcttggacttggaggtatacaagtaataactcaagtcgtggaagcttcagtgaggaagctaagaaaagatattatcagcgaatgcagcaggaatatgaagaggaacaagagagagttcaaagaataaggcatatgcagagtgtcttcaacagagagaggaataaatttggacgaggttatgaaagctggagggagaatggccctcctcgtggctacaattacatccctcgggatgattggtattggcagaccgatacttctcactcagaacataaaaataggcggacgtacacaccggcaggacctagggtttatcctatgtcgcatcactatgcagttctaggtcttgacagatcacgagcgacaccatatacagatgcagaagtgaagactgcttttagaacaaaagcgatggaagtgcatcctgaccaaaatcaaaatgatagagatgctgcagaagagaagttcaaggaggttgtcaagtcttacgaagcaattaaatcggagagaaaaaacggtgtaagttgatgcaaacttccagtgtggtcggatcaagtggtaaagactgggaccggatcacgcgggaatcagttgtgccttgtatatgtaatcaattgttgccggcagcttgataaaatggttcttctgttgctgttgaggacctgtagcacgagttccatttatgagcttgggcgatgtagatttggataggttcaaaagatgtgctttttgttcatttagccactaacttgacgtgctcccatcatactttgggtcaaatggggttgggccaaaaaaggtcgaaatttttttttggatcatactgtgctagcccaaagattaaaaacagtggtctaggttgactctaaa

SEQ ID NO: 52491 - DNA, 899 bp, Zea Mays
gcagtactgcagcggatcccgatcccatggcacacggtcgtttgaggcattgcgagtcccgagtcgactctctcccgtttcccggccgtccccttcaccaatccaatccaactccaattcgtcctccggtcctccccctcgaggcctacgcacaatagattcgatctcgagtcctcgaatcctgccttttcctctggtcaggaaagcatgagcttgatttccggcgcttctcgccgtcgagctcgaaccagaagataagaagaatccgctaggggcgagccccatagaagatggccccgcacccgcaggaggacaaatcagatcggcacagcagcggcgccggtgcgtcgagggagcaggaacggcggccgtccaaggcatggggaatcctcatcttcggcctcatcggcgtcaccaccgccagtttcgctattactcaagttcgcaaaagcatggactggttctacactcagtcaacatcatcttggacttggaggtatacaagtaataactcaagtcgtggaagcttcagtgaggaagctaagaaaagatattatcagcgaatgcagcaggaatatgaagaggaacaagagagagttcaaagaataaggcatatgcagagtgtcttcaacagagagaggaataaatttggacgaggttatgaaagctggagggagaatggccctcctcgtggctacaattacatccctcgggatgattggtattggcagaccgatacttctcactcagaacataaaaataggcggacgtacacaccggcaggacctagggtttatcctatgtcgcatcactatgcagttctaggtcttgacagatcacgagcgacaccatatacagatgcagaagtgaagtttataacggagctgattatgaggatg

SEQ ID NO: 52492 - DNA, 1826 bp, Zea Mays
cttttttggaggttctcttgtatggcttgcacaagtaaattgaagtaatggacttggaaccttcaagtgttccagtggaggtattaggagtggtggggaaaaagggattgtagaggtaacgatgttgagacagagctctagtagaaatcagagatccagaggtctgaagctgaagaaagctcttcagattagtctcttgcttctggtttctgtttggttgctctaccaagttaagcattcttacgagaagaaggcggcgtacagcgaaggtgaagtgaatgatttgcataaagatgacaagggccagggagaggcagtcagattgggcaggaaggatgtgcctccaaagatggaggctgattcttcaacactggatgagcgggttgaggatgaagagaacgatgaagtggagcaagaaatgaagcatgatgagaacgatgaggatcccatcgatgagcaagacctggagaaggacgaggatcttcccgagcctggcgagcattcttctgaaaaggatgaagatgtgggtgtgtttgaggacgaagagcggaaggagcggtcacaggaggatcaagagaagagcttccatggtgacgatgtgtctagtgctgttactcatgatcctcaatcgtccgagcaagatgagctgttccatcatgcccaagacacggtcctattcgtggatgatgcttcaactgcagtgcccaatgaaaaccatgtggctggaaacgacgaggaggaagtgcagagggctagggaaaggagtttcagaggcgatgatgtgtcaagctccgtggatcatgacgccaaggtggcaaagcctctcccagaggaacaactgaacagcatggataagatatttgaaggcaccacaaacttgtctaacggaatttcgtttcgagctcctggaataaatggatcatatgccggcatggacaatgtggctacagtaccaactaattcaccttcacagaaaaacgcaggcactcctagcaatgacatagaaagcaagacccacccatctccggcaaatttgaccggaccagagcaaagtaattcgactttgaaagatcacccagatcaacaagtgaattcaacagcagtgctgggcaaccaagtacagcctttgactaaccagacgccgtggcccgagttggattctccaaatggcaccttggctctggtaacagatgtccaaaagtccacatctggagctggagatgatggcagcagcactgtggacaagaggacggacggtagagatggtcccaaagaagacgtggatgtgtccacgaaaataatgaacagggcaatcagtgaggatgaagtcgttccagagtgacaaggagatctctcttgccggcttctggtgtaacctgtaagtttgtaggacttggtttcgtctcctagactagacttggagatgcgcaagcaggctgtctcgttgtgcacgccttttgtgtaagtttgatagatgtctgcttttgtactgccagttagtagtccatcacaatgatctgggtcgagtggagaacaagaagcatgtgtacccacagaaatatatgtagcgattctgcagctcttgaagcttcgctgctcgaatcaaatgccagagtaggcagctaaataccatctatcaatgaaatgtccatgcccatcgctgcccaattttgtgtctgaatatgtgtaggtgtgaatcgtggtgcttgactgcttgcaaagtggaaatgtgcccgatgttgtagtagtagtaacagtgcgctgttcgatgttactgtcttgagttcatgccttcaggtgctgaagagtgaaggcgccactgaaat

SEQ ID NO: 52493 - DNA, 1893 bp, Zea Mays
cttcgatggactgatgtgtttttgctcgttggttgggatgccttggccttgattctaagctacctgtatgagacggagaaatgtagccgcgtccttcttgtgttccgttttcagttatcctaggaaccttcaagtgttccagtggaggtattaggagtggtggggaaaaagggattgtagaggtaacgatgttgagacagagctctagtagaaatcagagatccagaggtctgaagctgaagaaagctcttcagattagtctcttgcttctggtttctgtttggttgctctaccaagttaagcattcttacgagaagaaggcggcgtacagcgaaggtgaagtgaatgatttgcataaagatgacaagggccagggagaggcagtcagattgggcaggaaggatgtgcctccaaagatggaggctgattcttcaacactggatgagcgggttgaggatgaagagaacgatgaagtggagcaagaaatgaagcatgatgagaacgatgaggatcccatcgatgagcaagacctggagaaggacgaggatcttcccgagcctggcgagcattcttctgaaaaggatgaagatgtgggtgtgtttgaggacgaagagcggaaggagcggtcacaggaggatcaagagaagagcttccatggtgacgatgtgtctagtgctgttactcatgatcctcaatcgtccgagcaagatgagctgttccatcatgcccaagacacggtcctattcgtggatgatgcttcaactgcagtgcccaatgaaaaccatgtggctggaaacgacgaggaggaagtgcagagggctagggaaaggagtttcagaggcgatgatgtgtcaagctccgtggatcatgacgccaaggtggcaaagcctctcccagaggaacaactgaacagcatggataagatatttgaaggcaccacaaacttgtctaacggaatttcgtttcgagctcctggaataaatggatcatatgccggcatggacaatgtggctacagtaccaactaattcaccttcacagaaaaacgcaggcactcctagcaatgacatagaaagcaagacccacccatctccggcaaatttgaccggaccagagcaaagtaattcgactttgaaagatcacccagatcaacaagtgaattcaacagcagtgctgggcaaccaagtacagcctttgactaaccagacgccgtggcccgagttggattctccaaatggcaccttggctctggtaacagatgtccaaaagtccacatctggagctggagatgatggcagcagcactgtggacaagaggacggacggtagagatggtcccaaagaagacgtggatgtgtccacgaaaataatgaacagggcaatcagtgaggatgaagtcgttccagagtgacaaggagatctctcttgccggcttctggtgtaacctgtaagtttgtaggacttggtttcgtctcctagactagacttggagatgcgcaagcaggctgtctcgttgtgcacgccttttgtgtaagtttgatagatgtctgcttttgtactgccagttagtagtccatcacaatgatctgggtcgagtggagaacaagaagcatgtgtacccacagaaatatatgtagcgattctgcagctcttgaagcttcgctgctcgaatcaaatgccagagtaggcagctaaataccatctatcaatgaaatgtccatgcccatcgctgcccaattttgtgtctgaatatgtgtaggtgtgaatcgtggtgcttgactgcttgcaaagtggaaatgtgcccgatgttgtagtagtagtaacagtgcgctgttcgatgttactgtcttgagttcatgccttcaggtgctgaagagtgaaggcgccactgaaat

SEQ ID NO: 52494 - DNA, 1882 bp, Zea Mays
cttgttcttgccttggagcactttgggtttattgagagcgaagtatctggtgttcgtgctgctgaaggtgttggataatggatttggggtgtgcggtgatcgttgagctggggaaccttcaagtgttccagtggaggtattaggagtggtggggaaaaagggattgtagaggtaacgatgttgagacagagctctagtagaaatcagagatccagaggtctgaagctgaagaaagctcttcagattagtctcttgcttctggtttctgtttggttgctctaccaagttaagcattcttacgagaagaaggcggcgtacagcgaaggtgaagtgaatgatttgcataaagatgacaagggccagggagaggcagtcagattgggcaggaaggatgtgcctccaaagatggaggctgattcttcaacactggatgagcgggttgaggatgaagagaacgatgaagtggagcaagaaatgaagcatgatgagaacgatgaggatcccatcgatgagcaagacctggagaaggacgaggatcttcccgagcctggcgagcattcttctgaaaaggatgaagatgtgggtgtgtttgaggacgaagagcggaaggagcggtcacaggaggatcaagagaagagcttccatggtgacgatgtgtctagtgctgttactcatgatcctcaatcgtccgagcaagatgagctgttccatcatgcccaagacacggtcctattcgtggatgatgcttcaactgcagtgcccaatgaaaaccatgtggctggaaacgacgaggaggaagtgcagagggctagggaaaggagtttcagaggcgatgatgtgtcaagctccgtggatcatgacgccaaggtggcaaagcctctcccagaggaacaactgaacagcatggataagatatttgaaggcaccacaaacttgtctaacggaatttcgtttcgagctcctggaataaatggatcatatgccggcatggacaatgtggctacagtaccaactaattcaccttcacagaaaaacgcaggcactcctagcaatgacatagaaagcaagacccacccatctccggcaaatttgaccggaccagagcaaagtaattcgactttgaaagatcacccagatcaacaagtgaattcaacagcagtgctgggcaaccaagtacagcctttgactaaccagacgccgtggcccgagttggattctccaaatggcaccttggctctggtaacagatgtccaaaagtccacatctggagctggagatgatggcagcagcactgtggacaagaggacggacggtagagatggtcccaaagaagacgtggatgtgtccacgaaaataatgaacagggcaatcagtgaggatgaagtcgttccagagtgacaaggagatctctcttgccggcttctggtgtaacctgtaagtttgtaggacttggtttcgtctcctagactagacttggagatgcgcaagcaggctgtctcgttgtgcacgccttttgtgtaagtttgatagatgtctgcttttgtactgccagttagtagtccatcacaatgatctgggtcgagtggagaacaagaagcatgtgtacccacagaaatatatgtagcgattctgcagctcttgaagcttcgctgctcgaatcaaatgccagagtaggcagctaaataccatctatcaatgaaatgtccatgcccatcgctgcccaattttgtgtctgaatatgtgtaggtgtgaatcgtggtgcttgactgcttgcaaagtggaaatgtgcccgatgttgtagtagtagtaacagtgcgctgttcgatgttactgtcttgagttcatgccttcaggtgctgaagagtgaaggcgccactgaaat

SEQ ID NO: 52495 - DNA, 1984 bp, Zea Mays
tcccctcgctttcgcttcgccggcactccatccgtccatcgtggcccaggctgtcgttccgttctataaagggcgtcgagaggaaaccggtggaaccctacactgagaaccgcagagacaggcgtcttcgtactcgcctatctccgcgactcaaagctttccccaattcccccccttctcccatttctcaccaccgccgccgctccccccgttcaacaacaccatgagggagtgcatctcgatccacatcggccaggctggtatccaggtcggaaacgcgtgctgggagctgtactgcctcgagcatggcattcaggctgatggccagatgcccggtgacaagaccattgggggaggtgatgatgctttcaacaccttcttcagtgagactggcgctgggaagcacgtcccccgtgctgtttttgttgaccttgagcccactgtcatcgatgaggtgaggactggcacctaccgccagctcttccatcctgagcagctcatcagtggcaaggaggatgcagccaacaacttcgctcgtggtcactacaccattggcaaggagattgttgacctgtgccttgaccgcatcaggaagcttgcagataattgcactggtctccagggcttcctcgtcttcaacgctgttggtggaggaacgggctctgggcttggttctctcctcctggagcgcctgtctgttgactatggcaagaagtccaagctcggtttcaccgtgtacccatccccccaggtgtccacatccgtggttgagccatacaacagtgtcctgtccacccactctctcctcgagcacactgatgttgctgtcctgctcgacaatgaggccatctatgacatctgccgccgctcccttgacattgagcgcccaacctacaccaacctcaacaggcttgtctcccaggtcatctcatccctgacggcttccctgaggttcgatggtgctctgaacgttgatgtgaacgagttccagaccaacctggtgccctacccgaggatccacttcatgctttcgtcctacgctccagtcatttctgctgagaaggcctaccacgagcagctgtccgtggctgaaatcaccaacagcgccttcgagccatcctccatgatggttcccaaggacgtgaacgctgctgtggccacaatcaagaccaagcgcaccatccagttcgtggactggtgcccgactggcttcaagtgcggaatcaactaccagcctcccagcgtcgtcccaggcggtgatctggccaaggtgcagcgtgccgtgtgtatgatctccaactccaccagtgttgtggaggtcttctcccgcattgaccacaagttcgacctcatgtacgccaagcgcgccttcgtgcactggtacgtcggtgagggtatggaggagggcgagttctccgaggctcgtgaggatctggcggcgcttgagaaggactacgaggaggtcggtgctgagtttgacgagggtgaggacggcgacgagggtgacgagtactagacgctctactggcgcggcgtcgtcgggcttgtgtgccactgctatcctgtgatctgccctgagtggctcctatcgtgttatgtttctgtcggttcttatctatctgtcgttgtgtggtttacaacttacgttgtaagactttattcccccgctttgctactgggttattaagtttggcgttattgttttcttgatctctgagatgctttgctttcaccacctgttttttttttgtcatctgtgtaattgagtcgacggacaatcattttcttgcttcgagcaggcgagagcagcacacgagttgcagacagatcttactgtggcaataaaaaaaataaacaataataaatatgtagcgaatattaatcaacacattgattctctagaaggatagtatattatataagtctcgtgagcgtcccaggtaatgatatcatcgaaattaggaaacaaaacgataaaaggggg

SEQ ID NO: 52496 - DNA, 1594 bp, Zea Mays
tcccctcgctttcgcttcgccggcactccatccgtccatcgtggcccaggctgtcgttccgttctataaagggcgtcgagaggaaaccggtggaaccctacactgagaaccgcagagacaggcgtcttcgtactcgcctatctccgcgactcaaagctttccccaattcccccccttctcccatttctcaccaccgccgccgctccccccgttcaacaacaccatgagggagtgcatctcgatccacatcggccaggctggtatccaggtcggaaacgcgtgctgggagctgtactgcctcgagcatggcattcaggctgatggccagatgcccggtgacaagaccattgggggaggtgatgatgctttcaacaccttcttcagtgagactggcgctgggaagcacgtcccccgtgctgtttttgttgaccttgagcccactgtcatcgatgaggccatctatgacatctgccgccgctcccttgacattgagcgcccaacctacaccaacctcaacaggcttgtctcccaggtcatctcatccctgacggcttccctgaggttcgatggtgctctgaacgttgatgtgaacgagttccagaccaacctggtgccctacccgaggatccacttcatgctttcgtcctacgctccagtcatttctgctgagaaggcctaccacgagcagctgtccgtggctgaaatcaccaacagcgccttcgagccatcctccatgatggttcccaaggacgtgaacgctgctgtggccacaatcaagaccaagcgcaccatccagttcgtggactggtgcccgactggcttcaagtgcggaatcaactaccagcctcccagcgtcgtcccaggcggtgatctggccaaggtgcagcgtgccgtgtgtatgatctccaactccaccagtgttgtggaggtcttctcccgcattgaccacaagttcgacctcatgtacgccaagcgcgccttcgtgcactggtacgtcggtgagggtatggaggagggcgagttctccgaggctcgtgaggatctggcggcgcttgagaaggactacgaggaggtcggtgctgagtttgacgagggtgaggacggcgacgagggtgacgagtactagacgctctactggcgcggcgtcgtcgggcttgtgtgccactgctatcctgtgatctgccctgagtggctcctatcgtgttatgtttctgtcggttcttatctatctgtcgttgtgtggtttacaacttacgttgtaagactttattcccccgctttgctactgggttattaagtttggcgttattgttttcttgatctctgagatgctttgctttcaccacctgttttttttttgtcatctgtgtaattgagtcgacggacaatcattttcttgcttcgagcaggcgagagcagcacacgagttgcagacagatcttactgtggcaataaaaaaaataaacaataataaatatgtagcgaatattaatcaacacattgattctctagaaggatagtatattatataagtctcgtgagcgtcccaggtaatgatatcatcgaaattaggaaacaaaacgataaaaggggg

SEQ ID NO: 52497 - DNA, 1587 bp, Zea Mays
ctggggttcctgccgctcagaacttgcgatcgcggtggaggggtgcatgcatggggagctggacatagtctatgacacgctgcgaaggctcgaggaggccgagggcgtcaagattgacctcctcctctgctgcggcgatttccaggctgttaggaatgagaacgatttacagtgtgttagcgttccacaaaagtatcgtaccatgaacacattttggaagtactactcaggagaagcagttgctccgtacccaaccatctttattggtggaaaccacgaagcatccaattatctgtgggaattgtactatggaggatgggcagcacctaacatatactttttggggtttgctggtgttgttaagtttggaaacatacgaattggtggattgtcaggaatacataacaaacaccattatcatttaggacactatgagaggcctccatacaataaagatactatacggtctgtgtaccatgtaaggcattatgatgttctcaagctcatgcatttgaaggagccgctagatgtattcttgtcacatgattggcctctgggcattaccgagtatggaaactggcagaagctcattagtgtgaagaagaactttgaagatgaggttaacaatagaacactaggcagcaaacctgcagctgaattactgaacaagctaaaaccaccatactggttttcggcgcaccttcactgtaagtttcctgctgttatccagcatggcaagaatggacctacaacgaagtttcttgcacttgataagtgcattcctgggcgcaattttttgcaggttatagacattccatccaatccaggaccatatgaaatccagtatgatgaagaatggcttgcaataacacgaaaattcaacagtgttttccctttagcacggacacagtttactatgcgggatgagcagctcgacactcaagaagaccggcaatgggtcaggagcaagttgaatactagaggagctaagccttttgattttgttcagactgcaccatctttcaatccttccagtacaacatctaaacagtccataacagtttgctgcaggaatccacaaactgagtcttttcttcagcttctggaactcccatatctgctggactcatctaaatctgagatgtttggtagaaatgagtcaacttctcagacaggaaacacacttgataatgaagatatagagctaccagatgaagatgaggatgctttagaagatgacgagtgaaggacagcacttttagacaagtaccattgcacctatcatgttggttgcagggtttgcgatagatttcattgtcttttgtagattgcaatctatatatctagacgaggaactaacatgtactagattgtattgtcatagctgcttttttgttggaggacgtttgtggatctagagggtgatctgttgatcacaatgccaactctttggtgtttagttcatacagttttttgaactaactacaattaatcagtagactagatgcatccggtggaaagtgttaacaaaaatatcatctactagcaaggtagagatcagctatatatataaaacatatatttgaa

SEQ ID NO: 52498 - DNA, 2187 bp, Zea Mays
atgccttcgatgtttatcgcatctaaatcagatatatgcactcagggagtgtttggtttaaataatcactacatccaaattgagtccaaattgaggtggtgagaactgagaagatagtgagaagatgatggactaattcattgctcacaccaaacatcctatcagtaaagttggaaggaagatgacaacacaagtagcaagtaaatggaatccaaacagcttcgacgtctggggccagaggagagcatagcctcgatcgcgtcctctccttcgacaaggccgctatgtcgtcctcgctggagttgaagccccaaggaacttcgccttttctggcgcgcggctgaggagctccttcttgagctgagcgagcgtctgcgtcagcatgccctcaggagaagatgagcaggagcccatgctcgaacgcctcccgctgtgcggccgtgggtggagcagcgccgtcgcggacgggctctcccttcgccgccgccgggtactcggcgctccatccaggcactccagccacccccaccccttcctccgccgccgggtactcggcgctccatccaggcgtccccgccccgcggccgcctgctactcgttcgggcgctccatccagcgttctccctccagctccagtctccggcgcgatgaagatcgcggtggaggggtgcatgcatggggagctggacatagtctatgacacgctgcgaaggctcgaggaggccgagggcgtcaagattgacctcctcctctgctgcggcgatttccaggctgttaggaatgagaacgatttacagtgtgttagcgttccacaaaagtatcgtaccatgaacacattttggaagtactactcaggagaagcagttgctccgtacccaaccatctttattggtggaaaccacgaagcatccaattatctgtgggaattgtactatggaggatgggcagcacctaacatatactttttggggtttgctggtgttgttaagtttggaaacatacgaattggtggattgtcaggaatacataacaaacaccattatcatttaggacactatgagaggcctccatacaataaagatactatacggtctgtgtaccatgtaaggcattatgatgttctcaagctcatgcatttgaaggagccgctagatgtattcttgtcacatgattggcctctgggcattaccgagtatggaaactggcagaagctcattagtgtgaagaagaactttgaagatgaggttaacaatagaacactaggcagcaaacctgcagctgaattactgaacaagctaaaaccaccatactggttttcggcgcaccttcactgtaagtttcctgctgttatccagcatggcaagaatggacctacaacgaagtttcttgcacttgataagtgcattcctgggcgcaattttttgcaggaccatatgaaatccagtatgatgaagaatggcttgcaataacacgaaaattcaacagtgttttccctttagcacggacacagtttactatgcgggatgagcagctcgacactcaagaagaccggcaatgggtcaggagcaagttgaatactagaggagctaagccttttgattttgttcagactgcaccatctttcaatccttccagtacaacatctaaacagtccataacagtttgctgcaggaatccacaaactgagtcttttcttcagcttctggaactcccatatctgctggactcatctaaatctgagatgtttggtagaaatgagtcaacttctcagacaggaaacacacttgataatgaagatatagagctaccagatgaagatgaggatgctttagaagatgacgagtgaaggacagcacttttagacaagtaccattgcacctatcatgttggttgcagggtttgcgatagatttcattgtcttttgtagattgcaatctatatatctagacgaggaactaacatgtactagattgtattgtcatagctgcttttttgttggaggacgtttgtggatctagagggtgatctgttgatcacaatgccaactctttggtgtttagttcatacagttttttgaactaactacaattaatcagtagactagatgcatccggtggaaagtgttaacaaaaatatcatctactagcaaggtagagatcagctatatatataaaacatatatttgaa

SEQ ID NO: 52499 - DNA, 2706 bp, Zea Mays
atgccttcgatgtttatcgcatctaaatcagatatatgcactcagggagtgtttggtttaaataatcactacatccaaattgagtccaaattgaggtggtgagaactgagaagatagtgagaagatgatggactaattcattgctcacaccaaacatcctatcagtaaagttggaaggaagatgacaacacaagtagcaagtaaatggaatccaaacagcttcgacgtctggggccagaggagagcatagcctcgatcgcgtcctctccttcgacaaggccgctatgtcgtcctcgctggagttgaagccccaaggaacttcgccttttctggcgcgcggctgaggagctccttcttgagctgagcgagcgtctgcgtcagcatgccctcaggagaagatgagcaggagcccatgctcgaacgcctcccgctgtgcggccgtgggtggagcagcgccgtcgcggacgggctctcccttcgccgccgccgggtactcggcgctccatccaggcactccagccacccccaccccttcctccgccgccgggtactcggcgctccatccaggcgtccccgccccgcggccgcctgctactcgttcgggcgctccatccagcgttctccctccagctccagtctccggcgcgatgaagatcgcggtggaggggtgcatgcatggggagctggacatagtctatgacacgctgcgaaggctcgaggaggccgagggcgtcaagattgacctcctcctctgctgcggcgatttccaggctgttaggaatgagaacgatttacagtgtgttagcgttccacaaaagtatcgtaccatgaacacattttggaagtactactcaggagaagcagttgctccgtacccaaccatctttattggtggaaaccacgaagcatccaattatctgtgggaattgacactatgagaggcctccatacaataaagatactatacggtctgtgtaccatgtaaggcattatgatgttctcaagctcatgcatttgaaggagccgctagatgtattcttgtcacatgattggcctctgggcattaccgagtatggaaactggcagaagctcattagtgtgaagaagaactttgaagatgaggtgatgtacacactcatgagattggcttattttaaagcttaatgccatgatgtcattgcttcccctataccatatacttcatcaaaatttatcgtgacattcaattttaatgtgctagaacactgcatgattcatttggagacttaaccaaagaagtgacattaacaactggtgtcagtgtgtcacagtttccacagataacaatcttttaaatatcacaagatcagaacccctattagttttagaacatgtattgctccttccattttacaaagaataaatcttgctaagacttaggtgaaacctggcctgttgttttcttcagactcttggatcttaacttccttggctaggggttccctttagattctcgagtcttgattttcttactagggccgactatctaatctgttcctccctcctgtaaatgcccttgtccttgcagtgcttccaaattgtgcaccacctttggatccaactttgttgtctgtttttattttgtacctagaaaaatatccttgtacatgatgaccactgtgcagatctgtaggctgtagcctgtagggttactgtcgttaggtttccttgttttagtttggcacatgcacgtgtttgacagtttgagtgaatttactttcttaccacgaacatcttttattcttctgtaactcttattcatatatcttctggaatgcaaatgttatattatcatcaatccttatttattttttctaggttaacaatagaacactaggcagcaaacctgcagctgaattactgaacaagctaaaaccaccatactggttttcggcgcaccttcactgtaagtttcctgctgttatccagcatggcaagaatggacctacaacgaagtttcttgcacttgataagtgcattcctgggcgcaattttttgcagggatgagcagctcgacactcaagaagaccggcaatgggtcaggagcaagttgaatactagaggagctaagccttttgattttgttcagactgcaccatctttcaatccttccagtacaacatctaaacagtccataacagtttgctgcaggaatccacaaactgagtcttttcttcagcttctggaactcccatatctgctggactcatctaaatctgagatgtttggtagaaatgagtcaacttctcagacaggaaacacacttgataatgaagatatagagctaccagatgaagatgaggatgctttagaagatgacgagtgaaggacagcacttttagacaagtaccattgcacctatcatgttggttgcagggtttgcgatagatttcattgtcttttgtagattgcaatctatatatctagacgaggaactaacatgtactagattgtattgtcatagctgcttttttgttggaggacgtttgtggatctagagggtgatctgttgatcacaatgccaactctttggtgtttagttcatacagttttttgaactaactacaattaatcagtagactagatgcatccggtggaaagtgttaacaaaaatatcatctactagcaaggtagagatcagctatatatataaaacatatatttgaa

SEQ ID NO: 52500 - DNA, 2828 bp, Zea Mays
atgccttcgatgtttatcgcatctaaatcagatatatgcactcagggagtgtttggtttaaataatcactacatccaaattgagtccaaattgaggtggtgagaactgagaagatagtgagaagatgatggactaattcattgctcacaccaaacatcctatcagtaaagttggaaggaagatgacaacacaagtagcaagtaaatggaatccaaacagcttcgacgtctggggccagaggagagcatagcctcgatcgcgtcctctccttcgacaaggccgctatgtcgtcctcgctggagttgaagccccaaggaacttcgccttttctggcgcgcggctgaggagctccttcttgagctgagcgagcgtctgcgtcagcatgccctcaggagaagatgagcaggagcccatgctcgaacgcctcccgctgtgcggccgtgggtggagcagcgccgtcgcggacgggctctcccttcgccgccgccgggtactcggcgctccatccaggcactccagccacccccaccccttcctccgccgccgggtactcggcgctccatccaggcgtccccgccccgcggccgcctgctactcgttcgggcgctccatccagcgttctccctccagctccagtctccggcgcgatgaagatcgcggtggaggggtgcatgcatggggagctggacatagtctatgacacgctgcgaaggctcgaggaggccgagggcgtcaagattgacctcctcctctgctgcggcgatttccaggctgttaggaatgagaacgatttacagtgtgttagcgttccacaaaagtatcgtaccatgaacacattttggaagtactactcaggagaagcagttgctccgtacccaaccatctttattggtggaaaccacgaagcatccaattatctgtgggaattgtactatggaggatgggcagcacctaacatatactttttggggtttgctggtgttgttaagtttggaaacatacgaattggtggattgtcaggaatacataacaaacaccattatcatttaggacactatgagaggcctccatacaataaagatactatacggtctgtgtaccatgtaaggcattatgatgttctcaagctcatgcatttgaaggagccgctagatgtattcttgtcacatgattggcctctgggcattaccgagtatggaaactggcagaagctcattagtgtgaagaagaactttgaagatgaggtgatgtacacactcatgagattggcttattttaaagcttaatgccatgatgtcattgcttcccctataccatatacttcatcaaaatttatcgtgacattcaattttaatgtgctagaacactgcatgattcatttggagacttaaccaaagaagtgacattaacaactggtgtcagtgtgtcacagtttccacagataacaatcttttaaatatcacaagatcagaacccctattagttttagaacatgtattgctccttccattttacaaagaataaatcttgctaagacttaggtgaaacctggcctgttgttttcttcagactcttggatcttaacttccttggctaggggttccctttagattctcgagtcttgattttcttactagggccgactatctaatctgttcctccctcctgtaaatgcccttgtccttgcagtgcttccaaattgtgcaccacctttggatccaactttgttgtctgtttttattttgtacctagaaaaatatccttgtacatgatgaccactgtgcagatctgtaggctgtagcctgtagggttactgtcgttaggtttccttgttttagtttggcacatgcacgtgtttgacagtttgagtgaatttactttcttaccacgaacatcttttattcttctgtaactcttattcatatatcttctggaatgcaaatgttatattatcatcaatccttatttattttttctaggttaacaatagaacactaggcagcaaacctgcagctgaattactgaacaagctaaaaccaccatactggttttcggcgcaccttcactgtaagtttcctgctgttatccagcatggcaagaatggacctacaacgaagtttcttgcacttgataagtgcattcctgggcgcaattttttgcagggatgagcagctcgacactcaagaagaccggcaatgggtcaggagcaagttgaatactagaggagctaagccttttgattttgttcagactgcaccatctttcaatccttccagtacaacatctaaacagtccataacagtttgctgcaggaatccacaaactgagtcttttcttcagcttctggaactcccatatctgctggactcatctaaatctgagatgtttggtagaaatgagtcaacttctcagacaggaaacacacttgataatgaagatatagagctaccagatgaagatgaggatgctttagaagatgacgagtgaaggacagcacttttagacaagtaccattgcacctatcatgttggttgcagggtttgcgatagatttcattgtcttttgtagattgcaatctatatatctagacgaggaactaacatgtactagattgtattgtcatagctgcttttttgttggaggacgtttgtggatctagagggtgatctgttgatcacaatgccaactctttggtgtttagttcatacagttttttgaactaactacaattaatcagtagactagatgcatccggtggaaagtgttaacaaaaatatcatctactagcaaggtagagatcagctatatatataaaacatatatttgaa

SEQ ID NO: 52501 - DNA, 1935 bp, Zea Mays
atgccttcgatgtttatcgcatctaaatcagatatatgcactcagggagtgtttggtttaaataatcactacatccaaattgagtccaaattgaggtggtgagaactgagaagatagtgagaagatgatggactaattcattgctcacaccaaacatcctatcagtaaagttggaaggaagatgacaacacaagtagcaagtaaatggaatccaaacagcttcgacgtctggggccagaggagagcatagcctcgatcgcgtcctctccttcgacaaggccgctatgtcgtcctcgctggagttgaagccccaaggaacttcgccttttctggcgcgcggctgaggagctccttcttgagctgagcgagcgtctgcgtcagcatgccctcaggagaagatgagcaggagcccatgctcgaacgcctcccgctgtgcggccgtgggtggagcagcgccgtcgcggacgggctctcccttcgccgccgccgggtactcggcgctccatccaggcactccagccacccccaccccttcctccgccgccgggtactcggcgctccatccaggcgtccccgccccgcggccgcctgctactcgttcgggcgctccatccagcgttctccctccagctccagtctccggcgcgatgaagatcgcggtggaggggtgcatgcatggggagctggacatagtctatgacacgctgcgaaggctcgaggaggccgagggcgtcaagattgacctcctcctctgctgcggcgatttccaggtactatggaggatgggcagcacctaacatatactttttggggtttgctggtgttgttaagtttggaaacatacgaattggtggattgtcaggaatacataacaaacaccattatcatttaggacactatgagaggcctccatacaataaagatactatacggtctgtgtaccatgtaaggcattatgatgttctcaagctcatgcatttgaaggagccgctagatgtattcttgtcacatgattggcctctgggcattaccgagtatggaaactggcagaagctcattagtgtgaagaagaactttgaagatgaggttaacaatagaacactaggcagcaaacctgcagctgaattactgaacaagctaaaaccaccatactggttttcggcgcaccttcactgtaagtttcctgctgttatccagcatggcaagaatggacctacaacgaagtttcttgcacttgataagtgcattcctgggcgcaattttttgcagggatgagcagctcgacactcaagaagaccggcaatgggtcaggagcaagttgaatactagaggagctaagccttttgattttgttcagactgcaccatctttcaatccttccagtacaacatctaaacagtccataacagtttgctgcaggaatccacaaactgagtcttttcttcagcttctggaactcccatatctgctggactcatctaaatctgagatgtttggtagaaatgagtcaacttctcagacaggaaacacacttgataatgaagatatagagctaccagatgaagatgaggatgctttagaagatgacgagtgaaggacagcacttttagacaagtaccattgcacctatcatgttggttgcagggtttgcgatagatttcattgtcttttgtagattgcaatctatatatctagacgaggaactaacatgtactagattgtattgtcatagctgcttttttgttggaggacgtttgtggatctagagggtgatctgttgatcacaatgccaactctttggtgtttagttcatacagttttttgaactaactacaattaatcagtagactagatgcatccggtggaaagtgttaacaaaaatatcatctactagcaaggtagagatcagctatatatataaaacatatatttgaa

SEQ ID NO: 52502 - DNA, 2104 bp, Zea Mays
ctgaaacaataatgccttcgatgtttatcgcatctaaatcagatatatgcactcagggagtgtttggtttaaataatcactacatccaaattgagtccaaattgaggtggtgagaactgagaagatagtgagaagatgatggactaattcattgctcacaccaaacatcctatcagtaaagttggaaggaagatgacaacacaagtagcaagtaaatggaatccaaacagcttcgacgtctggggccagaggagagcatagcctcgatcgcgtcctctccttcgacaaggccgctatgtcgtcctcgctggagttgaagccccaaggaacttcgccttttctggcgcgcggctgaggagctccttcttgagctgagcgagcgtctgcgtcagcatgccctcaggagaagatgagcaggagcccatgctcgaacgcctcccgctgtgcggccgtgggtggagcagcgccgtcgcggacgggctctcccttcgccgccgccgggtactcggcgctccatccaggcactccagccacccccaccccttcctccgccgccgggtactcggcgctccatccaggcgtccccgccccgcggccgcctgctactcgttcgggcgctccatccagcgttctccctccagctccagtctccggcgcgatgaagatcgcggtggaggggtgcatgcatggggagctggacatagtctatgacacgctgcgaaggctcgaggaggccgagggcgtcaagattgacctcctcctctgctgcggcgatttccaggctgttaggaatgagaacgatttacagtgtgttagcgttccacaaaagtatcgtaccatgaacacattttggaagtactactcaggagaagcagttgctccgtacccaaccatctttattggtggaaaccacgaagcatccaattatctgtgggaattgtactatggaggatgggcagcacctaacatatactttttggggtttgctggtgttgttaagtttggaaacatacgaattggtggattgtcaggaatacataacaaacaccattatcatttaggacactatgagaggcctccatacaataaagatactatacggtctgtgtaccatgtaaggcattatgatgttctcaagctcatgcatttgaaggagccgctagatgtattcttgtcacatgattggcctctgggcattaccgagtatggaaactggcagaagctcattagtgtgaagaagaactttgaagatgaggttaacaatagaacactaggcagcaaacctgcagctgaattactgaacaagctaaaaccaccatactggttttcggcgcaccttcactgtaagtttcctgctgttatccagcatggcaagaatggacctacaacgaagtttcttgcacttgataagtgcattcctgggcgcaattttttgcagggatgagcagctcgacactcaagaagaccggcaatgggtcaggagcaagttgaatactagaggagctaagccttttgattttgttcagactgcaccatctttcaatccttccagtacaacatctaaacagtccataacagtttgctgcaggaatccacaaactgagtcttttcttcagcttctggaactcccatatctgctggactcatctaaatctgagatgtttggtagaaatgagtcaacttctcagacaggaaacacacttgataatgaagatatagagctaccagatgaagatgaggatgctttagaagatgacgagtgaaggacagcacttttagacaagtaccattgcacctatcatgttggttgcagggtttgcgatagatttcattgtcttttgtagattgcaatctatatatctagacgaggaactaacatgtactagattgtattgtcatagctgcttttttgttggaggacgtttgtggatctagagggtgatctgttgatcacaatgccaactctttggtgtttagttcatacagttttttgaactaactacaattaatcagtagactagatgcatccggtggaaagtgttaacaaaaatatcatctactagcaaggtagagatcagctatatatataaaacatatatttgaa

SEQ ID NO: 52503 - DNA, 2146 bp, Zea Mays
gattttgaaacggtgttcataattattcacatgctatgtccttagctgaaacaataatgccttcgatgtttatcgcatctaaatcagatatatgcactcagggagtgtttggtttaaataatcactacatccaaattgagtccaaattgaggtggtgagaactgagaagatagtgagaagatgatggactaattcattgctcacaccaaacatcctatcagtaaagttggaaggaagatgacaacacaagtagcaagtaaatggaatccaaacagcttcgacgtctggggccagaggagagcatagcctcgatcgcgtcctctccttcgacaaggccgctatgtcgtcctcgctggagttgaagccccaaggaacttcgccttttctggcgcgcggctgaggagctccttcttgagctgagcgagcgtctgcgtcagcatgccctcaggagaagatgagcaggagcccatgctcgaacgcctcccgctgtgcggccgtgggtggagcagcgccgtcgcggacgggctctcccttcgccgccgccgggtactcggcgctccatccaggcactccagccacccccaccccttcctccgccgccgggtactcggcgctccatccaggcgtccccgccccgcggccgcctgctactcgttcgggcgctccatccagcgttctccctccagctccagtctccggcgcgatgaagatcgcggtggaggggtgcatgcatggggagctggacatagtctatgacacgctgcgaaggctcgaggaggccgagggcgtcaagattgacctcctcctctgctgcggcgatttccaggctgttaggaatgagaacgatttacagtgtgttagcgttccacaaaagtatcgtaccatgaacacattttggaagtactactcaggagaagcagttgctccgtacccaaccatctttattggtggaaaccacgaagcatccaattatctgtgggaattgacactatgagaggcctccatacaataaagatactatacggtctgtgtaccatgtaaggcattatgatgttctcaagctcatgcatttgaaggagccgctagatgtattcttgtcacatgattggcctctgggcattaccgagtatggaaactggcagaagctcattagtgtgaagaagaactttgaagatgaggttaacaatagaacactaggcagcaaacctgcagctgaattactgaacaagctaaaaccaccatactggttttcggcgcaccttcactgtaagtttcctgctgttatccagcatggcaagaatggacctacaacgaagtttcttgcacttgataagtgcattcctgggcgcaattttttgcaggttatagacattccatccaatccaggaccatatgaaatccagtatgatgaagaatggcttgcaataacacgaaaattcaacagtgttttccctttagcacggacacagtttactatgcgggatgagcagctcgacactcaagaagaccggcaatgggtcaggagcaagttgaatactagaggagctaagccttttgattttgttcagactgcaccatctttcaatccttccagtacaacatctaaacagtccataacagtttgctgcaggaatccacaaactgagtcttttcttcagcttctggaactcccatatctgctggactcatctaaatctgagatgtttggtagaaatgagtcaacttctcagacaggaaacacacttgataatgaagatatagagctaccagatgaagatgaggatgctttagaagatgacgagtgaaggacagcacttttagacaagtaccattgcacctatcatgttggttgcagggtttgcgatagatttcattgtcttttgtagattgcaatctatatatctagacgaggaactaacatgtactagattgtattgtcatagctgcttttttgttggaggacgtttgtggatctagagggtgatctgttgatcacaatgccaactctttggtgtttagttcatacagttttttgaactaactacaattaatcagtagactagatgcatccggtggaaagtgttaacaaaaatatcatctactagcaaggtagagatcagctatatatataaaacatatatttgaa

SEQ ID NO: 52504 - DNA, 5023 bp, Zea Mays
gaagtaatagtagaaccgcagcgccggcgccgtcagatcccagaaatccaaacaccagcgggttcttcggcgtctggcagcaaatcgcggacagcggataggaaggaagcaaaactaaccctttccattcaaagccccgagaatttcaaaaacattaacagcttcctccttcctctccgcaaaacaaaaaccccgcaatacttacaatacaagcaccggcttcgtccatcctctcctccccactcctctctctctcttccccagctccggccgtcgcgtccggcgtgtatactgctacctctgcgctcgccggcgccaccgtggccgcaggcgagctcgagaggtgcggaatttgggcgctgctcgtgctggtttcgaaccggagggaggagtaataattgggagacagttggaggagtgtaactttgggcattaatgccggggtggtgagagagagaccctcaagtgaggccgggccggggtggtgagagagagaccctcaagtgaggccgttctggtggtggcgccctgtagctagtaggagagtacgtactacctccgtagctcggcctctgcccccattcgccgtcgctgcttttaatttccctccggattccagcgcttccttccgcctctcctccccaatcccatcgacacctgtaacgcaagtgcacatgggggacggcggcggcggtatcggcaggaggccctcgacctcgaggcgatgacgcgcgcgcgcgcgaggggtctctgggcgctgctgctcgttgcgctggtggcggcggcggtggcgcccggggcgctggtgctggcgcagggagggaccctgacgtcgcggtcggatctcgtggggctgtacgcgctgcggggctcgctcggcctgagggcgcgggactggccgcggcgtgcggacccgtgcgcggcgtgggcgggcgtgggctgccgcgccggccgcgtcgtctcgctcagcgtcgccgggctgcggcgcacgcggctggcccgcctgtcgccgcgcttcgacgtcgacgggctgcgcaacctcacgcgcctcgaggccttcagcgccgcggggttcgggctgcctggctccatcccggcgtggctaggcgccgggctcgcgcccacgctccagtccctcgacatctccgcctgcgccgtctccggggagatcccggcctccgcgctcctgggcctcggcaacctcaccaccctcaacctcgcaggcaaccaactgtccggccaactcccggccaccgcgctcccgaggctcacgcgtctcaggacccttaacctctcgcgcaatgcgttctcgggcgccctgccccacgcggtctggtcgctcccggggctcagcgttctggacgtgtctcgtaacaacctcaccggcgcattgcccacgccagggcttgcgctgccagccaatgcgcaggtggtggacctgtcggggaacttcttctatggcggcgtcccagagacctttcgtcggctgttcgcccaggtgctgcttgccaatatttctgggaactactttgacggcgagctaggagtgtccgacggtggtggcggcaatgtttcgtttcagttgaattgcttccttgatgttctgggacagcgtacacaggttgattgccagcagttctatgccagtcgtggcttgccttatgatggtccagttatcccacccgcaccacagcctgcaccttcaccggtaaggaagaagcacaagaatctgaagtacatactgatcggggccattggtggaggcctcctgctgatagccgttgttgcagccattgtgttctgctttgtgtgttctgggagtacagggaggaggaatcatcagagagaaagtggggcatcaccaagtgcaccatcgggagtgtcagctaccggcacagctgcagctactggtggcacgcagccttctgcattgtctgcaaacacggtgaaagtcggcgattcgtttgcttacgaccaacttgtcaatgccacctcgggatttggggaaaataggctcatcaagcacggtcactcaggtgatctataccatggtgtgctccaagacgggactgccgtggtggtgaagaggatcacttcgcgtgtgcctcggaaggatgcttatctggcagagttagatttgtttgcaaaaggagtgcatgaaacgctggttcctttgttggggcactgccttgataaagaagaagaaaaggttcttgtgtataggtttgtccgaaatggtgacttgtcaaatgcactgcacagaaagtcaagggaggaaaatgaaggcttgcaatctttggactggattaagaggttgaagattgcaacaggggtagctgaggctctttgctatctgcatcatgagtgttctccaccaatggttcacagggatgtgcaagccagcagcatccttcttgatgataaatttgatgtgcgtcttggtagcttgagcaaggtgtgtcctcaagaaggggaagggcaccaaaatgttatcacaaagctgttaagattttcttcgacagcagatcaaggttcttctggttccccatctgcaacttgcccatatgatgtctattgttttggaaaagttttactcgagctggtgacagggagacttggtatcagtgcatcaaacaatgctgccacgagcgaatggcttgatgccaccctgcggtacgtcgatatttacgagaaagagcttatgagcaagatcattgatccaacgcttattattgatgaggaccacctggaggaagtctgggcaatggcgattgttgccaagtcctgcttgaatcctcggtcttctaaacgcccaccaatgaagtacatcctaaaggcactagaaaaccctttgaaggtggtgagagaagacaatggcaatagctcggccaggttgagagcaacatcgtctcggggttcatggaacgctgcactctttgggagttggcggcatagctcgtctgatgtaggtccttctagggacgacaacattctgaaacgctcagagacaatcagatcgtccggcgggagcaatggggaccattcttcctcccgcaggaggcaatccaaggagatcttccctgagccgtctggctctcgtgacaccgaggattaaggggctgtttggttcgtatctaaatgtgccacactttgcctaagattagtcgttcgaattgaagaactaaccttaggcataaaagttaggcaaagtgtggcaacttaggcataaccaaacaggccttaagcgtgaaggagaatctttcttactaatcactttttcggtaaggcgggagtccttatggaggagggctctgttagagctccgcttgctgcttctgatagaattctttcgtccaaaaagtcaggaatgtgaattctctctcctactcaatggcttcacaacagcacactggtgccatgcagccatggtaatcaattttggggcaagtagcaacggtggaatgtacgttggtgtaccaatggcatgcagttggcagcagtgaaaagtcttcacggttggaagtctggtgtctcttttcgtttgcccctcctctcggttaaagaaagaatggcgagctgattctttttcttctccctactgtaattgattgtttcattgttgatcatagcagaaatgttcttttcattcatgcagtgcttggcatcttgtcttctcctcactttgattttttttttgtttcctgtgcgagcttgatattagactgtgtctctagtgaatcttctaaaataggggtcactgtagatgatacactctttacatagtgagatttaaaataggaaatacgataatgtgatatggagatagccttacaacgtgagacggacggcgccatcgtaggtgggccaaagccaaaagcccaaaaacttgatagggggccaactctgtaaatttctgtgtcatcttttggtataccgtccaatagtaattgacggaagttttaaaatagaggcactgcccctagtttagactgactataaatttgtttctgttttttagactttatgtgtttcctcaaaacaaactggttatatattgctcaagacttatgaatactttgttatttcttcctggttcaaagccatgatgcaaggtatacgcttttgtacttgtgacttctcatacaagacggggacggggacgttaagactctggtctttctgaagacatcatattcaatcggcaggtcaagaccgtgacaatttattttgttaaaaaaaccgcagcaatgcacaagtatttgactagtgaacattgaagtatcagtgctaatagtctatttaaaaagagcacataatcgtaaatgtcgttgttaaaatcaaacactatttggaacttacctatggaggtgttggggaccttcggcatccgaaggtcctcaaaaacaggatttaacagtatttctggaagtataatgtgtgagcaggtaccttcgaactcaagtcgttatcacgccaggagaagaccaggataatacgaaggtcttggtacaacgccgaagatgtcagcaggaaagcttcggcgtggttgcagaaaatgaaaccgacttaaagttgaaaaggctattcagacctcgatagattaccatagaattattatcaaatataaagggcatgaatgtaattttgtatgggctgtgtcccgtgcctataaataggtgaacagtacccccgtactggggacgctgacttggcattcgctttttgcgtcacgcttgtactgtcacttccttccaattgaaggtacacctgtaattcaatgatgtttctgtttatgcctgataataatatgtaattgttcatgttgtcttttatattctttatattccatccttcgtcattatttaatgaatttatgaaggtacatccttcataaccttcgtccgtaaaccattatgtcctaagggaaataatgcttcgggggacgaaggacttttacgattaacattttctatgttgccttgttcttaactcatagtgcttgagaacaagtccctaacattgg

SEQ ID NO: 52505 - DNA, 832 bp, Zea Mays
tttcaataaatttacatagtgccattcagaactctgtatgattagcaaaactccacatgaaccagttatatacatcgcaaatctacaacaagcaaacaatcatattcttcttacctagcactgcctacaggtatatatatatatgtattgatccatccaaatggtccagtgcaccctgcagctctacactacagtctacctttactccatcaacaactcatgcacgacagttatatgtttatcagaatgtacatggctaatatagtattaagcatacaaattagtgattatatcatcagttctgaaatctctagtcctttgtttctatcacctattgctccataaaacagcatcacatggcaagcattcagccaccacagcttgcaagtatctcccaccagcacaagcgtgttacaagacccagtgcttccaggccacctgcacttcaaacaaaatcaacttgcagcaggggcactccagcttcaaaatgcagctcattccgaacccagatattcaactgggctccgaggccactgcttctcgtaacagcctcagaactatcctgagtacagtggcacctgtgccacacaatggtcaccggaatcccgaatcatggtgggaaaatggatgtgattttagtacagtatccagttcccagccacaaaacaactaagtttacactttgctggtacaagttaaacagtaaaaccatacatcaactcaactttcaactgtaaggaagaaacatgccgaagtgcaagcaactgccatggaatctgctgaaatttcttgatgaagtggaaatgttccagttcaactaactcccagtcca

SEQ ID NO: 52506 - DNA, 720 bp, Zea Mays
ctttttgtcctggcttatatgttgtgtatctaccgactggtgtttcctttgagcaatgcggcagtactttggtgaggaggatgctcgtcagaagctggctccctgtcctaaacgtctgccgggacattgttcaaccaatgcactcccagaaatcaaccaactgccaagagctggagggggcgtttcttcagatcatctccacattgccttttctagaagcacaggagctgctgcagcaatgcctggggttctcgactcgcaatgtcgatgactgcccgcatctggtcacggcattcaagacgtggttccggcgcgctggccgggctcctctaggcggggaaaactgaaacatgagcggatgtctgtatgcgcccaatcggtgcttgtgtcgctttgtattctcacatcacatagtctgctatcggcctacctacatcctctggatttggtatagtgcttgcctctctctctctctcgaatttgtctgtatatactgtcggtcgtttttgcacttaattgcacctactacttttagctattgtctataatcaataaccaaggtaaatgtatgcagcgtatgatccgtgtttttaactctaacaatgaggtctgcgtgcctattttcactcaatgtgtagtgtctgttggccgcactaatatttccagagtactacaactggttgtgaaaattgctctcaacaaagataagttgtataaatc

SEQ ID NO: 52507 - DNA, 817 bp, Zea Mays
aaaacttattgtacgctttgctaaaattgcagagttcgtaattggttttcaggacatcacataatctttttatgaataactaaggactctttgattactgttatatgttgaagatgacagttcaaattgttgaactcgttttttatgtatttggcatgtcatgctccagtgaggaggatgctcgtcagaagctggctccctgtcctaaacgtctgccgggacattgttcaaccaatgcactcccagaaatcaaccaactgccaagagctggagggggcgtttcttcagatcatctccacattgccttttctagaagcacaggagctgctgcagcaatgcctggggttctcgactcgcaatgtcgatgactgcccgcatctggtcacggcattcaagacgtggttccggcgcgctggccgggctcctctaggcggggaaaactgaaacatgagcggatgtctgtatgcgcccaatcggtgcttgtgtcgctttgtattctcacatcacatagtctgctatcggcctacctacatcctctggatttggtatagtgcttgcctctctctctctctcgaatttgtctgtatatactgtcggtcgtttttgcacttaattgcacctactacttttagctattgtctataatcaataaccaaggtaaatgtatgcagcgtatgatccgtgtttttaactctaacaatgaggtctgcgtgcctattttcactcaatgtgtagtgtctgttggccgcactaatatttccagagtactacaactggttgtgaaaattgctctcaacaaagataagttgtataaatc

SEQ ID NO: 52508 - DNA, 672 bp, Zea Mays
tcatttcattaagaaagaaaaaggtgaggaggatgctcgtcagaagctggctccctgtcctaaacgtctgccgggacattgttcaaccaatgcactcccagaaatcaaccaactgccaagagctggagggggcgtttcttcagatcatctccacattgccttttctagaagcacaggagctgctgcagcaatgcctggggttctcgactcgcaatgtcgatgactgcccgcatctggtcacggcattcaagacgtggttccggcgcgctggccgggctcctctaggcggggaaaactgaaacatgagcggatgtctgtatgcgcccaatcggtgcttgtgtcgctttgtattctcacatcacatagtctgctatcggcctacctacatcctctggatttggtatagtgcttgcctctctctctctctcgaatttgtctgtatatactgtcggtcgtttttgcacttaattgcacctactacttttagctattgtctataatcaataaccaaggtaaatgtatgcagcgtatgatccgtgtttttaactctaacaatgaggtctgcgtgcctattttcactcaatgtgtagtgtctgttggccgcactaatatttccagagtactacaactggttgtgaaaattgctctcaacaaagataagttgtataaatc

SEQ ID NO: 52509 - DNA, 870 bp, Zea Mays
gcaggcgcggccgcttataagcggctcctggcccgtgctctaggaacacatcgccgtgcgcgtgcgtccacttcattgctgctcatgtacccctacacgtttcgggcggccgccagcagcagcagcagcagcacggcactcgggttcgcgctcggccggatcggcggcaccacgaggagcggcggcgtcgctgcgccaggcttggtggtacccgccgcgggcgtagcacgcgggaggagcgtctcctcgacgccggccggcagcgcacccgtgccgggcgaccagggcgtcggcatggagcagccgaagcagcagcagcagcagcccaaggtgcccccgcaggacgccgccgggggcgagaacaagcgcgacgacatgcacaagcacaccagggacgtgatgacccactcgttcggggaggggtactcgacgcgctccgacgaggagggcttcggcggggtgtacggcgggaacgaccccgtggaacaccccggcgccgagatccatcctagccactccgggctcggaggtaaaggagaaggagaaggcgcgccacctcaaggacgagaagcatgccaccgcctagaggcgccggcggcgacatcaggcagggctgtcggcgtttagtttagtcgagttcgctttgctcccggcctctgggcgcgtcacgtactcagcgtggttcgctaggctgctttcgaaatactacagtactatccaagtttgctgagatgtaaaaaaaatagtaagctgtttcaaggagcttccgtgctagtacatgttatttctgctctttgcttctatgtaatacaagccacaattattttgcgcctgcaatatacaaacttgagtaactttgcggccctaaca

SEQ ID NO: 52510 - DNA, 954 bp, Zea Mays
ccgtcctcatcctttccgggcttggcatggccgttctccttctcctcagagggcttggcatcgcagcggcgaccgcggatatcgaaatcgggcggcgaagccctagatctgcgacgacggtccgcgtcgacgccgaggaaaggcgagcggggtggacatagggacggggacgcgcggcgcttgcgatggcgcggggagacgtcatcgtggtgattagggcggcggcgcagcggggagacggagttggccgggaccgggaccgggaccgagggtttgctattttctgtggaatctgtgcagctctgctgtatcgcgtaattgcctagtttgcgtttaataatctgcggctctacactcctccagtctccactagcatggttgtatgcctgtattcagccttgccacgttccacgcacggtctccgcgtttggatgaggaggcgtcagagtcagaatgaactagaagcattgggcctgggccacgttccgcgcacggactcctcgttttgggcgcgattggatccttgtattcggcctcggccagggactcctgaccgtagagggcgagaaggcatcgggccaaagaagacgcgcaagatttctagctggtccaggctaagcgtttggctcccaataataaagtttagagtcttatgggctatataatctatacataatatatattataatttttgagattataatttatatgtatctgtttggttacctagattatacgaatacagattatcgatctctgaaacacaaagacaataatattcttggttggagaaggagaagaggaggctggctggatcgttcgaaggagaagaacgacgcccatgacgactgttaagtaaccctagttagtgttatatgggcaaatatcggctttgcccctgaggggtctcacatctctatataaagaacttgtacacccctttatattacagag

SEQ ID NO: 52511 - DNA, 211 bp, Zea Mays
aaaaaggctttgttgttgttgttgttgctgctgccctcttgagttggaacacaacacgaacaagaagcatcttcccaatctcagggaacttggtgttcacaaccgcaaccagcgcaccaaatacatcagtaaacccaggtgaggccatctgtgacttgatgcaagactgacagaagagcccccgcccatgaacaaggttctctgcaaagag

SEQ ID NO: 52512 - DNA, 2736 bp, Zea Mays
catcttcaaaagactctgctcccaggatgcttctctttagattctcatatgccttctcatcttcaacaaaattggggtttgcctagaaaacatttagattggtctcagggtctaggtgatcttcgagggacatctcatgtgtaaactggtcctcctgctccactagatccaactctagacggatggctgggaaaccatggaatttggcctttctaattgcaaaaaggccttcaatcataaatagcactcgcttgtctatttctccttcatgaagaatgcctcgaaatctttcaaaaacagcatgaagcccttgaggagacaagtcctgcagcattgccccacactctttgacaaaccccacagccacctcaacactatcatcagtcggattttacaggagtacagtaagaagctccagcgccaagagttcatgtgccaccacctgatttaccaagtgtgcaatgaatttggttgctgcaagcaattggggcttgtcatttcgcttatatgccctctagttgtggtacacggggactgcaacaaacaagaatggagtaggcgtcttgatcgacaagagccttaaagatggggtagtagatgttaagagggtaggagatagaatcatcctagtcaagctggtcattggggacttggttctcaatgttatcagcgcgtatgctcctcaagtaggccttaatgagaactcaaagagggagttctgggaaggcctggaggacatggttagtagtatgccagttggcgagaagctcttcataggaggagatctcaatggccatgtgggtacatctagcactagtttcgagggtgtgcatggaggcttcggctttgggactaggaatcaaggagaggaaatcctaaactttgccctagcctatgacatgtttatagcaaacactttctttaggaagaggaaatcccacctggtgaccttcagtagtggccaacacactagccagattgattttgtcctcttgaaaaaagaggacatgcatgcctgcttagattgcaaggttatacctggagagtgtgtggtaacccaacataagcttgtcgtagctgactttcgttttaagattcgtttacaacggaataagcataacaaggtcactagaacaaagtggtggaagcttaaaggggatgtggcccaaactttcaaggagagagttatcgaggagggcccttgggcagaagagggagacgcaaatatcatgtggaggaagatggcgatatgcatatgaaagatagcttcagaagagtttgggttgagtcaagaaaacagaagggaagttaaagacacttggtggtggaacgaagatgtccaaaaggctatcaaggagaagaaagattgctacaaacgcttacatcatgacaagtgtgcagaaaacatagagaagtacaggatagcgaagaagtctgcaaagcgagcggttagtagagcccagggtcaagcctatgacgacctttatcaacggttggacacaaagcagggagaaaaggctatctataggatggccaagattcgtgaaaggaagacaagggatgtcaaccaagtcaaatgcatcaaggatgaagcaaaccaactattagtgaagaatgaagagatcaagaacagatggaaggagtacttcaacaaattgttcaatggagggaatgagagttctacaatagaattggatgaaccattcgatgacaacaacatgggttttgtacgaaggatacaagaatataaagttaaggaggcgctaaaaaggatgaaggtaggaaaggcgatgggccctgatggtatccctatcgaggtatggagatgccttggagacataacaatagtatggctgactaagcttttcaacaccatctttcggacaaacagaatgcccgacgagtggcggcggagtacattagtaccaatcttcaagaacaaaggagatgttcaaagttgtattaattatcgtggaattaagctcaagagccatataatgaagctatgggagagagtcattgaacaccgcctgcggaagatgacgagcgtgacccaaaatcagtttggtttcatgcccgggagatcaactatggaggccattttcttactaagacaacttatggagagattcagagaacaaaagaaagacatgcatatggtcttcatagacttggagaaggcttatgacaaagtacctaggagtgtaatgtggtgggccttggaaaaacacaaagtagcaacaaagtacattaatcttattaaagatatgtacactaatgttgtgacaagtgtccgaacaagtgatggagacatcgatgactttccaattaacataggactatatcaagggtcggctttgagcccttatcttttcgctttggtgatagatgaggtcacaagggacatacaaggagatataccgtggtgtatgttttttgccgacgatgtggtacttattgatgagagtaggagtggtgtttcgcaaaagttggaattgtggaggcagacgctggaagcaaaaggttttaggcttagtaggtctaaaacatagtatataaagtgtgatttcagtgtcatggggtatgaggatggcgatgttagtcttgatgggcaagtggtacccaagaaagacacttttcgttacttaggatcaatgcttcagaaggagggagacatcgatgaggatgtcagtcatagaattaaagctggatggttgaagtggcggcaagctgcgg

SEQ ID NO: 52513 - DNA, 3276 bp, Zea Mays
ctttagtaggctttagcgctttgcttttccatcccacccgttttagcgagagctttacaattacacggggccggccttgttaagctgctgctgctgctgttatcgctccgcaaaagcgcgaggagggagagcgccaccacacctctgttcctcggtctccttctcttcctcgctaagcaaccgggcgcagcctgccggcaaaggcgagggcgcgggaagcccgcgttatttattagaataaagaagcacccagcccgcctgtgactgtgagaggccggcgcggagggagtctcatcagatcgtgccctctgtctgtccgtgtgtctgattacgcgtgcgtgcgagggtcagagaggagggagggagggaggggctctggagatgacggggagaagggagcttctgctgcttgcgctcctgggagtccttcagctagctcttcgtctaccttccgcagcgtcgcagtccttcatcggcatcaactacggcgaagtggccgacaacctcccgccgccgtcgtccaccgcgcgcctcgtccagtccacgaccatcaccaaggtgcgcctctacgggaccgacccggccatcatctccgccttctccggcacgggcgtctccctcctcctgggcgccaccaacggcgacatcgccaacctcgcgtcctcgcccgcggccgcggcggcctgggtcgccgcgcacctcccggcctcgtcgccggccgtctccaccgtctccgtcggcaacgaggtcctctttgccgacgcctcgctcgcgtcgcagctcgtcccggccatgcagaacctgcacgacgcgctgccgcccaactccagcgtcaaggtgtccaccgtgaacgccatggacgtgctggcgagctccgacccgccctcctccggcgcgttcaagccggagctcgcggcggcgctcgacccgctgctggcgttcctgagcaagaccggctcgccgttcctcatcaacccgtacccctacttcgcgtacctcagcgacccgcgcccggagacgctggccttctgcctgttccagcccaacgccggccgcccggacgcggggtcgagcctcacgtacaccaacatgttcgacgcgcaggtcgacgccgtgcgcgccgcgctggacgccaaggggtacaaggacgtggacatcgtggtggccgagaccggctggccgcacaagggtgaccccgacgaggccggcgccacggtggagaacgcgcgcgccttcgtgtcgggcctcgtgtcccacctccgctccctgtccggcacgccgcgcgcgcccggcaagtcggtggagacgtacatcttcgccatgtacgacgaggacctcaagcccggcaaggcgtcggagcggtacttcgggctgttccagaccagcctcgccgagacgtacccgacggggttgctcaggaacggcacggccggaccgataccagccacggcgccggctccggcgccaaccacgtccgccgcgacgctgaagccaacgccagggcagcagacacaggtgactccagcgcagcagggctcgacggcggcagctgggccttccggcatctgcaggccggggccagggacggctacgtcgagagggaccactaccgcttgcgcccaacctagtgctgctgaatcgtctcgcgcttcctcgatgctccctatcattgccggttttccggtcatagctttgctgatgtttacatgacctttttttttctttatgcttttttctgcctaatgtattgcgccacctctcgtattctagtacgtgtttcacgatccaagcacagcgtcgagatttaaagtacgataacagcatttgccattgtcactttgttaaaggaatctgaaaagagactcgaaaaaagcaagcgtccaaatgaatacaaatataatgagattcagtgtcaaagaatgatcagctaaagacatacaaaccaagtttggtggtttgttggcacacaaaaacaccaacagaaaggaaccacgtgcatgcaggacatacacaccgcggactgagcaagggcaacaaaaaacaacaatcgcagaccgagtccagtgctgcaagacccaaaactgtttacaaacctcaaaaacaacagcagtaacaattgtattcacgctcctgagtgtgaaactggtgaagtggtgaactgcccatccttgaaactatggatgtactgttgaggcaatgcatgctccacctataatacgacaactcaagttacgtgcgagcgtttgatagttacagaaacagagatatgtcagcgtcagtgccaatcgatcctgagttactgactcacaagtctaggatgctaattaaataaagaaaagataaaacctgacaccaaaattgctaattaaattgccgagttaaatgctatgcgtgcgtataacaagtactaacacctcacataacatgcaaaaaaaaactactggtaccgcagtgacaaagaatgtgaacaattgtgtggtggcctggtgggggaggtaacatattgtcatattctagcatcttaaatctcgcatggcatcgatctataatccaaacaggttcaggcaatagacttaggatctatttggttcagctacagctgtggtgtgagttgacaattatgaaaaagatgaaaattgtttggtttaaaacaactgtcaactataaataatgtaaaaactacaggttatgtaaaagcgatagacgttgcgtcatcgcctgaagcatcgccatcaccgaacgtcaaagtgagggctaggacggcactgagaggggcaatgtcagatgcagacgggtgacatggatgttgggtgatggaagcgttgaagggtcgacgaggaagagctgtgacaatttagggatgaccgagccacgtaccgaccgctaaagttggacgcagggaggcggttcaaccctagccgccgcaggaaggtgctatcaggtgagagtcgagtcggaaaaagggacttctaatagaaaagaaacgatttgatactataacaatgtcaggtggataatatttgggaaaaaaatggatgataagaatatgaaaaatctgagatgggaagagattctggattgaactagagaaccccttagtaatccactttatttctgtgtacactagaaagttaagataatatatatcagtaatcagtattcgcatatcagtggtatattgatatataatcatctatgggcctaaaagctctgcaaaatgtaacaatgtaacatattgccaaaattcttttctttcaaccctttgttactacgtta

SEQ ID NO: 52514 - DNA, 3034 bp, Zea Mays
gctatgggtacccgacgccacgtccccgcaacttcacaacgaacagcagaggtaggagagtaaggagaggaggaagagcactgccagtgctaggggcagtcggcaggcgcggcgcgttcccctcagtccccttccccggctggtcttgccgggagtaaggggaacgaagccaccggcgcggcatggagcccaagccgtcttcggcggcgcatgctgacgcgccagcggtcgaggccccccgccgccgtggcggcggcggcaagcgcaagtcggccgggtcctcgttcacgccgtcgaagcgtcaggccaaggagcggaacgcttccttccacgtgcccccgcatcttctgcacagcgggccgctcacccgcgccgcgcgccagtcgccgcacaagctctcgggcacgccgtcggagtcggtgccagcgtcgtcggcggccgcaactggggacggggtgagcggcgggcaggcggtggttgatgcgatccggcccgagacagaggaaacgccggccccggagctgccgctggtagacgagatgttcgaggccgtccgatcccgtggcgctggcgtccatgtggtccctacctttgctggatggttttcgtggaaagaaatccacccagttgagaagcagaccttgccttctttttttaatggaaaatctgagaagcggacacctgagctggagtccaaagacctggctgagttgtcaatcggggagaccgatgctcggcaggaaatcttggaattcttggatcactggggcttgataaatttccaccctttcccaccagatggacatgaggagagtaagccagaggagacccaagacaattctaatgacgagaaagcttctttgatcgagcaactgtttaagtttgaatcagttcaatcatatatgacgcctttaccaatgaaagaagatgtgagagctccgcctcctctgcctagcttgattcctgaatctgtactcattcaagatgtggttgcagcagctgagccttctgttgagtaccactgcaattcctgttcagttgattgctcacggaagcgctatcattgtcggacccaggcagattttgacctctgttgtgattgctataatgaagggaaatttgatccaggcatggccaaaaccgatttcatcctcatggattctgcaggagtttcaggtgctagtggtactagttggacagatgaggaaacattacttctattagaaggtttggaaatttttggtggaaaatgggctgagattgctgaacatgttgctactaagacaaaagcacaatgcatgttgcactttcttcaaatgcaaattgaagaccgcttccatgatggcaaagatattaatcaaaacatcccagtaagtacagatcaagccacaactgagaaagccattgctgaaacatctgagaaaatggaagttgaagataaagtggaaggaagaggtactgtggatgaaaaggcctcagagaaaacagagggaaactgtgaagaaacaaaaactgaaaatgccagtgttgttgtaaataaagatactcagaattcagatggcagagattcaggtgcatctccaagcactgaagagccaaagcaatcttctgatgagcaacctgtagtaaaggaaaattctgcagatgtagatacttctggtgaaaaactatcaaatgttgctattgatatcttaaaatctgcatttgaggctactggtcacagcccagaatatgaaggttcatttgcggatgcaggaaatccagttatggcactagcagcgtatttagctggtcttgtggaagatgataacaccaccacttcattccgtagttcactaaaatctgtatctgatgtgtctcctgcactccaattatcaagtaggcactgttttattcttgaggatccgccagatgaactcaaagacatttgtgctagtgtaagtaagaaaaatagagatggtgatcaaaaacaagatgaggatatgattcaaaattcaattgataccgagaaaaaagagatcaatgagaaagaaggtaagtctttatctgtggaaaagaaaaacaattcatccatgtcacaaaatgaccaccaagaatcaggcattaagagcgtctcaagtgatgattgctccttagtggagccaaaaaccaataatgctaaggagtcaggtgattcaactgctattggggacaagagtgcaaccgaaactacaaaaggtaatactgaacaagtgaatgacttgccaagtgttgaggtggaggctcctgatgattcatcttcaaaaggtaaggatgagctcaataagactaaagatgcagtggcgacaccagctaccgtacaggaacagaaacacagccaaacattgggaaatggggatagggaagaacctaacaacattgaaagtgtagttgtcggtgaagagaagggctctgtagtgactgccaaccgacctgattccatagctaggctcaaaagagcagcagctactgctgtttcagcagctgctgtgaaagctaggtttctcggtgatcaggaggaatatcaaattcgaaggctgacagcacttgtaatcgaaaagctgttccaaaaaatagaagtgaagatgtcattgttttcagagattgagcaggtggtctttcgaacgagagagtacaccgagaagaccagaaagaagctcctgaaggaacgaaatgcgattattgcagctcggatgggcgcattgccgtctaggccaaaccagacaggtgtagccggaaacaggttaccacctggactgtcggactcatgagcattagtccgacgaacctattcacaggttatgatgatcatgctttccctggcattctacatggagctggcagatcatttgcatgggtctgctgaccctttctaaggagctcaggacatcaattactatccaacaacctaaagtgatgttgggtgcatcccaaaagaacaagacgctgtcgagagagaagcaaaaggagaaggtcgagggatccgttagctcggattccaagtcctacaaggaga

SEQ ID NO: 52515 - DNA, 3012 bp, Zea Mays
atggagcccaagccgtcttcggcggcgcatgctgacgcgccagcggtcgaggccccccgccgccgtggcggcggcggcaagcgcaagtcggccgggtcctcgttcacgccgtcgaagcgtcaggccaaggagcggaacgcttccttccacgtgcccccgcatcttctgcacagcgggccgctcacccgcgccgcgcgccagtcgccgcacaagctctcgggcacgccgtcggagtcggtgccagcgtcgtcggcggccgcaactggggacggggtgagcggcgggcaggcggtggttgatgcgatccggcccgagacagaggaaacgccggccccggagctgccgctggtagacgagatgttcgaggccgtccgatcccgtggcgctggcgtccatgtggtccctacctttgctgctggagtccaaagacctggctgagttgtcaatcggggagaccgatgctcggcaggaaatcttggaattcttggatcactggggcttgataaatttccaccctttcccaccagatggacatgaggagagtaagccagaggagacccaagacaattctaatgacgagaaagcttctttgatcgagcaactgtttaagtttgaatcagttcaatcatatatgacgcctttaccaatgaaagaagatgtgagagctccgcctcctctgcctagcttgattcctgaatctgtactcattcaagatgtggttgcagcagctgagccttctgttgagtaccactgcaattcctgttcagttgattgctcacggaagcgctatcattgtcggacccaggcagattttgacctctgttgtgattgctataatgaagggaaatttgatccaggcatggccaaaaccgatttcatcctcatggattctgcaggagtttcaggtgctagtggtactagttggacagatgaggaaacattacttctattagaaggtttggaaatttttggtggaaaatgggctgagattgctgaacatgttgctactaagacaaaagcacaatgcatgttgcactttcttcaaatgcaaattgaagaccgcttccatgatggcaaagatattaatcaaaacatcccagtaagtacagatcaagccacaactgagaaagccattgctgaaacatctgagaaaatggaagttgaagataaagtggaaggaagaggtactgtggatgaaaaggcctcagagaaaacagagggaaactgtgaagaaacaaaaactgaaaatgccagtgttgttgtaaataaagatactcagaattcagatggcagagattcaggtgcatctccaagcactgaagagccaaagcaatcttctgatgagcaacctgtagtaaaggaaaattctgcagatgtagatacttctggtgaaaaactatcaaatgttgctattgatatcttaaaatctgcatttgaggctactggtcacagcccagaatatgaaggttcatttgcggatgcaggaaatccagttatggcactagcagcgtatttagctggtcttgtggaagatgataacaccaccacttcattccgtagttcactaaaatctgtatctgatgtgtctcctgcactccaattatcaagtaggcactgttttattcttgaggatccgccagatgaactcaaagacatttgtgctagtgtaagtaagaaaaatagagatggtgatcaaaaacaagatgaggatatgattcaaaattcaattgataccgagaaaaaagagatcaatgagaaagaaggtaagtctttatctgtggaaaagaaaaacaattcatccatgtcacaaaatgaccaccaagaatcaggcattaagagcgtctcaagtgatgattgctccttagtggagccaaaaaccaataatgctaaggagtcaggtgattcaactgctattggggacaagagtgcaaccgaaactacaaaaggtaatactgaacaagtgaatgacttgccaagtgttgaggtggaggctcctgatgattcatcttcaaaaggtaaggatgagctcaataagactaaagatgcagtggcgacaccagctaccgtacaggaacagaaacacagccaaacattgggaaatggggatagggaagaacctaacaacattgaaagtgtagttgtcggtgaagagaagggctctgtagtgactgccaaccgacctgattccatagctaggctcaaaagagcagcagctactgctgtttcagcagctgctgtgaaagctaggtttctcggtgatcaggaggaatatcaaattcgaaggctgacagcacttgtaatcgaaaagctgttccaaaaaatagaagtgaagatgtcattgttttcagagattgagcaggtggtctttcgaacgagagagtacaccgagaagaccagaaagaagctcctgaaggaacgaaatgcgattattgcagctcggatgggcgcattgccgtctaggccaaaccagacaggtgtagccggaaacaggttaccacctggactgtcggactcatgagcattagtccgacgaacctattcacaggttatgatgatcatgctttccctggcattctacatggagctggcagatcatttgcatgggtctgctgaccctttctaaggaatgtcagctccatggtgttcaccgccaagaccgacgagcgtcgactactcatcgacttctactacatcctcgtgctaaagaactctatcattagtttgggacaactcgatagatcgactatggtgtcttgcacgtctagattaggggtaaaaacgattagaatatatctcgttctgttttgctctggtttctacattgacctattcaaattcgtatttatggacactatgaccattcttgtttatttgaaaatgtaaaaataggacggaaacagtatgagtgtttttcctaccgttttcacttctcgttttagtcaggattgaaaggaaaacatgctttaagccattttttagatgagtttaggtgtttgatgaccatcacattat

SEQ ID NO: 52516 - DNA, 4078 bp, Zea Mays
aggagagtaaggagaggaggaagagcactgccagtgctaggggcagtcggcaggcgcggcgcgttcccctcagtccccttccccggctggtcttgccgggagtaaggggaacgaagccaccggcgcggcatggagcccaagccgtcttcggcggcgcatgctgacgcgccagcggtcgaggccccccgccgccgtggcggcggcggcaagcgcaagtcggccgggtcctcgttcacgccgtcgaagcgtcaggccaaggagcggaacgcttccttccacgtgcccccgcatcttctgcacagcgggccgctcacccgcgccgcgcgccagtcgccgcacaagctctcgggcacgccgtcggagtcggtgccagcgtcgtcggcggccgcaactggggacggggtgagcggcgggcaggcggtggttgatgcgatccggcccgagacagaggaaacgccggccccggagctgccgctggtagacgagatgttcgaggccgtccgatcccgtggcgctggcgtccatgtggtccctacctttgctggatggttttcgtggaaagaaatccacccagttgagaagcagaccttgccttctttttttaatggaaaatctgagaagcggacacctgagctggagtccaaagacctggctgagttgtcaatcggggagaccgatgctcggcaggaaatcttggaattcttggatcactggggcttgataaatttccaccctttcccaccagatggacatgaggagagtaagccagaggagacccaagacaattctaatgacgagaaagcttctttgatcgagcaactgtttaagtttgaatcagttcaatcatatatgacgcctttaccaatgaaagaagatcagctgagccttctgttgagtaccactgcaattcctgttcagttgattgctcacggaagcgctatcattgtcggacccaggcagattttgacctctgttgtgattgctataatgaagggaaatttgatccaggcatggccaaaaccgatttcatcctcatggattctgcaggagtttcaggtgctagtggtactagttggacagatgaggaaacattacttctattagaaggtttggaaatttttggtggaaaatgggctgagattgctgaacatgttgctactaagacaaaagcacaatgcatgttgcactttcttcaaatgcaaattgaagaccgcttccatgatggcaaagatattaatcaaaacatcccagtaagtacagatcaagccacaactgagaaagccattgctgaaacatctgagaaaatggaagttgaagataaagtggaaggaagaggtactgtggatgaaaaggcctcagagaaaacagagggaaactgtgaagaaacaaaaactgaaaatgccagtgttgttgtaaataaagatactcagaattcagatggcagagattcaggtgcatctccaagcactgaagagccaaagcaatcttctgatgagcaacctgtagtaaaggaaaattctgcagatgtagatacttctggtgaaaaactatcaaatgttgctattgatatcttaaaatctgcatttgaggctactggtcacagcccagaatatgaaggttcatttgcggatgcaggaaatccagttatggcactagcagcgtatttagctggtcttgtggaagatgataacaccaccacttcattccgtagttcactaaaatctgtatctgatgtgtctcctgcactccaattatcaagtaggcactgttttattcttgaggatccgccagatgaactcaaagacatttgtgctagtgtaagtaagaaaaatagagatggtgatcaaaaacaagatgaggatatgattcaaaattcaattgataccgagaaaaaagagatcaatgagaaagaaggtaagtctttatctgtggaaaagaaaaacaattcatccatgtcacaaaatgaccaccaagaatcaggcattaagagcgtctcaagtgatgattgctccttagtggagccaaaaaccaataatgctaaggagtcaggtgattcaactgctattggggacaagagtgcaaccgaaactacaaaaggtaatactgaacaagtgaatgacttgccaagtgttgaggtggaggctcctgatgattcatcttcaaaaggtaaggatgagctcaataagactaaagatgcagtggcgacaccagctaccgtacaggaacagaaacacagccaaacattgggaaatggggatagggaaggtacttcatctgcttttttctctcataaaactctctatatgaattatgaaaccaataaagggtaaccacacattttcactcggtttcaattagagcttctttatgtttgctgccttttctatagctcttggcttttattgaaagggcggagttattaattcctaacctggaggtgactatttgcttactcaattacatttacagctgtgactgattcacaaattaggcatattgctgacatttactggctagggttccttattttacaatatatctattgcaatttgctagcatgacatttgattgagtttcatccaagcggaagtagatatattcagaataagggggtgtttgaaagtaattttagaggtttgagataaaaccatggtattggagaatactatagtattttttccaagagatgtttggatatcttgtaaaaaaaaactctgttttgaataccatagtttagtagttacaattataattttttggagtatttaaaactccactacaacctgaagtttttgtctatgagactgactagcttcttgcacatgtatactaaataccatgatttgagatactttgtctccaaacaagtattatttggttatttggtgtgatgtaaaaaatactatggttgtgctataatattttaaaaccatagtattctaaaaccgtggtttgaaatactctgcttccaaacatgtcctaagccttgctagttgctacactagtaccgcgtgtgtgttttttttcctgattgaccagctcaccagcatgagagtaaatatttttgatgttctgtgttacgtattccctcaatcctgctaaaggtgtttgtgataaattgcattgccccttatccattttcagttgactctctttttctatatattgtctatcttgcagaacctaacaacattgaaagtgtagttgtcggtgaagagaagggctctgtagtgactgccaaccgacctgattccatagctaggctcaaaagagcagcagctactgctgtttcagcagctgctgtgaaagctaggtttctcggtgatcaggaggaatatcaaattcgaaggctgacagcacttgtaatcgaaaagctgttccaaaaaatagaagtgaagatgtcattgttttcagagattgagcaggtggtctttcgaacgagagagtacaccgagaagaccagaaagaagctcctgaaggaacgaaatgcgattattgcagctcggatgggcgcattgccgtctaggccaaaccagacaggtgtagccggaaacaggttaccacctggactgtcggactcatgagcattagtccgacgaacctattcacaggttatgatgatcatgctttccctggcattctacatggagctggcagatcatttgcatgggtctgctgaccctttctaaggaatgtcagctccatggtgttcaccgccaagaccgacgagcgtcgactactcatcgacttctactacatcctcgtgctaaagaactctatcattagtttgggacaactcgatagatcgactatggtgtcttgcacgtctagattaggggtaaaaacgattagaatatatctcgttctgttttgctctggtttctacattgacctattcaaattcgtatttatggacactatgaccattcttgtttatttgaaaatgtaaaaataggacggaaacagtatgagtgtttttcctaccgttttcacttctcgttttagtcaggattgaaaggaaaacatgctttaagccattttttagatgagtttaggtgtttgatgaccatcacattat

SEQ ID NO: 52517 - DNA, 3285 bp, Zea Mays
aggagagtaaggagaggaggaagagcactgccagtgctaggggcagtcggcaggcgcggcgcgttcccctcagtccccttccccggctggtcttgccgggagtaaggggaacgaagccaccggcgcggcatggagcccaagccgtcttcggcggcgcatgctgacgcgccagcggtcgaggccccccgccgccgtggcggcggcggcaagcgcaagtcggccgggtcctcgttcacgccgtcgaagcgtcaggccaaggagcggaacgcttccttccacgtgcccccgcatcttctgcacagcgggccgctcacccgcgccgcgcgccagtcgccgcacaagctctcgggcacgccgtcggagtcggtgccagcgtcgtcggcggccgcaactggggacggggtgagcggcgggcaggcggtggttgatgcgatccggcccgagacagaggaaacgccggccccggagctgccgctggtagacgagatgttcgaggccgtccgatcccgtggcgctggcgtccatgtggtccctacctttgctggatggttttcgtggaaagaaatccacccagttgagaagcagaccttgccttctttttttaatggaaaatctgagaagcggacacctgaggtatatttggcggttagaaattcgatcatgatgaaatttcatgccaatcctcaattgcagctggagtccaaagacctggctgagttgtcaatcggggagaccgatgctcggcaggaaatcttggaattcttggatcactggggcttgataaatttccaccctttcccaccagatggacatgaggagagtaagccagaggagacccaagacaattctaatgacgagaaagcttctttgatcgagcaactgtttaagtttgaatcagttcaatcatatatgacgcctttaccaatgaaagaagatgtgagagctccgcctcctctgcctagcttgattcctgaatctgtactcattcaagatgtggttgcagcagctgagccttctgttgagtaccactgcaattcctgttcagttgattgctcacggaagcgctatcattgtcggacccaggcagattttgacctctgttgtgattgctataatgaagggaaatttgatccaggcatggccaaaaccgatttcatcctcatggattctgcaggagtttcaggtgctagtggtactagttggacagatgaggaaacattacttctattagaaggtttggaaatttttggtggaaaatgggctgagattgctgaacatgttgctactaagacaaaagcacaatgcatgttgcactttcttcaaatgcaaattgaagaccgcttccatgatggcaaagatattaatcaaaacatcccagtaagtacagatcaagccacaactgagaaagccattgctgaaacatctgagaaaatggaagttgaagataaagtggaaggaagaggtactgtggatgaaaaggcctcagagaaaacagagggaaactgtgaagaaacaaaaactgaaaatgccagtgttgttgtaaataaagatactcagaattcagatggcagagattcaggtgcatctccaagcactgaagagccaaagcaatcttctgatgagcaacctgtagtaaaggaaaattctgcagatgtagatacttctggtgaaaaactatcaaatgttgctattgatatcttaaaatctgcatttgaggctactggtcacagcccagaatatgaaggttcatttgcggatgcaggaaatccagttatggcactagcagcgtatttagctggtcttgtggaagatgataacaccaccacttcattccgtagttcactaaaatctgtatctgatgtgtctcctgcactccaattatcaagtaggcactgttttattcttgaggatccgccagatgaactcaaagacatttgtgctagttaagaaaaatagagatggtgatcaaaaacaagatgaggatatgattcaaaattcaattgataccgagaaaaaagagatcaatgagaaagaaggtaagtctttatctgtggaaaagaaaaacaattcatccatgtcacaaaatgaccaccaagaatcaggcattaagagcgtctcaagtgatgattgctccttagtggagccaaaaaccaataatgctaaggagtcaggtgattcaactgctattggggacaagagtgcaaccgaaactacaaaaggtaatactgaacaagtgaatgacttgccaagtgttgaggtggaggctcctgatgattcatcttcaaaaggtaaggatgagctcaataagactaaagatgcagtggcgacaccagctaccgtacaggaacagaaacacagccaaacattgggaaatggggatagggaagaacctaacaacattgaaagtgtagttgtcggtgaagagaagggctctgtagtgactgccaaccgacctgattccatagctaggctcaaaagagcagcagctactgctgtttcagcagctgctgtgaaagctaggtttctcggtgatcaggaggaatatcaaattcgaaggctgacagcacttgtaatcgaaaagctgttccaaaaaatagaagtgaagatgtcattgttttcagagattgagcaggtggtctttcgaacgagagagtacaccgagaagaccagaaagaagctcctgaaggaacgaaatgcgattattgcagctcggatgggcgcattgccgtctaggccaaaccagacaggtgtagccggaaacaggttaccacctggactgtcggactcatgagcattagtccgacgaacctattcacaggttatgatgatcatgctttccctggcattctacatggagctggcagatcatttgcatgggtctgctgaccctttctaaggaatgtcagctccatggtgttcaccgccaagaccgacgagcgtcgactactcatcgacttctactacatcctcgtgctaaagaactctatcattagtttgggacaactcgatagatcgactatggtgtcttgcacgtctagattaggggtaaaaacgattagaatatatctcgttctgttttgctctggtttctacattgacctattcaaattcgtatttatggacactatgaccattcttgtttatttgaaaatgtaaaaataggacggaaacagtatgagtgtttttcctaccgttttcacttctcgttttagtcaggattgaaaggaaaacatgctttaagccattttttagatgagtttaggtgtttgatgaccatcacattat

SEQ ID NO: 52518 - DNA, 2879 bp, Zea Mays
agaggaggaagagcactgccagtgctaggggcagtcggcaggcgcggcgcgttcccctcagtccccttccccggctggtcttgccgggagtaaggggaacgaagccaccggcgcggcatggagcccaagccgtcttcggcggcgcatgctgacgcgccagcggtcgaggccccccgccgccgtggcggcggcggcaagcgcaagtcggccgggtcctcgttcacgccgtcgaagcgtcaggccaaggagcggaacgcttccttccacgtgcccccgcatcttctgcacagcgggccgctcacccgcgccgcgcgccagtcgccgcacaagctctcgggcacgccgtcggagtcggtgccagcgtcgtcggcggccgcaactggggacggggtgagcggcgggcaggcggtggttgatgcgatccggcccgagacagaggaaacgccggccccggagctgccgctggtagacgagatgttcgaggccgtccgatcccgtggcgctggcgtccatgtggtccctacctttgctggatggttttcgtggaaagaaatccacccagttgagaagcagaccttgccttctttttttaatggaaaatctgagaagcggacacctgagatggacatgaggagagtaagccagaggagacccaagacaattctaatgacgagaaagcttctttgatcgagcaactgtttaagtttgaatcagttcaatcatatatgacgcctttaccaatgaaagaagatgtgagagctccgcctcctctgcctagcttgattcctgaatctgtactcattcaagatgtggttgcagcagctgagccttctgttgagtaccactgcaattcctgttcagttgattgctcacggaagcgctatcattgtcggacccaggcagattttgacctctgttgtgattgctataatgaagggaaatttgatccaggcatggccaaaaccgatttcatcctcatggattctgcaggagtttcaggtgctagtggtactagttggacagatgaggaaacattacttctattagaaggtttggaaatttttggtggaaaatgggctgagattgctgaacatgttgctactaagacaaaagcacaatgcatgttgcactttcttcaaatgcaaattgaagaccgcttccatgatggcaaagatattaatcaaaacatcccagtaagtacagatcaagccacaactgagaaagccattgctgaaacatctgagaaaatggaagttgaagataaagtggaaggaagaggtactgtggatgaaaaggcctcagagaaaacagagggaaactgtgaagaaacaaaaactgaaaatgccagtgttgttgtaaataaagatactcagaattcagatggcagagattcaggtgcatctccaagcactgaagagccaaagcaatcttctgatgagcaacctgtagtaaaggaaaattctgcagatgtagatacttctggtgaaaaactatcaaatgttgctattgatatcttaaaatctgcatttgaggctactggtcacagcccagaatatgaaggttcatttgcggatgcaggaaatccagttatggcactagcagcgtatttagctggtcttgtggaagatgataacaccaccacttcattccgtagttcactaaaatctgtatctgatgtgtctcctgcactccaattatcaagtaggcactgttttattcttgaggatccgccagatgaactcaaagacatttgtgctagtgtaagtaagaaaaatagagatggtgatcaaaaacaagatgaggatatgattcaaaattcaattgataccgagaaaaaagagatcaatgagaaagaaggcattaagagcgtctcaagtgatgattgctccttagtggagccaaaaaccaataatgctaaggagtcaggtgattcaactgctattggggacaagagtgcaaccgaaactacaaaaggtaatactgaacaagtgaatgacttgccaagtgttgaggtggaggctcctgatgattcatcttcaaaaggtaaggatgagctcaataagactaaagatgcagtggcgacaccagctaccgtacaggaacagaaacacagccaaacattgggaaatggggatagggaagaacctaacaacattgaaagtgtagttgtcggtgaagagaagggctctgtagtgactgccaaccgacctgattccatagctaggctcaaaagagcagcagctactgctgtttcagcagctgctgtgaaagctaggtttctcggtgatcaggaggaatatcaaattcgaaggctgacagcacttgtaatcgaaaagctgttccaaaaaatagaagtgaagatgtcattgttttcagagattgagcaggtggtctttcgaacgagagagtacaccgagaagaccagaaagaagctcctgaaggaacgaaatgcgattattgcagctcggatgggcgcattgccgtctaggccaaaccagacaggtgtagccggaaacaggttaccacctgggtatggcaaccctcctgtaaggcctccaaacgcaatgcctcggcccaccagctgaggaaattccggattccggacacccagtgatctataccccattcttttagaagcataccccaaagactcaaacctgccagcttgttgtagcattttttagaaagtacattgtacaattgtctgtataactgcttctatgaaaattcaccaaacctccacaactgttttaaacattccatcagataggaaaattccatttctctacaatgaacagcccacttgaccgttagcaagattatttctgctcaatttactaaaatagaatgctatatatctgctcaaagtttacttgcct

SEQ ID NO: 52519 - DNA, 979 bp, Zea Mays
agaggaggaagagcactgccagtgctaggggcagtcggcaggcgcggcgcgttcccctcagtccccttccccggctggtcttgccgggagtaaggggaacgaagccaccggcgcggcatggagcccaagccgtcttcggcggcgcatgctgacgcgccagcggtcgaggccccccgccgccgtggcggcggcggcaagcgcaagtcggccgggtcctcgttcacgccgtcgaagcgtcaggccaaggagcggaacgcttccttccacgtgcccccgcatcttctgcacagcgggccgctcacccgcgccgcgcgccagtcgccgcacaagctctcgggcacgccgtcggagtcggtgccagcgtcgtcggcggccgcaactggggacggggtgagcggcgggcaggcggtggttgatgcgatccggcccgagacagaggaaacgccggccccggagctgccgctggtagacgagatgttcgaggccgtccgatcccgtggcgctggcgtccatgtggtccctacctttgctggatggttttcgtggaaagaaatccacccagttgagaagcagaccttgccttctttttttaatggaaaatctgagaagcggacacctgagctggagtccaaagacctggctgagttgtcaatcggggagaccgatgctcggcaggaaatcttggaattcttggatcactggggcttgataaatttccaccctttcccaccagatggacatgaggagagtaagccagaggagacccaagacaattctaatgacgagaaagcttctttgatcgagcaactgtttaagtttgaatcagttcaatcatatatgacgcctttaccaatgaaagaagatcagctgagccttctgttgagtaccactgcaattcctgttcagttgattgctcacggaagcgctatcattgtcggacccagattcagtataagtgtcacatgttacagtatgcgga

SEQ ID NO: 52520 - DNA, 2969 bp, Zea Mays
atgtctaatgaagccagccgggtgttgtacgagactagaggacaagaaggggaagcttggggtgcttgtctcggtaaagcgatgtggccagagaaagttgagaggaagaagagagaggaggagctaggccgacgcacgaccatgtatcgtatcccctacaaagttaggtgtcatgacaaggcaaatgatgctaaatcgtcgatcaacgggtggttggccaaccgtgttaagctggtcggcgcgatagttcgatttagctatgccaaagaaattgaaacagttaaacggccaaccttcaggtttgcaatcaccggtgcgcaacaacaaaccggtgagctgtggaaaatgaattgggtacggatatcggtgcagtcgcacagagtctttcccgggcgactattgctatctttggttcggattcactcgtcttggaaatcagcctgtggtgataaacagcggaaggaaacagtttgcgatcagatagcgaactataaataaatgaaaagaaaaaaactatgcttaagaataaacggcaatatacgagcattttctcttgtcgcaatgcattttctgaatttctgttcctgctgctgaagcccccttgtgatgcttagatgaagttcagttgtacatttaaggtacatgactaatgatagaatagctgccacccaaaactaaagctacaggcccctttagaatgtgggaattttttcatacgtttttcttattaaaatgagctgattcctgtgaaattgtgtataattcctccgaaattcctgcattctaagggagacctacattcgctcgttcttttgagagtaaacatgcatactggaataagcaatggatgaaaagaatattggggaaaaactaggtccaaccgtccaggctgatccctgctcttcagtatttctgctgttctgcacttcagattcttgaccagagctttctgaacttctggttatctgtatgaatactagcagggtttttttttctttttcagtttctccattcaatatttcaattggattaaaaatgagaactgaaattagaaatatggatgatggatttacatattctctatggtgaagaggagcaagacttcacaatcttatttctctcggcgtgttggtccagatcgagagacaactcaagcccatcttatggccatgtttgttttagcttatttgctgattcaaatcacaagaagttattgtaagctgccaaacgtccaacttttcagttagcttctatgagaatcgttttagtttaagccgttcaaagttaatgtgaacacataatcaaccgtgtcgtcgcgatagtaaaaatccaccactttctagatcctaaactctgtacccattcatcttcctccgcacataatacctatgatactcagattctcttctacagccagattcttagaaaagctcatcagagaaaagctgaaacaaacaggccatatgtgtatcgtacaactttcttagattatctccagcagattccatatcccatctactattttaaacttcactctacaaatagaattaaacaatattatctacatttccgcgtcccctattttacactgtttattggagacagtcttaggaggtgtttggtttttaggaacaaatttttagtccctccatttttttagtctctaaattgacaattacataaactaattccatatttaataatttagggactaaaacggaataaaatagagaaactaaagattattccatagaaaccaaacaccctctagcaattttagtccaatcatttgatcaattaaaaaatttatctacgtcttagttatttttgtttgtgatattaatggtcacatgttggatagggtattaagagcatctccaaaaaagcctctaaatatggtcatattttaaatataggattcaaaatcataaaacatccttccaacagcggccctattttataaaatttcattaaacgtttatagggctcgatctgtcggatcctaaatagagtacccatatactaaaaccctatcttcgtttccacataatcattaaccatttatttcctgacaacatgatttatttccttaatagcatttttaaggcatggctgttggagtagacgtttcttttgaaatcctaaacattctaagggcccgtttggcaaagctccagctcctgcttctttagctctagatcttatcctcgtgaggagctgatcctcttgattctcctagaaaatcagaatcatttttaaaaccggttggcaagtaaactgattcttgtcttctgagagttggtggtctgtggcgattgtctgttttactctttgcagttcaactttattacaaaccaataagtaggatgcatatacggaaaaaaatatgaaacaataacatataaaatattcccatcatagtaatgcataaaatggtctcaaatgtttaatccataaattggctcgttatgtttttgtccaatggcaattgcgggtaatttcgatcaaactttaagtggaggtccatatttggttggttgaggagctgttttaagggagggtggagcgggtttttttagatctcacctttcttcacaaaaacgacttccgatctttcggcttcacacgggaatcagtttaaaaaaatacccgtttggcacggctcctccagatcctcgcttagaatcaggagctggagctgtgccaaacgggccctaaatatggttctattttaaattttaggactctattttagggtttgttgttcgagagatatatagaatgggtagttttcactgctaaaccgacaacaaaaatcatctcaatcaacctgaaaccaccaatcactgaacgctcacatgcacccaaaaggtccgcactcccgtttgtagctttgtgaactagtggatccagaaagaaattttcaacagggcccaggaccatgatctaataacacatgtaacttggag

SEQ ID NO: 52521 - DNA, 714 bp, Zea Mays
gcggctgaggtgaggcgccggacgggcgctcccccgctctggcaacgaggacgtggccgtggagcgggcggcagttaggctggcagtagtaacccaggagcgagaacccctctgggacgccgaccggccggtaaaaggtggcgctgccgccgccgccacgccgccgcgacgacagggtgcagatcttctggaacgcggtggccgcggcgagctccagctcccctccgccgatacgtatcctcccccgcgcgaatcccccgcctggcagaatgcggcgccggatcgattaaacaatctagcggccacacatttcgcgagttggtggtgggggtggattgatgggcagtcacaacaatcacaacacggacgcagatgcacgatcccaaatccaaccgaaggagaggaggagatgcatcgccagtctcctccactcacctgtgggccacgacgggaggggctcggcgaaggagaagacctccggctccggctcctcgggggggacgcgcccgcccacgcggacgtcgctgcccgagaagcagctgtcccaccgccggcgcatcgcgcgcgctggctttgccggattgatccgcagaagaaggtgccggttaggtacgaacgggatggccggatgggctctgcgctgaacggccgggtgacacacgtctcatggactcaccagcgacggcaagcaccaccacgatccgggacgccccg

SEQ ID NO: 52522 - DNA, 589 bp, Zea Mays
gcgcaggataccgcacaacgttggatgccctaattcctgcttctactgttctgaaacagagagacttgagaggctggggatgatcctgtgactgctttcatcgcttcttctgaagcagcattagctgccgctgaatccaccaaacaaatgcaagcaaaggctggacggtcatcatacatagcaccgcatctcctggcttcaatccctgatcctggagcaatggctgcagctgcatatggtacagagtcgctgcccttgcagcgaagaacaaactgcacacacagttcaaagagctagtagcatatgatgtgcattgttgctagacccaaaataggctgacaggaaaaaatcaccggggcattttctcactccccatagatttggtttccgcctgtgcttttgcatgggccgagaaaaacgactccaatattgtttcgtccttcttcacatcatacaaagagatgttcgaagagtttgtagacggttaacagtagagaagctgtaagcagggacacaaccttcttagcttctcctccagtggtggaaggatgcgccggcggaaccctcagctcccggccgtgcggcttcc

SEQ ID NO: 52523 - DNA, 1151 bp, Zea Mays
aggggaagtcggcgtcgtcgtcgtcgtcgtcgtcgtcggtggttctgcgggtgccggccgggtcgcccatggtcgccgcgcggaggcaggcttccgcgcggagggaggtagccatgcgccgggcgcgggaggccgggcgggagtacgagctcatccccaccgctcgcggcgagacgctcttcacgcagtgctggtggccgcgcccgtcctccaccgttaaaccaagggcgctagttgttgtcatgcacgggctaaacgagcacagtgggaggtacgatcatttagcgaggcgattgaatgatatcggcatcaaggtgtacgggatggactggactggtcatggtggaagtgatggtctacatggatatgtgcaatctcttgaccacgctgtcaatgacttgaaaatgtacctcaagaaagtgtcagccgagaaccctggtcttccatgcttctgcttcggccattcgacgggtgggggtatcattctgaaggctgcacttgatccagacgtagaaacgctcatcagcggtgttgtcctgacatcaccagctgtccgtgttcagcctgcccacccaatcatagcggccatggcaccgatttttgccctgatcgcgccaaggtaccagttgacggcgtcgcacaggaacggcccgccggtgtcgcgcgacccggaagccctgcgggccaaatacgcggaccagctggtgttcacgggcgccatccgcgtgaggacgggctacgagatcctccgcctgacgtcgtacctgcagccgcacctgcagcgggtcgcggtgccgctgctggtgatgcacggcgccgacgacctggtgacggaccccgagggctcgagggcgctgtacgagcgggcctcgtccgcggacaagtccctcaggctctaccacgggctgctgcacgacctcctgatcgagcccgagaaggacagggtgatggacgacatcgtggcgtggctgagccgcagggtgtgatgcgttgcggtgctggccgtaggtttcgcgcggcttcgatcgtctgctgagcgcggaggacctgcaggcggaagacgaagacgcctcgcctctggacggtgatgacgcggtctggtcggctgcggaggtttgacattctctgcaaggctgcgtatgcaagcttaa

SEQ ID NO: 52524 - DNA, 1273 bp, Zea Mays
ggactttgtgcagtgcatattttgccattggctacttttttttgggagcatttgctgatagtctgtgaacttctgaaggcaaatctgtacgagtttcagaaattcaacagagaatcagggggtgaggtttacttcacaatgccaagactgcagtcaatagctattcagtgtctggaggcgctgcagtttctgcatggtctcggtctaatccactgtgatttgaagccagaaaacatattggtaaagagctacagcagatgtgaaataaaagtaattgatcttgggagcagctgttttgagactgatcatctatgttcatatgtgcaatcacgatcttaccgtgcacctgaggttatactgggcttgccttatgacaaaaagatagatatatggtcacttggttgtatattagcagaactttgcactggaaatgttcttttccaaaacgattcgcctgcaacattacttgctcgtgtgatgggcatcattggcgccatagaacaagctatgcttgcacagggacgggacaccttcaaatatttcactaagaaccacatgttatatgaaagaaatcaggaaagtaacaggcttgaatacttgattccgaaaaagacatccttgcggtaccgcttgcccatggctgatcaagggtttatcgagttcgttgcgtgccttctagaggtgaacccgaagaagcgcccaagtgcctcagaagcattgaaacatccatggctttcttttccttacgagccaatatcttcatgacacaaattgctattggatcctgggtggcttaacatatgcgacaacacctaagcaccatgaaattttggtagatcaaggcgaaagattttctaccacggctgagccatggcaaacccagattcggtttgatcacgcgtggtgccacaatcagctggtctttgacgctgtgtgcaatcaatccatgccctgtgttgcgcttgtaatataactttattttttttttctctttctagccccgatgtaacaggccattttgttttttaggtactttgtgatgcatttttagcaatagggctgtcatgttgtacatggtgtgatcattgttgaactccgtgccatgctgtgcacatgttagggttctaacccaagcccagaatgtcattcattgcattgccaggtctttaggagattgccttccgtgcttgtctgtgaaacagcttacaagttttacttgccttttctggttgacatcttgccatctagagtttatatatacgatgtatctggg

SEQ ID NO: 52525 - DNA, 1251 bp, Zea Mays
aagctgttgacatcaggatggaagagcatttgctgatagtctgtgaacttctgaaggcaaatctgtacgagtttcagaaattcaacagagaatcagggggtgaggtttacttcacaatgccaagactgcagtcaatagctattcagtgtctggaggcgctgcagtttctgcatggtctcggtctaatccactgtgatttgaagccagaaaacatattggtaaagagctacagcagatgtgaaataaaagtaattgatcttgggagcagctgttttgagactgatcatctatgttcatatgtgcaatcacgatcttaccgtgcacctgaggttatactgggcttgccttatgacaaaaagatagatatatggtcacttggttgtatattagcagaactttgcactggaaatgttcttttccaaaacgattcgcctgcaacattacttgctcgtgtgatgggcatcattggcgccatagaacaagctatgcttgcacagggacgggacaccttcaaatatttcactaagaaccacatgttatatgaaagaaatcaggaaagtaacaggcttgaatacttgattccgaaaaagacatccttgcggtaccgcttgcccatggctgatcaagggtttatcgagttcgttgcgtgccttctagaggtgaacccgaagaagcgcccaagtgcctcagaagcattgaaacatccatggctttcttttccttacgagccaatatcttcatgacacaaattgctattggatcctgggtggcttaacatatgcgacaacacctaagcaccatgaaattttggtagatcaaggcgaaagattttctaccacggctgagccatggcaaacccagattcggtttgatcacgcgtggtgccacaatcagctggtctttgacgctgtgtgcaatcaatccatgccctgtgttgcgcttgtaatataactttattttttttttctctttctagccccgatgtaacaggccattttgttttttaggtactttgtgatgcatttttagcaatagggctgtcatgttgtacatggtgtgatcattgttgaactccgtgccatgctgtgcacatgttagggttctaacccaagcccagaatgtcattcattgcattgccaggtctttaggagattgccttccgtgcttgtctgtgaaacagcttacaagttttacttgccttttctggttgacatcttgccatctagagtttatatatacgatgtatctggg

SEQ ID NO: 52526 - DNA, 2829 bp, Zea Mays
gtatgttgctagtgagttcaatagggatatggtacttctatttgcttggtggaaggcgtacaattggcagtagttggctgtctgtcagtcagggtattacagaagatacctcgggttttgcaagacttgatgatgattcacttgaatatccaattggtgaatactgggattccgatgagtatgatgacgatgacgatgtaggctacacccgacaaccaattgaggatgaaacctggtttttagcacatgagattgattatcctagcgacaatgagaaggcaaccgaccacacaagagggcctgatcgtcatgatcgccctacaaaggatgaagatgatgaccagtcatttgttgaggaagattcctacatatccggtgagcaatattttcatggaaagaatattgcacaaataggtacttctgagggtccaatggtcaatgggattcctgataatgatatgatagctcagtatgatgggcaacttttagatcctgaagagcttaatttgatgcattctgaaccagcctggcagggctttgtattgcagaacagtgaactaggtatgttagggaatgggaaattccttaatgattctgaacgacctcatcctgatgacccttttgtggaggatgatcagcatggctctgttaggtcaattggtgttgggataagcagtgatgctgctgacattggcagtgaggtgcgagaaagtctgattggaggtagtagtgagggggatattgaatatttcaatgagagcagcttgagtgttagtggaaagagacattctcagcaggatcctgaaaagaagagagtaggtgctaaaggagtaaaacatgaccaaatcaattacgctgctggtatccagaagggtaatctactgccaggagcggctgatggtggattttcttttcctccacctttgcattctgtgaaaaatcatgactctgatactaaaactttgtggtcaaagaaggatgaaatgtattgcattaacgatctggatgattgccaaaatggcgtggcatcagatgatatgcttgctacatggaagaaaaagaatagtgagtcttctcttaggagctctagagatgaaatgacatctgatgttgttagatcaagaaattcaagtccatcgtatggcgaaacagaggacacaacgaatgttcggcgtcacaaactagatgacgcacaagaagacactggaaccaacttggatgatgaggaagcagcagcattgcaagagcaagtcaggcagataaaggtgcaggaggaagagtttgaaactttcaatcttaagattgtgcatagaaaaaacagaactggctttgaagaagacaaaaatttccatgttgttctcaattctgtcattgctgggcgttatcatgtatcagagtatttggggtcagctgctttcagcaaagccatccaggcacatgatttgcacacaggaatggatgtatgtgttaaaattataaaaaataacaaagattttttcgaccagagccttgatgagatcaagcttctgaagtatgttaacaagcatgatcctggtgacaagtaccaccttttgcgtctgtatgattacttctactatcgggagcatttgctgatagtctgtgaacttctgaaggcaaatctgtacgagtttcagaaattcaacagagaatcagggggtgaggtttacttcacaatgccaagactgcagtcaatagctattcagtgtctggaggcgctgcagtttctgcatggtctcggtctaatccactgtgatttgaagccagaaaacatattggtaaagagctacagcagatgtgaaataaaagtaattgatcttgggagcagctgttttgagactgatcatctatgttcatatgtgcaatcacgatcttaccgtgcacctgaggttatactgggcttgccttatgacaaaaagatagatatatggtcacttggttgtatattagcagaactttgcactggaaatgttcttttccaaaacgattcgcctgcaacattacttgctcgtgtgatgggcatcattggcgccatagaacaagctatgcttgcacagggacgggacaccttcaaatatttcactaagaaccacatgttatatgaaagaaatcaggaaagtaacaggcttgaatacttgattccgaaaaagacatccttgcggtaccgcttgcccatggctgatcaagggtttatcgagttcgttgcgtgccttctagaggtgaacccgaagaagcgcccaagtgcctcagaagcattgaaacatccatggctttcttttccttacgagccaatatcttcatgacacaaattgctattggatcctgggtggcttaacatatgcgacaacacctaagcaccatgaaattttggtagatcaaggcgaaagattttctaccacggctgagccatggcaaacccagattcggtttgatcacgcgtggtgccacaatcagctggtctttgacgctgtgtgcaatcaatccatgccctgtgttgcgcttgtaatataactttattttttttttctctttctagccccgatgtaacaggccattttgttttttaggtactttgtgatgcatttttagcaatagggctgtcatgttgtacatggtgtgatcattgttgaactccgtgccatgctgtgcacatgttagggttctaacccaagcccagaatgtcattcattgcattgccaggtctttaggagattgccttccgtgcttgtctgtgaaacagcttacaagttttacttgccttttctggttgacatcttgccatctagagtttatatatacgatgtatctggg

SEQ ID NO: 52527 - DNA, 4534 bp, Zea Mays
ccctttctttgcctctctctctctccctgggtattggggctctctccgttctcgcgtacgcacaccaccacctcgaatatgctgaccccagccgcgccggccgcgccctgacagcccccacccgatgcgccttccccgcctccgccgccgctgccacgccgctgccggatccgctcccgctcggccgccgtccgctctcggcggcgacgggtcccgctgacctcatcgtgcttgccccgcctccatctcgcgccggcgtgggttgcggcgacggccagtagggttccggggcttccgcctcgcggtcccctcccccgaggatccgcgccttcccctacggggcgcgcgttgcgcttagggtgtgggttgccttggtcttctcagcttggttgcggtcgcgcggtttcgaggagctccacggaagcttgatttgtcaggggggcttttcgaggcagaggcaccgatctgcggctgccggcgccgcggcattgggccacttcctaagcccccgagcgcccggagcttcgttcggatcggctggtctgggagctgggccgcaacaaatcagctcttcttcggcctcactgtaagcatttcttcgcagaggttctcgctcgtttctgggctagttgatattggagggaaacatgccggagaacattgatctggtgcttgagttcctgcggaagaaccggttcgccaaggcagaggcagctctccgtggggagctcaccggctgcgccgattcgaacggcatgaccgtgcagaggtgtgtcgctgagctgaaagaagacgacgagcaggaggacttggtgagctccaatggagggcccaacggtgctgtgacagagaggagtgcggactcatcgagggagttcatcgtgaaggaggttgatgttggagccctgccgaacggtttggatggaaagaagggctccgggattggccagcctcaggagaacaacgtgggggatctgtatccttggaccttcagcatagcaaacagcacggcagaacagctagctgagctgctggtgtcggaggaggtgccaagacataggcgtgctgcgatgttggcagagaagagggatcgaggcgttgggactgaacagcctggcccattgctggagcaaaaagtctcttctggaagagggaaaggaaaagttgatgctgctgggagaactgcaatcaatgaacagggtcattccagggataaaaatctagtaccagaaaaggaggagatgttaaatggttgcacagttaagacagtgcttccattccctggggaaaacccgtcatctagttacaatagcacgcaccatgaaaacgagaggaaagaggtaaggaggagcattaatgcagatggtgttggaaaaggggcaaaaggacatttcgacgaggggaacagacaaaattacttcgaaaaatccctagatacagatcaggtgtctgaccgatgcttcgatttacagcttgttggagataatcagcgtgaggagcttccaaagttacctcctgtgaggctcaagtccgaagataagctagtcaacatgaactgggaggacaagatcaatcaccatggatctggagccaagcaatctagtgctgatcatgcctttatgattgggtcttatctcgatgttcccattgggcaagacataacatcttcaggtggaaggcgtacaattggcagtagttggctgtctgtcagtcagggtattacagaagatacctcgggttttgcaagacttgatgatgattcacttgaatatccaattggtgaatactgggattccgatgagtatgatgacgatgacgatgtaggctacacccgacaaccaattgaggatgaaacctggtttttagcacatgagattgattatcctagcgacaatgagaaggcaaccgaccacacaagagggcctgatcgtcatgatcgccctacaaaggatgaagatgatgaccagtcatttgttgaggaagattcctacatatccggtgagcaatattttcatggaaagaatattgcacaaataggtacttctgagggtccaatggtcaatgggattcctgataatgatatgatagctcagtatgatgggcaacttttagatcctgaagagcttaatttgatgcattctgaaccagcctggcagggctttgtattgcagaacagtgaactaggtatgttagggaatgggaaattccttaatgattctgaacgacctcatcctgatgacccttttgtggaggatgatcagcatggctctgttaggtcaattggtgttgggataagcagtgatgctgctgacattggcagtgaggtgcgagaaagtctgattggaggtagtagtgagggggatattgaatatttcaatgagagcagcttgagtgttagtggaaagagacattctcagcaggatcctgaaaagaagagagtaggtgctaaaggagtaaaacatgaccaaatcaattacgctgctggtatccagaagggtaatctactgccaggagcggctgatggtggattttcttttcctccacctttgcattctgtgaaaaatcatgactctgatactaaaactttgtggtcaaagaaggatgaaatgtattgcattaacgatctggatgattgccaaaatggcgtggcatcagatgatatgcttgctacatggaagaaaaagaatagtgagtcttctcttaggagctctagagatgaaatgacatctgatgttgttagatcaagaaattcaagtccatcgtatggcgaaacagaggacacaacgaatgttcggcgtcacaaactagatgacgcacaagaagacactggaaccaacttggatgatgaggaagcagcagcattgcaagagcaagtcaggcagataaaggtgcaggaggaagagtttgaaactttcaatcttaagattgtgcatagaaaaaacagaactggctttgaagaagacaaaaatttccatgttgttctcaattctgtcattgctgggcgttatcatgtatcagagtatttggggtcagctgctttcagcaaagccatccaggcacatgatttgcacacaggaatggatgtatgtgttaaaattataaaaaataacaaagattttttcgaccagagccttgatgagatcaagcttctgaagtatgttaacaagcatgatcctggtgacaagtaccaccttttgcgtctgtatgattacttctactatcggatgtggaccgacgatgagcaaatgcggaaatgatcatgcctgcacgtgttcttgaaggagctgttccacgtctatcagttgggagcatttgctgatagtctgtgaacttctgaaggcaaatctgtacgagtttcagaaattcaacagagaatcagggggtgaggtttacttcacaatgccaagactgcagtcaatagctattcagtgtctggaggcgctgcagtttctgcatggtctcggtctaatccactgtgatttgaagccagaaaacatattggtaaagagctacagcagatgtgaaataaaagtaattgatcttgggagcagctgttttgagactgatcatctatgttcatatgtgcaatcacgatcttaccgtgcacctgaggttatactgggcttgccttatgacaaaaagatagatatatggtcacttggttgtatattagcagaactttgcactggaaatgttcttttccaaaacgattcgcctgcaacattacttgctcgtgtgatgggcatcattggcgccatagaacaagctatgcttgcacagggacgggacaccttcaaatatttcactaagaaccacatgttatatgaaagaaatcaggaaagtaacaggcttgaatacttgattccgaaaaagacatccttgcggtaccgcttgcccatggctgatcaagggtttatcgagttcgttgcgtgccttctagaggtgaacccgaagaagcgcccaagtgcctcagaagcattgaaacatccatggctttcttttccttacgagccaatatcttcatgacacaaattgctattggatcctgggtggcttaacatatgcgacaacacctaagcaccatgaaattttggtagatcaaggcgaaagattttctaccacggctgagccatggcaaacccagattcggtttgatcacgcgtggtgccacaatcagctggtctttgacgctgtgtgcaatcaatccatgccctgtgttgcgcttgtaatataactttattttttttttctctttctagccccgatgtaacaggccattttgttttttaggtactttgtgatgcatttttagcaatagggctgtcatgttgtacatggtgtgatcattgttgaactccgtgccatgctgtgcacatgttagggttctaacccaagcccagaatgtcattcattgcattgccaggtctttaggagattgccttccgtgcttgtctgtgaaacagcttacaagttttacttgccttttctggttgacatcttgccatctagagtttatatatacgatgtatctggg

SEQ ID NO: 52528 - DNA, 5472 bp, Zea Mays
caaacagcactgcgaatcggcgttccccctccctcgcctcgatccggtcccgcgtgacaccaaacgagctggaacgggattacggggagaaaggagagagagatagaaaaaaacatttcccatttccctttctttgcctctctctctctccctgggtattggggctctctccgttctcgcgtacgcacaccaccacctcgaatatgctgaccccagccgcgccggccgcgccctgacagcccccacccgatgcgccttccccgcctccgccgccgctgccacgccgctgccggatccgctcccgctcggccgccgtccgctctcggcggcgacgggtcccgctgacctcatcgtgcttgccccgcctccatctcgcgccggcgtgggttgcggcgacggccagtagggttccggggcttccgcctcgcggtcccctcccccgaggatccgcgccttcccctacggggcgcgcgttgcgcttagggtgtgggttgccttggtcttctcagcttggttgcggtcgcgcggtttcgaggagctccacggaagcttgatttgtcaggggggcttttcgaggcagaggcaccgatctgcggctgccggcgccgcggcattgggccacttcctaagcccccgagcgcccggagcttcgttcggatcggctggtctgggagctgggccgcaacaaatcagctcttcttcggcctcactgtaagcatttcttcgcagaggttctcgctcgtttctgggctagttgatattggagggaaacatgccggagaacattgatctggtgcttgagttcctgcggaagaaccggttcgccaaggcagaggcagctctccgtggggagctcaccggctgcgccgattcgaacggcatgaccgtgcagaggtgtgtcgctgagctgaaagaagacgacgagcaggaggacttggtgagctccaatggagggcccaacggtgctgtgacagagaggagtgcggactcatcgagggagttcatcgtgaaggaggttgatgttggagccctgccgaacggtttggatggaaagaagggctccgggattggccagcctcaggagaacaacgtgggggatctgtatccttggaccttcagcatagcaaacagcacggcagaacagctagctgagctgctggtgtcggaggaggtgccaagacataggcgtgctgcgatgttggcagagaagagggatcgaggcgttgggactgaacagcctggcccattgctggagcaaaaagtctcttctggaagagggaaaggaaaagttgatgctgctgggagaactgcaatcaatgaacagggtcattccagggataaaaatctagtaccagaaaaggaggagatgttaaatggttgcacagttaagacagtgcttccattccctggggaaaacccgtcatctagttacaatagcacgcaccatgaaaacgagaggaaagaggtaaggaggagcattaatgcagatggtgttggaaaaggggcaaaaggacatttcgacgaggggaacagacaaaattacttcgaaaaatccctagatacagatcaggtgtctgaccgatgcttcgatttacagcttgttggagataatcagcgtgaggagcttccaaagttacctcctgtgaggctcaagtccgaagataagctagtcaacatgaactgggaggacaagatcaatcaccatggatctggagccaagcaatctagtgctgatcatgcctttatgattgggtcttatctcgatgttcccattgggcaagacataacatcttcaggtggaaggcgtacaattggcagtagttggctgtctgtcagtcagggtattacagaagatacctcgggttttgcaagacttgatgatgattcacttgaatatccaattggtgaatactgggattccgatgagtatgatgacgatgacgatgtaggctacacccgacaaccaattgaggatgaaacctggtttttagcacatgagattgattatcctagcgacaatgagaaggcaaccgaccacacaagagggcctgatcgtcatgatcgccctacaaaggatgaagatgatgaccagtcatttgttgaggaagattcctacatatccggtgagcaatattttcatggaaagaatattgcacaaataggtacttctgagggtccaatggtcaatgggattcctgataatgatatgatagctcagtatgatgggcaacttttagatcctgaagagcttaatttgatgcattctgaaccagcctggcagggctttgtattgcagaacagtgaactaggtatgttagggaatgggaaattccttaatgattctgaacgacctcatcctgatgacccttttgtggaggatgatcagcatggctctgttaggtcaattggtgttgggataagcagtgatgctgctgacattggcagtgaggtgcgagaaagtctgattggaggtagtagtgagggggatattgaatatttcaatgagagcagcttgagtgttagtggaaagagacattctcagcaggatcctgaaaagaagagagtaggtgctaaaggagtaaaacatgaccaaatcaattacgctgctggtatccagaagggtaatctactgccaggagcggctgatggtggattttcttttcctccacctttgcattctgtgaaaaatcatgactctgatactaaaactttgtggtcaaagaaggatgaaatgtattgcattaacgatctggatgattgccaaaatggcgtggcatcagatgatatgcttgctacatggaagaaaaagaatagtgagtcttctcttaggagctctagagatgaaatgacatctgatgttgttagatcaagaaattcaagtccatcgtatggcgaaacagaggacacaacgaatgttcggcgtcacaaactagatgacgcacaagaagacactggaaccaacttggatgatgaggaagcagcagcattgcaagagcaagtcaggcagataaaggtgcaggaggaagagtttgaaactttcaatcttaagattgtgcatagaaaaaacagaactggctttgaagaagacaaaaatttccatgttgttctcaattctgtcattgctgggcgttatcatgtatcagagtatttggggtcagctgctttcagcaaagccatccaggcacatgatttgcacacaggaatggatgtatgtgttaaaattataaaaaataacaaagattttttcgaccagagccttgatgagatcaagcttctgaagtatgttaacaagcatgatcctggtgacaagtaccaccttttgcgtctgtatgattacttctactatcgggtaagtttgagcttttactcttgatagatcatttttcagtgttatttaattttgctcaactgttgaatttgtcacaactccactgcttgctggcatgtgtaatctcaaatgagtcgatgaagtagtaattagtaaatactaatgttgcattatcgtatgtttgaaattctaccaattcaatacatgtcttgtgctccacgcctccacccttagctgttaaagcggatgtttcttgaattacatgatttggtatgtaatgtatatatacatttctccctcttgaatatcaacagccattttttgttgtgtgccacaacatttgatagatcacagactctggatattgaagtcacatgttaggattagcctgaggtgatccgttagaatggctaccagtgtttacaagccatgattactcatgattaatcgtcctaatcagtccctggtgatcgacttggggtaccgaggtgattagttcggtcagaaagctaatctcccgattagttatcgattaatcgtcttactaggacaggggcaaccagtttggttggtcctgtttaaccggacctacatgtagcctattgggcttgtcatttggcctgttagggttataataggaaggcacaacttgggaggcacgaacaacaggggagggcaagaggcatgcagggacagccacaatttctcccgcgatcccccccccccccccccccccccggcttgctattcccttcctggtgagctgttagctgtcgccgccctgtaccagtgcaagtgcctgccggttcttcgtgatgagctcctccgacgatgatgtggaccgacgatgagcaaatgcggaaatgatcatgcctgcacgtgttcttgaaggagctgttccacgtctatcagttgggagcatttgctgatagtctgtgaacttctgaaggcaaatctgtacgagtttcagaaattcaacagagaatcagggggtgaggtttacttcacaatgccaagactgcagtcaatagctattcagtgtctggaggcgctgcagtttctgcatggtctcggtctaatccactgtgatttgaagccagaaaacatattggtaaagagctacagcagatgtgaaataaaagtaattgatcttgggagcagctgttttgagactgatcatctatgttcatatgtgcaatcacgatcttaccgtgcacctgaggttatactgggcttgccttatgacaaaaagatagatatatggtcacttggttgtatattagcagaactttgcactggaaatgttcttttccaaaacgattcgcctgcaacattacttgctcgtgtgatgggcatcattggcgccatagaacaagctatgcttgcacagggacgggacaccttcaaatatttcactaagaaccacatgttatatgaaagaaatcaggaaagtaacaggcttgaatacttgattccgaaaaagacatccttgcggtaccgcttgcccatggctgatcaagggtttatcgagttcgttgcgtgccttctagaggtgaacccgaagaagcgcccaagtgcctcagaagcattgaaacatccatggctttcttttccttacgagccaatatcttcatgacacaaattgctattggatcctgggtggcttaacatatgcgacaacacctaagcaccatgaaattttggtagatcaaggcgaaagattttctaccacggctgagccatggcaaacccagattcggtttgatcacgcgtggtgccacaatcagctggtctttgacgctgtgtgcaatcaatccatgccctgtgttgcgcttgtaatataactttattttttttttctctttctagccccgatgtaacaggccattttgttttttaggtactttgtgatgcatttttagcaatagggctgtcatgttgtacatggtgtgatcattgttgaactccgtgccatgctgtgcacatgttagggttctaacccaagcccagaatgtcattcattgcattgccaggtctttaggagattgccttccgtgcttgtctgtgaaacagcttacaagttttacttgccttttctggttgacatcttgccatctagagtttatatatacgatgtatctggg

SEQ ID NO: 52529 - DNA, 3587 bp, Zea Mays
ccctttctttgcctctctctctctccctgggtattggggctctctccgttctcgcgtacgcacaccaccacctcgaatatgctgaccccagccgcgccggccgcgccctgacagcccccacccgatgcgccttccccgcctccgccgccgctgccacgccgctgccggatccgctcccgctcggccgccgtccgctctcggcggcgacgggtcccgctgacctcatcgtgcttgccccgcctccatctcgcgccggcgtgggttgcggcgacggccagtagggttccggggcttccgcctcgcggtcccctcccccgaggatccgcgccttcccctacggggcgcgcgttgcgcttagggtgtgggttgccttggtcttctcagcttggttgcggtcgcgcggtttcgaggagctccacggaagcttgatttgtcaggggggcttttcgaggcagaggcaccgatctgcggctgccggcgccgcggcattgggccacttcctaagcccccgagcgcccggagcttcgttcggatcggctggtctgggagctgggccgcaacaaatcagctcttcttcggcctcactgtaagcatttcttcgcagaggttctcgctcgtttctgggctagttgatattggagggaaacatgccggagaacattgatctggtgcttgagttcctgcggaagaaccggttcgccaaggcagaggcagctctccgtggggagctcaccggctgcgccgattcgaacggcatgaccgtgcagaggtgtgtcgctgagctgaaagaagacgacgagcaggaggacttggtgagctccaatggagggcccaacggtgctgtgacagagaggagtgcggactcatcgagggagttcatcgtgaaggaggttgatgttggagccctgccgaacggtttggatggaaagaagggctccgggattggccagcctcaggagaacaacgtgggggatctgtatccttggaccttcagcatagcaaacagcacggcagaacagctagctgagctgctggtgtcggaggaggtgccaagacataggcgtgctgcgatgttggcagagaagagggatcgaggcgttgggactgaacagcctggcccattgctggagcaaaaagtctcttctggaagagggaaaggaaaagttgatgctgctgggagaactgcaatcaatgaacagggtcattccagggataaaaatctagtaccagaaaaggaggagatgttaaatggttgcacagttaagacagtgcttccattccctggggaaaacccgtcatctagttacaatagcacgcaccatgaaaacgagaggaaagaggtaaggaggagcattaatgcagatggtgttggaaaaggggcaaaaggacatttcgacgaggggaacagacaaaattacttcgaaaaatccctagatacagatcaggtgtctgaccgatgcttcgatttacagcttgttggagataatcagcgtgaggagcttccaaagttacctcctgtgaggctcaagtccgaagataagctagtcaacatgaactgggaggacaagatcaatcaccatggatctggagccaagcaatctagtgctgatcatgcctttatgattgggtcttatctcgatgttcccattgggcaagacataacatcttcaggtggaaggcgtacaattggcagtagttggctgtctgtcagtcagggtattacagaagatacctcgggttttgcaagacttgatgatgattcacttgaatatccaattggtgaatactgggattccgatgagtatgatgacgatgacgatgtaggctacacccgacaaccaattgaggatgaaacctggtttttagcacatgagattgattatcctagcgacaatgagaaggcaaccgaccacacaagagggcctgatcgtcatgatcgccctacaaaggatgaagatgatgaccagtcatttgttgaggaagattcctacatatccggtgagcaatattttcatggaaagaatattgcacaaataggtacttctgagggtccaatggtcaatgggattcctgataatgatatgatagctcagtatgatgggcaacttttagatcctgaagagcttaatttgatgcattctgaaccagcctggcagggctttgtattgcagaacagtgaactaggtatgttagggaatgggaaattccttaatgattctgaacgacctcatcctgatgacccttttgtggaggatgatcagcatggctctgttaggtcaattggtgttgggataagcagtgatgctgctgacattggcagtgaggtgcgagaaagtctgattggaggtagtagtgagggggatattgaatatttcaatgagagcagcttgagtgttagtggaaagagacattctcagcaggatcctgaaaagaagagagtaggtgctaaaggagtaaaacatgaccaaatcaattacgctgctggtatccagaagggtaatctactgccaggagcggctgatggtggattttcttttcctccacctttgcattctgtgaaaaatcatgactctgatactaaaactttgtggtcaaagaaggatgaaatgtattgcattaacgatctggatgattgccaaaatggcgtggcatcagatgatatgcttgctacatggaagaaaaagaatagtgagtcttctcttaggagctctagagatgaaatgacatctgatgttgttagatcaagaaattcaagtccatcgtatggcgaaacagaggacacaacgaatgttcggcgtcacaaactagatgacgcacaagaagacactggaaccaacttggatgatgaggaagcagcagcattgcaagagcaagtcaggcagataaaggtgcaggaggaagagtttgaaactttcaatcttaagattgtgcatagaaaaaacagaactggctttgaagaagacaaaaatttccatgttgttctcaattctgtcattgctgggcgttatcatgtatcagagtatttggggtcagctgctttcagcaaagccatccaggcacatgatttgcacacaggaatggatgtatgtgttaaaattataaaaaataacaaagattttttcgaccagagccttgatgagatcaagcttctgaagtatgttaacaagcatgatcctggtgacaagtaccaccttttgcgtctgtatgattacttctactatcggatcacagactctggatattgaagtcacatgttaggattagcctgaggtgatccgttagaatggctaccagtgtttacaagccatgattactcatgattaatcgtcctaatcagtccctggtgatcgacttggggtaccgaggtgattagttcggtcagaaagctaatctcccgattagttatcgattaatcgtcttactaggacaggggcaaccagtttggttggtcctgtttaaccggacctacatgtagcctattgggcttgtcatttggcctgttagggttataataggaaggcacaacttgggaggcacgaacaacaggggagggcaagaggcatgcagggacagccacaatttctccc

SEQ ID NO: 52530 - DNA, 4130 bp, Zea Mays
cagacttccctggagaagggggaaacggcgcagttaagcaggagtggtacctggtgtttttttgtttttcaaaaagaagacagaaatgtcttcctcgaggcctgcccactcttcaagttcatccagcaggactcgccagagctcccgggcaaggatattagcacaaacaacccttgatgctgaactcaatgcagagtacgaagaatctggtgattcctttgattactccaagttggttgaagcacagcggagcactccacctgagcagcaagggcgatcgggaaaggtcatagcctacttgcagcatattcaaagaggaaagcttatccaaccatttggttgcctgttggcccttgacgagaagagcttcagggtcattgcattcagtgagaatgcacctgaaatgcttacaacggtcagccatgctgtgccgaacgttgatgatcccccgaagctaggaattggcaccaatgtgcgatcccttttcactgaccctggtgctacagcactgcagaaggcacttggatttgctgatgtttctttgctgaatcctatcctggttcagtgcaagacctcaggcaagccattctatgccattgttcatagggcaactggttgtctggtggtagattttgagcctgtgaagcctacagaatttcctgccactgctgctggggctttgcagtcctacaagcttgctgccaaggcaatctccaagatccagtcactaccaggtggaagcatggaggccttatgcaataccgtggttaaggaagtctttgacctgacaggttatgacagggttatggcttacaagttccatgaagatgagcatggggaggtcttcgctgagatcaccaaacctggtattgagccctatataggcctgcactatccagccactgatatccctcaagctgccaggtttctcttcatgaagaacaaagtcagaatgatctgtgattgccgtgcaagatccgtgaagattattgaagatgaggcactctccattgatattagcttgtgtggttcaactcttagagcaccacatagctgtcaccttaagtatatggagaacatgaactcgattgcatcccttgtcatggctgttgtggtcaatgaaaatgaagaggatgatgaacccgagcctgaacaaccaccacaacagcagaagaagaagaggctgtggggtctcattgtttgccaccatgagagccccagatatgtccctttcccactgcggtatgcctgtgaattcttggcccaagtgtttgctgtccatgtaaacaaggagtttgaattggagaagcagatacgagagaaaaacattctgcgaatgcaaacaatgctctctgacatgctgttcaaggaatcatctcccttgagtatcgtgtctgggagtccaaatatcatggacctagttaagtgtgatggcgctgctcttttgtatggggacaaagtatggcggcttcaaacggctccaaccgagtctcagattcgtgatattgccttctggctttcagaagttcatggggattccactggcttgagtactgatagcctccaggatgctggatatccaggagctgcttcccttggtgacatgatttgtggaatggcagtggccaagatcacgtccaaggacattcttttctggttcaggtcacatacagctgctgaaatcaaatggggaggtgcaaagcatgatccatctgataaggatgacaacagaaggatgcaccctaggttatcctttaaggctttccttgaggttgtcaagacgaagagtttgccatggagtgactacgagatggatgctattcactcattgcagcttattcttagaggtacactgaatgatgcctcgaagccggcccaggcatctggtttagataaccagatcggtgatctaaaacttgatgggcttgctgaattgcaagcagtgacaagtgaaatggtccgcctgatggaaacagcaactgttccgatcttggcagtagatggcaatggattggtcaatggatggaaccaaaaggtagcggagttgtcagggctgagagttgatgaggctataggaagacacatacttacacttgtggaggattcttctgtatcacttgttcagaggatgctatatttagctctgcaaggcagagaagagaaggaagttcgatttgagctgaaaacacatggctccaagagggatgatggccctgttatcttggtcgtaaatgcttgtgccagtcgtgatcttcatgaccatgttgttggggtgtgctttgtagcccaggacatgactgttcacaagttggtcatggacaaatttactcgggtcgagggggactacaaggcaatcatccacaacccgaacccactcattcctcctatatttggtgctgaccagtttggatggtgctctgagtggaatgcagccatgaccaagcttaccgggtggcacagagatgaagtggttgataagatgctccttggcgaggtttttaacagcagcaatgcttcctgccttctgaagagcaaagatgcctttgtacgtctttgcattgtcatcaacagcgcattagctggtgaagaggcagaaaaggcttcattcggcttctttgaccgcaatgagaaatatgtcgaatgccttctgtcggtgaacaggaaagtaaatgcagatggtgttgtcactggagtgttctgtttcatccatgttcctagtgatgacctgcagcatgcgctacatgtgcagcaagcctctgagcagacagcacaaagaaagttgaaggctttctcgtacatgcgacatgccatcaacaaacctctctcaggtatgctttattctagggaaacactcaagagcacaggtctgaatgaagagcagatgaggcaggttcgcgtcggagacaattgccatcgccagctaaacaagatacttgccgacttggatcaagataacatcactgacaagtcaagctgcttggatttggatatggctgaatttgtgttgcaagatgtggtggtgtctgctgtaagtcaagtgctgataggttgccaggctaaaggtatcagagttgcttgcaacctgccagagagatccatgaagcaaaaggtttacggggatggtatccgactccagcagatcgtctctgacttcctatttgtttcggtgaagttctctcctgctggtggctctgttgacatctcttccaagctgactaagaacagcattggggaaaaccttcacctcatagacttcgaacttaggatcaagcaccgaggagcaggagtcccagcggaaatattgtcgcaaatgtatgaggaggacaataaagagcagtcagaggagggcttcagccttgctgtttctagaaaccttctgaggctcatgaatggtgacattcgtcacctcagggaagctggcatgtcaaccttcattctcactgctgaacttgctgctgctccttcagcagttggacgatgagggcaaactgcaacaagtgtcaaatgctctctcagagttcattcggaaagccacggtggtttgcggagaatgagaaatgttggagcggcgtgtaggatcaccgaatgcatagtatttgcaaattgcaactctctagctgcacaaaggaatcggcgacaggtgcggcttgcgaccaagcatttcacagatttagcaagaaggtatccaaggggagggcatccgtaccatatgcgcaggccggaaccagagctcgaagactcggagctgtctcagtagctagcggtagcaggcggcctccaccctcccgccacctccatgccgtcgctgcggtgcatctcccctgttggatctctcaagtctcacattcttcgcattcccgtgcggagctaggggacggcgaagccgttggtggtttactgctggatacgctgacgtcgctgcggcggtgtcataaaggcggattcggccctcggatgaccgccgccgccccgcaaccgtcaggcgccagcagaaccggccacggtgaggagtcttttggggaaaaaaatacacaccgaggatttttttaagcctagttagaaacccatttttacatgttatttccatttttttaacggagcctttagacccatttattttaaagtaattg

SEQ ID NO: 52531 - DNA, 3934 bp, Zea Mays
cccacaaggcccccgctatttatgcgcacttgcttgccgggagactgggagagttgtgtcgccggcggaggtgggcgtccgtcctcccgttccaccagagctcactgcttcgctccacccaccggccaccaccccgagtggtacctggtgtttttttgtttttcaaaaagaagacagaaatgtcttcctcgaggcctgcccactcttcaagttcatccagcaggactcgccagagctcccgggcaaggatattagcacaaacaacccttgatgctgaactcaatgcagagtacgaagaatctggtgattcctttgattactccaagttggttgaagcacagcggagcactccacctgagcagcaagggcgatcgggaaaggtcatagcctacttgcagcatattcaaagaggaaagcttatccaaccatttggttgcctgttggcccttgacgagaagagcttcagggtcattgcattcagtgagaatgcacctgaaatgcttacaacggtcagccatgctgtgccgaacgttgatgatcccccgaagctaggaattggcaccaatgtgcgatcccttttcactgaccctggtgctacagcactgcagaaggcacttggatttgctgatgtttctttgctgaatcctatcctggttcagtgcaagacctcaggcaagccattctatgccattgttcatagggcaactggttgtctggtggtagattttgagcctgtgaagcctacagaatttcctgccactgctgctggggctttgcagtcctacaagcttgctgccaaggcaatctccaagatccagtcactaccaggtggaagcatggaggccttatgcaataccgtggttaaggaagtctttgacctgacaggttatgacagggttatggcttacaagttccatgaagatgagcatggggaggtcttcgctgagatcaccaaacctggtattgagccctatataggcctgcactatccagccactgatatccctcaagctgccaggtttctcttcatgaagaacaaagtcagaatgatctgtgattgccgtgcaagatccgtgaagattattgaagatgaggcactctccattgatattagcttgtgtggttcaactcttagagcaccacatagctgtcaccttaagtatatggagaacatgaactcgattgcatcccttgtcatggctgttgtggtcaatgaaaatgaagaggatgatgaacccgagcctgaacaaccaccacaacagcagaagaagaagaggctgtggggtctcattgtttgccaccatgagagccccagatatgtccctttcccactgcggtatgcctgtgaattcttggcccaagtgtttgctgtccatgtaaacaaggagtttgaattggagaagcagatacgagagaaaaacattctgcgaatgcaaacaatgctctctgacatgctgttcaaggaatcatctcccttgagtatcgtgtctgggagtccaaatatcatggacctagttaagtgtgatggcgctgctcttttgtatggggacaaagtatggcggcttcaaacggctccaaccgagtctcagattcgtgatattgccttctggctttcagaagttcatggggattccactggcttgagtactgatagcctccaggatgctggatatccaggagctgcttcccttggtgacatgatttgtggaatggcagtggccaagatcacgtccaaggacattcttttctggttcaggtcacatacagctgctgaaatcaaatggggaggtgcaaagcatgatccatctgataaggatgacaacagaaggatgcaccctaggttatcctttaaggctttccttgaggttgtcaagacgaagagtttgccatggagtgactacgagatggatgctattcactcattgcagcttattcttagaggtacactgaatgatgcctcgaagccggcccaggcatctggtttagataaccagatcggtgatctaaaacttgatgggcttgctgaattgcaagcagtgacaagtgaaatggtccgcctgatggaaacagcaactgttccgatcttggcagtagatggcaatggattggtcaatggatggaaccaaaaggtagcggagttgtcagggctgagagttgatgaggctataggaagacacatacttacacttgtggaggattcttctgtatcacttgttcagaggatgctatatttagctctgcaaggcagagaagagaaggaagttcgatttgagctgaaaacacatggctccaagagggatgatggccctgttatcttggtcgtaaatgcttgtgccagtcgtgatcttcatgaccatgttgttggggtgtgctttgtagcccaggacatgactgttcacaagttggtcatggacaaatttactcgggtcgagggggactacaaggcaatcatccacaacccgaacccactcattcctcctatatttggtgctgaccagtttggatggtgctctgagtggaatgcagccatgaccaagcttaccgggtggcacagagatgaagtggttgataagatgctccttggcgaggtttttaacagcagcaatgcttcctgccttctgaagagcaaagatgcctttgtacgtctttgcattgtcatcaacagcgcattagctggtgaagaggcagaaaaggcttcattcggcttctttgaccgcaatgagaaatatgtcgaatgccttctgtcggtgaacaggaaagtaaatgcagatggtgttgtcactggagtgttctgtttcatccatgttcctagtgatgacctgcagcatgcgctacatgtgcagcaagcctctgagcagacagcacaaagaaagttgaaggctttctcgtacatgcgacatgccatcaacaaacctctctcaggtatgctttattctagggaaacactcaagagcacaggtctgaatgaagagcagatgaggcaggttcgcgtcggagacaattgccatcgccagctaaacaagatacttgccgacttggatcaagataacatcactgacaagtcaagctgcttggatttggatatggctgaatttgtgttgcaagatgtggtggtgtctgctgtaagtcaagtgctgataggttgccaggctaaaggtatcagagttgcttgcaacctgccagagagatccatgaagcaaaaggtttacggggatggtatccgactccagcagatcgtctctgacttcctatttgtttcggtgaagttctctcctgctggtggctctgttgacatctcttccaagctgactaagaacagcattggggaaaaccttcacctcatagacttcgaacttaggatcaagcaccgaggagcaggagtcccagcggaaatattgtcgcaaatgtatgaggaggacaataaagagcagtcagaggagggcttcagccttgctgtttctagaaaccttctgaggctcatgaatggtgacattcgtcacctcagggaagctggcatgtcaaccttcattctcactgctgaacttgctgctgctccttcagcagttggacgatgagggcaaactgcaacaagtgtcaaatgctctctcagagttcattcggaaagccacggtggtttgcggagaatgagaaatgttggagcggcgtgtaggatcaccgaatgcatagtacggctccatacttctgctctgtttctgcctgtaactcaactgtgaaaagttttaaactttcagaaagaaaaaccgtgtgaggtgcaggttcaagttaatatgaataataaagtgttttttattaaaataaaaaacatgatgaaatgtcaaatttagcggcagctttggtgccttctttatgtccatgcgtgtgcatgtggttgtatactggtgtaactgcttggtgggctacccatggctcttgt

SEQ ID NO: 52532 - DNA, 3962 bp, Zea Mays
ctcactcgcactcgtcgcggtggcccacgcccacaaggcccccgctatttatgcgcacttgcttgccgggagactgggagagttgtgtcgccggcggaggtgggcgtccgtcctcccgttccaccagagctcactgcttcgctccacccaccggccaccaccccttaagcaggagtggtacctggtgtttttttgtttttcaaaaagaagacagaaatgtcttcctcgaggcctgcccactcttcaagttcatccagcaggactcgccagagctcccgggcaaggatattagcacaaacaacccttgatgctgaactcaatgcagagtacgaagaatctggtgattcctttgattactccaagttggttgaagcacagcggagcactccacctgagcagcaagggcgatcgggaaaggtcatagcctacttgcagcatattcaaagaggaaagcttatccaaccatttggttgcctgttggcccttgacgagaagagcttcagggtcattgcattcagtgagaatgcacctgaaatgcttacaacggtcagccatgctgtgccgaacgttgatgatcccccgaagctaggaattggcaccaatgtgcgatcccttttcactgaccctggtgctacagcactgcagaaggcacttggatttgctgatgtttctttgctgaatcctatcctggttcagtgcaagacctcaggcaagccattctatgccattgttcatagggcaactggttgtctggtggtagattttgagcctgtgaagcctacagaatttcctgccactgctgctggggctttgcagtcctacaagcttgctgccaaggcaatctccaagatccagtcactaccaggtggaagcatggaggccttatgcaataccgtggttaaggaagtctttgacctgacaggttatgacagggttatggcttacaagttccatgaagatgagcatggggaggtcttcgctgagatcaccaaacctggtattgagccctatataggcctgcactatccagccactgatatccctcaagctgccaggtttctcttcatgaagaacaaagtcagaatgatctgtgattgccgtgcaagatccgtgaagattattgaagatgaggcactctccattgatattagcttgtgtggttcaactcttagagcaccacatagctgtcaccttaagtatatggagaacatgaactcgattgcatcccttgtcatggctgttgtggtcaatgaaaatgaagaggatgatgaacccgagcctgaacaaccaccacaacagcagaagaagaagaggctgtggggtctcattgtttgccaccatgagagccccagatatgtccctttcccactgcggtatgcctgtgaattcttggcccaagtgtttgctgtccatgtaaacaaggagtttgaattggagaagcagatacgagagaaaaacattctgcgaatgcaaacaatgctctctgacatgctgttcaaggaatcatctcccttgagtatcgtgtctgggagtccaaatatcatggacctagttaagtgtgatggcgctgctcttttgtatggggacaaagtatggcggcttcaaacggctccaaccgagtctcagattcgtgatattgccttctggctttcagaagttcatggggattccactggcttgagtactgatagcctccaggatgctggatatccaggagctgcttcccttggtgacatgatttgtggaatggcagtggccaagatcacgtccaaggacattcttttctggttcaggtcacatacagctgctgaaatcaaatggggaggtgcaaagcatgatccatctgataaggatgacaacagaaggatgcaccctaggttatcctttaaggctttccttgaggttgtcaagacgaagagtttgccatggagtgactacgagatggatgctattcactcattgcagcttattcttagaggtacactgaatgatgcctcgaagccggcccaggcatctggtttagataaccagatcggtgatctaaaacttgatgggcttgctgaattgcaagcagtgacaagtgaaatggtccgcctgatggaaacagcaactgttccgatcttggcagtagatggcaatggattggtcaatggatggaaccaaaaggtagcggagttgtcagggctgagagttgatgaggctataggaagacacatacttacacttgtggaggattcttctgtatcacttgttcagaggatgctatatttagctctgcaaggcagagaagagaaggaagttcgatttgagctgaaaacacatggctccaagagggatgatggccctgttatcttggtcgtaaatgcttgtgccagtcgtgatcttcatgaccatgttgttggggtgtgctttgtagcccaggacatgactgttcacaagttggtcatggacaaatttactcgggtcgagggggactacaaggcaatcatccacaacccgaacccactcattcctcctatatttggtgctgaccagtttggatggtgctctgagtggaatgcagccatgaccaagcttaccgggtggcacagagatgaagtggttgataagatgctccttggcgaggtttttaacagcagcaatgcttcctgccttctgaagagcaaagatgcctttgtacgtctttgcattgtcatcaacagcgcattagctggtgaagaggcagaaaaggcttcattcggcttctttgaccgcaatgagaaatatgtcgaatgccttctgtcggtgaacaggaaagtaaatgcagatggtgttgtcactggagtgttctgtttcatccatgttcctagtgatgacctgcagcatgcgctacatgtgcagcaagcctctgagcagacagcacaaagaaagttgaaggctttctcgtacatgcgacatgccatcaacaaacctctctcaggtatgctttattctagggaaacactcaagagcacaggtctgaatgaagagcagatgaggcaggttcgcgtcggagacaattgccatcgccagctaaacaagatacttgccgacttggatcaagataacatcactgacaagtcaagctgcttggatttggatatggctgaatttgtgttgcaagatgtggtggtgtctgctgtaagtcaagtgctgataggttgccaggctaaaggtatcagagttgcttgcaacctgccagagagatccatgaagcaaaaggtttacggggatggtatccgactccagcagatcgtctctgacttcctatttgtttcggtgaagttctctcctgctggtggctctgttgacatctcttccaagctgactaagaacagcattggggaaaaccttcacctcatagacttcgaacttaggatcaagcaccgaggagcaggagtcccagcggaaatattgtcgcaaatgtatgaggaggacaataaagagcagtcagaggagggcttcagccttgctgtttctagaaaccttctgaggctcatgaatggtgacattcgtcacctcagggaagctggcatgtcaaccttcattctcactgctgaacttgctgctgctccttcagcagttggacgatgagggcaaactgcaacaagtgtcaaatgagttcattcggaaagccacggtggtttgcggagaatgagaaatgttggagcggcgtgtaggatcaccgaatgcatagtacggctccatacttctgctctgtttctgcctgtaactcaactgtgaaaagttttaaactttcagaaagaaaaaccgtgtgaggtgcaggttcaagttaatatgaataataaagtgttttttattaaaataaaaaacatgatgaaatgtcaaatttagcggcagctttggtgccttctttatgtccatgcgtgtgcatgtggttgtatactggtgtaactgcttggtgggctacccatggctcttgt

SEQ ID NO: 52533 - DNA, 3985 bp, Zea Mays
tcgacttgctgctgctcactcgcactcgtcgcggtggcccacgcccacaaggcccccgctatttatgcgcacttgcttgccgggagactgggagagttgtgtcgccggcggaggtgggcgtccgtcctcccgttccaccagagctcactgcttcgctccacccaccggccaccaccccttaagcaggagtggtacctggtgtttttttgtttttcaaaaagaagacagaaatgtcttcctcgaggcctgcccactcttcaagttcatccagcaggactcgccagagctcccgggcaaggatattagcacaaacaacccttgatgctgaactcaatgcagagtacgaagaatctggtgattcctttgattactccaagttggttgaagcacagcggagcactccacctgagcagcaagggcgatcgggaaaggtcatagcctacttgcagcatattcaaagaggaaagcttatccaaccatttggttgcctgttggcccttgacgagaagagcttcagggtcattgcattcagtgagaatgcacctgaaatgcttacaacggtcagccatgctgtgccgaacgttgatgatcccccgaagctaggaattggcaccaatgtgcgatcccttttcactgaccctggtgctacagcactgcagaaggcacttggatttgctgatgtttctttgctgaatcctatcctggttcagtgcaagacctcaggcaagccattctatgccattgttcatagggcaactggttgtctggtggtagattttgagcctgtgaagcctacagaatttcctgccactgctgctggggctttgcagtcctacaagcttgctgccaaggcaatctccaagatccagtcactaccaggtggaagcatggaggccttatgcaataccgtggttaaggaagtctttgacctgacaggttatgacagggttatggcttacaagttccatgaagatgagcatggggaggtcttcgctgagatcaccaaacctggtattgagccctatataggcctgcactatccagccactgatatccctcaagctgccaggtttctcttcatgaagaacaaagtcagaatgatctgtgattgccgtgcaagatccgtgaagattattgaagatgaggcactctccattgatattagcttgtgtggttcaactcttagagcaccacatagctgtcaccttaagtatatggagaacatgaactcgattgcatcccttgtcatggctgttgtggtcaatgaaaatgaagaggatgatgaacccgagcctgaacaaccaccacaacagcagaagaagaagaggctgtggggtctcattgtttgccaccatgagagccccagatatgtccctttcccactgcggtatgcctgtgaattcttggcccaagtgtttgctgtccatgtaaacaaggagtttgaattggagaagcagatacgagagaaaaacattctgcgaatgcaaacaatgctctctgacatgctgttcaaggaatcatctcccttgagtatcgtgtctgggagtccaaatatcatggacctagttaagtgtgatggcgctgctcttttgtatggggacaaagtatggcggcttcaaacggctccaaccgagtctcagattcgtgatattgccttctggctttcagaagttcatggggattccactggcttgagtactgatagcctccaggatgctggatatccaggagctgcttcccttggtgacatgatttgtggaatggcagtggccaagatcacgtccaaggacattcttttctggttcaggtcacatacagctgctgaaatcaaatggggaggtgcaaagcatgatccatctgataaggatgacaacagaaggatgcaccctaggttatcctttaaggctttccttgaggttgtcaagacgaagagtttgccatggagtgactacgagatggatgctattcactcattgcagcttattcttagaggtacactgaatgatgcctcgaagccggcccaggcatctggtttagataaccagatcggtgatctaaaacttgatgggcttgctgaattgcaagcagtgacaagtgaaatggtccgcctgatggaaacagcaactgttccgatcttggcagtagatggcaatggattggtcaatggatggaaccaaaaggtagcggagttgtcagggctgagagttgatgaggctataggaagacacatacttacacttgtggaggattcttctgtatcacttgttcagaggatgctatatttagctctgcaaggcagagaagagaaggaagttcgatttgagctgaaaacacatggctccaagagggatgatggccctgttatcttggtcgtaaatgcttgtgccagtcgtgatcttcatgaccatgttgttggggtgtgctttgtagcccaggacatgactgttcacaagttggtcatggacaaatttactcgggtcgagggggactacaaggcaatcatccacaacccgaacccactcattcctcctatatttggtgctgaccagtttggatggtgctctgagtggaatgcagccatgaccaagcttaccgggtggcacagagatgaagtggttgataagatgctccttggcgaggtttttaacagcagcaatgcttcctgccttctgaagagcaaagatgcctttgtacgtctttgcattgtcatcaacagcgcattagctggtgaagaggcagaaaaggcttcattcggcttctttgaccgcaatgagaaatatgtcgaatgccttctgtcggtgaacaggaaagtaaatgcagatggtgttgtcactggagtgttctgtttcatccatgttcctagtgatgacctgcagcatgcgctacatgtgcagcaagcctctgagcagacagcacaaagaaagttgaaggctttctcgtacatgcgacatgccatcaacaaacctctctcaggtatgctttattctagggaaacactcaagagcacaggtctgaatgaagagcagatgaggcaggttcgcgtcggagacaattgccatcgccagctaaacaagatacttgccgacttggatcaagataacatcactgacaagtcaagctgcttggatttggatatggctgaatttgtgttgcaagatgtggtggtgtctgctgtaagtcaagtgctgataggttgccaggctaaaggtatcagagttgcttgcaacctgccagagagatccatgaagcaaaaggtttacggggatggtatccgactccagcagatcgtctctgacttcctatttgtttcggtgaagttctctcctgctggtggctctgttgacatctcttccaagctgactaagaacagcattggggaaaaccttcacctcatagacttcgaacttaggatcaagcaccgaggagcaggagtcccagcggaaatattgtcgcaaatgtatgaggaggacaataaagagcagtcagaggagggcttcagccttgctgtttctagaaaccttctgaggctcatgaatggtgacattcgtcacctcagggaagctggcatgtcaaccttcattctcactgctgaacttgctgctgctccttcagcagttggacgatgagggcaaactgcaacaagtgtcaaatgctctctcagagttcattcggaaagccacggtggtttgcggagaatgagaaatgttggagcggcgtgtaggatcaccgaatgcatagtacggctccatacttctgctctgtttctgcctgtaactcaactgtgaaaagttttaaactttcagaaagaaaaaccgtgtgaggtgcaggttcaagttaatatgaataataaagtgttttttattaaaataaaaaacatgatgaaatgtcaaatttagcggcagctttggtgccttctttatgtccatgcgtgtgcatgtggttgtatactggtgtaactgcttggtgggctacccatggctcttgt

SEQ ID NO: 52534 - DNA, 3542 bp, Zea Mays
atcgaaaccagacttccctggagaagggggaaacggcgcagttaagcaggagtggtacctggtgtttttttgtttttcaaaaagaagacagaaatgtcttcctcgaggcctgcccactcttcaagttcatccagcaggactcgccagagctcccgggcaaggatattagcacaaacaacccttgatgctgaactcaatgcagagtacgaagaatctggtgattcctttgattactccaagttggttgaagcacagcggagcactccacctgagcagcaagggcgatcgggaaaggtcatagcctacttgcagcatattcaaagaggaaagcttatccaaccatttggttgcctgttggcccttgacgagaagagcttcagggtcattgcattcagtgagaatgcacctgaaatgcttacaacggtcagccatgctgtgccgaacgttgatgatcccccgaagctaggaattggcaccaatgtgcgatcccttttcactgaccctggtgctacagcactgcagaaggcacttggatttgctgatgtttctttgctgaatcctatcctggttcagtgcaagacctcaggcaagccattctatgccattgttcatagggcaactggttgtctggtggtagattttgagcctgtgaagcctacagaatttcctgccactgctgctggggctttgcagtcctacaagcttgctgccaaggcaatctccaagatccagtcactaccaggtggaagcatggaggccttatgcaataccgtggttaaggaagtctttgacctgacaggttatgacagggttatggcttacaagttccatgaagatgagcatggggaggtcttcgctgagatcaccaaacctggtattgagccctatataggcctgcactatccagccactgatatccctcaagctgccaggtttctcttcatgaagaacaaagtcagaatgatctgtgattgccgtgcaagatccgtgaagattattgaagatgaggcactctccattgatattagcttgtgtggttcaactcttagagcaccacatagctgtcaccttaagtatatggagaacatgaactcgattgcatcccttgtcatggctgttgtggtcaatgaaaatgaagaggatgatgaacccgagcctgaacaaccaccacaacagcagaagaagaagaggctgtggggtctcattgtttgccaccatgagagccccagatatgtccctttcccactgcggtatgcctgtgaattcttggcccaagtgtttgctgtccatgtaaacaaggagtttgaattggagaagcagatacgagagaaaaacattctgcgaatgcaaacaatgctctctgacatgctgttcaaggaatcatctcccttgagtatcgtgtctgggagtccaaatatcatggacctagttaagtgtgatggcgctgctcttttgtatggggacaaagtatggcggcttcaaacggctccaaccgagtctcagattcgtgatattgccttctggctttcagaagttcatggggattccactggcttgagtactgatagcctccaggatgctggatatccaggagctgcttcccttggtgacatgatttgtggaatggcagtggccaagatcacgtccaaggacattcttttctggttcaggtcacatacagctgctgaaatcaaatggggaggtgcaaagcatgatccatctgataaggatgacaacagaaggatgcaccctaggttatcctttaaggctttccttgaggttgtcaagacgaagagtttgccatggagtgactacgagatggatgctattcactcattgcagcttattcttagaggtacactgaatgatgcctcgaagccggcccaggcatctggtttagataaccagatcggtgatctaaaacttgatgggcttgctgaattgcaagcagtgacaagtgaaatggtccgcctgatggaaacagcaactgttccgatcttggcagtagatggcaatggattggtcaatggatggaaccaaaaggtagcggagttgtcagggctgagagttgatgaggctataggaagacacatacttacacttgtggaggattcttctgtatcacttgttcagaggatgctatatttagctctgcaaggcagagaagagaaggaagttcgatttgagctgaaaacacatggctccaagagggatgatggccctgttatcttggtcgtaaatgcttgtgccagtcgtgatcttcatgaccatgttgttggggtgtgctttgtagcccaggacatgactgttcacaagttggtcatggacaaatttactcgggtcgagggggactacaaggcaatcatccacaacccgaacccactcattcctcctatatttggtgctgaccagtttggatggtgctctgagtggaatgcagccatgaccaagcttaccgggtggcacagagatgaagtggttgataagatgctccttggcgaggtttttaacagcagcaatgcttcctgccttctgaagagcaaagatgcctttgtacgtctttgcattgtcatcaacagcgcattagctggtgaagaggcagaaaaggcttcattcggcttctttgaccgcaatgagaaatatgtcgaatgccttctgtcggtgaacaggaaagtaaatgcagatggtgttgtcactggagtgttctgtttcatccatgttcctagtgatgacctgcagcatgcgctacatgtgcagcaagcctctgagcagacagcacaaagaaagttgaaggctttctcgtacatgcgacatgccatcaacaaacctctctcaggtatgctttattctagggaaacactcaagagcacaggtctgaatgaagagcagatgaggcaggttcgcgtcggagacaattgccatcgccagctaaacaagatacttgccgacttggatcaagataacatcactgacaagtcaagctgcttggatttggatatggctgaatttgtgttgcaagatgtggtggtgtctgctgtaagtcaagtgctgataggttgccaggctaaaggtatcagagttgcttgcaacctgccagagagatccatgaagcaaaaggtttacggggatggtatccgactccagcagatcgtctctgacttcctatttgtttcggtgaagttctctcctgctggtggctctgttgacatctcttccaagctgactaagaacagcattggggaaaaccttcacctcatagacttcgaacttaggatcaagcaccgaggagcaggagtcccagcggaaatattgtcgcaaatgtatgaggaggacaataaagagcagtcagaggagggcttcagccttgctgtttctagaaaccttctgaggctcatgaatggtgacattcgtcacctcagggaagctggcatgtcaaccttcattctcactgctgaacttgctgctgctccttcagcagttggacgatgagggcaaactgcaacaagtgtcaaatgatacgtagatctcctgcatattctcgg

SEQ ID NO: 52535 - DNA, 613 bp, Zea Mays
tccacgcgcacgccacgtactagttccgactccgatccgcgctcaaccttcggcgtcgtgctgcttgagctcttgacggggaggaagcccgtggaccacaccatgccaaagggacagcagagcctggtcacctgggccactccgaggctgagcgaggacaaagtgaagcagtgcgtggaccccaagctcaaggacgactacccgcccaaggccgtggccaagctcgcggcggtggcggcgctgtgcgtccagtacgaggccgatttcaggcccaacatgaccatcgtcgtcaaggctctgcagcccctcgtgaacgctcggccaggaggagagtagctagatgtcgtaaaaggctcgccctgagcagagctgtgactgtgatggaccaagtttctggacgtcgtagtagttcatgtcatgtccacggcatttctgccagaatgttgccagcaacggcctgcttggcctgttcaatcacgagagcattaaccgcgcgtgccattgcgtgtgaaaagtgtgggatttaattgatttattaatcgcgaattcgcgcctcacaaactgggcctgaaataaatagattgaaaattaaataaataaataaataaataac

SEQ ID NO: 52536 - DNA, 1985 bp, Zea Mays
gacgtagcgtcggggctggccgtccccgtccgcccgcgagtgggaggccaccgtttcctctcgcaccgggtcgcgtggagggagggcatggggccatggttcccagcgcggggcgccgagcgcgctcctccgctcgcgcagcgccagcgccacccccgcgccgggctttatataccaccctctcccaaccctacagaatcatcgcctccaccgttctctcttcctctgctcttctctgcctgcctgagctcaccgcacctcgcctcctcaccgcgtttcctccgttaatccgaaaatggccgatgccgaggatatccagcccctcgtctgcgacaacggaactggcatggtcaaggctgggttcgctggcgacgacgccccgagggccgtcttccccagcatcgtggggcgcccgcgccacactggtgtcatggtcgggatggggcagaaggacgcctacgtcggtgacgaggcgcagtccaagaggggtatcctgaccctcaagtaccccatcgagcacgggatcgtcagcaactgggacgacatggagaagatctggcatcacaccttctacaacgagctccgcgtggctcccgaggagcaccccgtcctcctcaccgaggcgcccctgaaccccaaggctaacagggagaagatgacccagatcatgttcgagaccttcaacaccccggctatgtacgtcgccatccaggccgtgctctctctgtatgccagtggccgtaccacaggtatcgtgctcgactcgggagatggtgtgagccacaccgtccccatctacgagggatacgccctcccccacgccatccttcgtcttgacctggccggtcgcgacctcaccgactacctgatgaagatcctgactgagcgcggctactccttcaccaccaccgctgagcgggaaatcgtgagggacatgaaggagaagctcgcctacatcgccctggactacgaccaggagatggagaccgccaagaccagctcttccgtggagaagagctacgagctccccgacggacaggtgatcaccatcggcgccgagcgcttccgctgccccgaggtcctcttccagccatccttcatcgggatggaagctgccggcatccacgagaccacctacaactccatcatgaagtgcgacgtggatattaggaaggatctgtacggcaacatcgtcctctccggtggcaccaccatgttccctgggatcgctgacaggatgagcaaggagatcactgccttggctcccagcagcatgaagatcaaggtggtcgctcctccagagaggaagtacagtgtctggatcggaggatccatcctggcatccctcagcaccttccagcagatgtggatcgccaaggccgagtacgacgagtccggcccatccatcgtccacaggaaatgcttctaattctttgggcccgagaaatgcaagccgtgggggagccgttaccgccgccagcctctcctgcccccgttttcgttgccgtttcttcattagcgcgaacaaagttttgtgccggtctatcggccgccgctttcctcccctattcatcaagactgcaataactgtcgctacctatgcttctcacttgtgattttttggacacaatatgttaaggtccattcaattctaatgagacgcctgatgaggctacttcggattgtcattggttattgatgtcttatgaatgaataatataatttttttttgtcactttgagctctctgtatctgcactgttgttacatttttcccttgagaattgaaattgagacgctgtaatttgcgcatcgttgcagcagctgcctttcgattccagtcccctgttccatcagattccctcctgccttttgtctttgaaagcaccttttgctcacgcctcacgagtcacgacacatccctcgggcctagtttgggtactctagtattgaagtggtttggagggattggagagtgtataaatc

SEQ ID NO: 52537 - DNA, 2000 bp, Zea Mays
gacgtagcgtcggggctggccgtccccgtccgcccgcgagtgggaggccaccgtttcctctcgcaccgggtcgcgtggagggagggcatggggccatggttcccagcgcggggcgccgagcgcgctcctccgctcgcgcagcgccagcgccacccccgcgccgggctttatataccaccctctcccaaccctacagaatcatcgcctccaccgttctctcttcctctgctcttctctgcctgcctgagctcaccgcacctcgcctcctcaccgcgtttcctccgttaatccgctctggtgtaggtagaaaatggccgatgccgaggatatccagcccctcgtctgcgacaacggaactggcatggtcaaggctgggttcgctggcgacgacgccccgagggccgtcttccccagcatcgtggggcgcccgcgccacactggtgtcatggtcgggatggggcagaaggacgcctacgtcggtgacgaggcgcagtccaagaggggtatcctgaccctcaagtaccccatcgagcacgggatcgtcagcaactgggacgacatggagaagatctggcatcacaccttctacaacgagctccgcgtggctcccgaggagcaccccgtcctcctcaccgaggcgcccctgaaccccaaggctaacagggagaagatgacccagatcatgttcgagaccttcaacaccccggctatgtacgtcgccatccaggccgtgctctctctgtatgccagtggccgtaccacaggtatcgtgctcgactcgggagatggtgtgagccacaccgtccccatctacgagggatacgccctcccccacgccatccttcgtcttgacctggccggtcgcgacctcaccgactacctgatgaagatcctgactgagcgcggctactccttcaccaccaccgctgagcgggaaatcgtgagggacatgaaggagaagctcgcctacatcgccctggactacgaccaggagatggagaccgccaagaccagctcttccgtggagaagagctacgagctccccgacggacaggtgatcaccatcggcgccgagcgcttccgctgccccgaggtcctcttccagccatccttcatcgggatggaagctgccggcatccacgagaccacctacaactccatcatgaagtgcgacgtggatattaggaaggatctgtacggcaacatcgtcctctccggtggcaccaccatgttccctgggatcgctgacaggatgagcaaggagatcactgccttggctcccagcagcatgaagatcaaggtggtcgctcctccagagaggaagtacagtgtctggatcggaggatccatcctggcatccctcagcaccttccagcagatgtggatcgccaaggccgagtacgacgagtccggcccatccatcgtccacaggaaatgcttctaattctttgggcccgagaaatgcaagccgtgggggagccgttaccgccgccagcctctcctgcccccgttttcgttgccgtttcttcattagcgcgaacaaagttttgtgccggtctatcggccgccgctttcctcccctattcatcaagactgcaataactgtcgctacctatgcttctcacttgtgattttttggacacaatatgttaaggtccattcaattctaatgagacgcctgatgaggctacttcggattgtcattggttattgatgtcttatgaatgaataatataatttttttttgtcactttgagctctctgtatctgcactgttgttacatttttcccttgagaattgaaattgagacgctgtaatttgcgcatcgttgcagcagctgcctttcgattccagtcccctgttccatcagattccctcctgccttttgtctttgaaagcaccttttgctcacgcctcacgagtcacgacacatccctcgggcctagtttgggtactctagtattgaagtggtttggagggattggagagtgtataaatc

SEQ ID NO: 52538 - DNA, 1568 bp, Zea Mays
gcaatttgttcattctgtatctccggtctcgggcggcagcagctcacctctaggactaggaggcgaagcagtgtggtcagggcctcctggtccccctcggagtctctgccaccgtcctcgtcgatggcgccgctcaggatggaatcgcccgcggggcagctactctcccagattcttcacacgcacccgcacctgctgcctgccgccgccgagcagcagctcgagctgctccagaccgaccgcgaggcagagaagaataaggataaggagagcgatgctggcgacaagctggctccgacaggtgtcgacctcgtgctgtacaggcggattgctcaagtaaaggagaaggaacggaggaggactttggaggagatactctatgctctggttgttgagaagtttgttgaagccggcgtttccttggttccggcactctcacgctccatcgactcttctggaagagttgatcagtgggcagaaactgtggaaggaaggctccagcgtttgcactcgcctgaggcctatgaaatgatcgagaaccatctcgccctcattctggggcagcgtcagagtgatgccactattgcagccataagtaagctccgtgttggccaggtctatgccgcatctgtgatgtatggctatttcctgaagagagttgatcagaggtttcagctcgagaagacaatgaagagcctcccttggggatcagaagaggaagacggcgctttgtatcaagttatgacgaccgactcgatgccttcagctcagtcttctagctctcacccagagatgggctcctggaccgccgcgcctgacttcaacgcaggaggtcctagcgaatctatcaagccttgtcgccttaggtcgtatgtcatgtcattcgatccagatacgcttcagaggtatgcaacggtcaggtcaaaggaggcctttggtatcatcgagaaacacacagaagcgctatttgggaaagcagagattgtagtcacacctggaggcacggttggttcatccaaggatgagcacattaggataagctttgccgggctgagaaggctggtcctggaggctgttactttcggatcattcctctgggacgttgagagctttgtggattccagctaccattttgtgaccagctaagattgtcatcctaagtaaagaaaggttcgtggtttacgtctctggtctgaatgtctgtgggcttcggaaagacttgtacaatgatgctaggctgttaccacaccccttactgatgcgatggtatcaatgatttgcgcagttctatggcatcgcattatttgtaaagaccaactgccattatcctgatatttagccgttatgttctattaacatctgtgctgcccggggggcgtagcgatgtatttttttggctatcccctctgcaaattgtaagaggaattctaggctcatagccaattctttggcgaagctattattctcgttttacagattgccgttatgatgatttgagtctttctttttgagagcacagccatttcgtactacagaatacttgtgcgtatttgaatagggatgaagtt

SEQ ID NO: 52539 - DNA, 1606 bp, Zea Mays
gcatgcttacgagcttatcaattttctggattttgtatccttgcttgcggaggaatgatttgggtctcgggcggcagcagctcacctctaggactaggaggcgaagcagtgtggtcagggcctcctggtccccctcggagtctctgccaccgtcctcgtcgatggcgccgctcaggatggaatcgcccgcggggcagctactctcccagattcttcacacgcacccgcacctgctgcctgccgccgccgagcagcagctcgagctgctccagaccgaccgcgaggcagagaagaataaggataaggagagcgatgctggcgacaagctggctccgacaggtgtcgacctcgtgctgtacaggcggattgctcaagtaaaggagaaggaacggaggaggactttggaggagatactctatgctctggttgttgagaagtttgttgaagccggcgtttccttggttccggcactctcacgctccatcgactcttctggaagagttgatcagtgggcagaaactgtggaaggaaggctccagcgtttgcactcgcctgaggcctatgaaatgatcgagaaccatctcgccctcattctggggcagcgtcagagtgatgccactattgcagccataagtaagctccgtgttggccaggtctatgccgcatctgtgatgtatggctatttcctgaagagagttgatcagaggtttcagctcgagaagacaatgaagagcctcccttggggatcagaagaggaagacggcgctttgtatcaagttatgacgaccgactcgatgccttcagctcagtcttctagctctcacccagagatgggctcctggaccgccgcgcctgacttcaacgcaggaggtcctagcgaatctatcaagccttgtcgccttaggtcgtatgtcatgtcattcgatccagatacgcttcagaggtatgcaacggtcaggtcaaaggaggcctttggtatcatcgagaaacacacagaagcgctatttgggaaagcagagattgtagtcacacctggaggcacggttggttcatccaaggatgagcacattaggataagctttgccgggctgagaaggctggtcctggaggctgttactttcggatcattcctctgggacgttgagagctttgtggattccagctaccattttgtgaccagctaagattgtcatcctaagtaaagaaaggttcgtggtttacgtctctggtctgaatgtctgtgggcttcggaaagacttgtacaatgatgctaggctgttaccacaccccttactgatgcgatggtatcaatgatttgcgcagttctatggcatcgcattatttgtaaagaccaactgccattatcctgatatttagccgttatgttctattaacatctgtgctgcccggggggcgtagcgatgtatttttttggctatcccctctgcaaattgtaagaggaattctaggctcatagccaattctttggcgaagctattattctcgttttacagattgccgttatgatgatttgagtctttctttttgagagcacagccatttcgtactacagaatacttgtgcgtatttgaatagggatgaagtt

SEQ ID NO: 52540 - DNA, 1935 bp, Zea Mays
gaaaaaaatcaatccgccacctgttctaacacgcgaggagaagaacatggcgactgctgtttcgttaccgtccgcgtgctctgacccctagcgagcccacggcgtcgccctataattggggtcccaaccgaaacctctcctcgccgcaacgaattcccggtctccaaccagccgggcagccaccgcagacgatccctagttccgcgtccccgacccgaaccctcgagttcgcacgggctccggccagattcgcgcggtctaagcttcgaatcggcgcatggaggcagcagtagccgccgcactcaagtcgcccaccgccgcacgtccctcgtggcggcccgcggccccgggcgccacctcgctcccctttgaccggaggcgcagctttgccttcggctccatcaagcagctcacctctaggactaggaggcgaagcagtgtggtcagggcctcctggtccccctcggagtctctgccaccgtcctcgtcgatggcgccgctcaggatggaatcgcccgcggggcagctactctcccagattcttcacacgcacccgcacctgctgcctgccgccgccgagcagcagctcgagctgctccagaccgaccgcgaggcagagaagaataaggataaggagagcgatgctggcgacaagctggctccgacaggtgtcgacctcgtgctgtacaggcggattgctcaagtaaaggagaaggaacggaggaggactttggaggagatactctatgctctggttgttgagaagtttgttgaagccggcgtttccttggttccggcactctcacgctccatcgactcttctggaagagttgatcagtgggcagaaactgtggaaggaaggctccagcgtttgcactcgcctgaggcctatgaaatgatcgagaaccatctcgccctcattctggggcagcgtcagagtgatgccactattgcagccataagtaagctccgtgttggccaggtctatgccgcatctgtgatgtatggctatttcctgaagagagttgatcagaggtttcagctcgagaagacaatgaagagcctcccttggggatcagaagaggaagacggcgctttgtatcaagttatgacgaccgactcgatgccttcagctcagtcttctagctctcacccagagatgggctcctggaccgccgcgcctgacttcaacgcaggaggtcctagcgaatctatcaagccttgtcgccttaggtcgtatgtcatgtcattcgatccagatacgcttcagaggtatgcaacggtcaggtcaaaggaggcctttggtatcatcgagaaacacacagaagcgctatttgggaaagcagagattgtagtcacacctggaggcacggttggttcatccaaggatgagcacattaggataagctttgccgggctgagaaggctggtcctggaggctgttactttcggatcattcctctgggacgttgagagctttgtggattccagctaccattttgtgaccagctaagattgtcatcctaagtaaagaaaggttcgtggtttacgtctctggtctgaatgtctgtgggcttcggaaagacttgtacaatgatgctaggctgttaccacaccccttactgatgcgatggtatcaatgatttgcgcagttctatggcatcgcattatttgtaaagaccaactgccattatcctgatatttagccgttatgttctattaacatctgtgctgcccggggggcgtagcgatgtatttttttggctatcccctctgcaaattgtaagaggaattctaggctcatagccaattctttggcgaagctattattctcgttttacagattgccgttatgatgatttgagtctttctttttgagagcacagccatttcgtactacagaatacttgtgcgtatttgaatagggatgaagtt

SEQ ID NO: 52541 - DNA, 1621 bp, Zea Mays
cttagttccagttttacaactgtgtgtgagctgatagtgagtagagagcttcgttctcaactccgatagttgtccagggtctcgggcggcagcagctcacctctaggactaggaggcgaagcagtgtggtcagggcctcctggtccccctcggagtctctgccaccgtcctcgtcgatggcgccgctcaggatggaatcgcccgcggggcagctactctcccagattcttcacacgcacccgcacctgctgcctgccgccgccgagcagcagctcgagctgctccagaccgaccgcgaggcagagaagaataaggataaggagagcgatgctggcgacaagctggctccgacaggtgtcgacctcgtgctgtacaggcggattgctcaagtaaaggagaaggaacggaggaggactttggaggagatactctatgctctggttgttgagaagtttgttgaagccggcgtttccttggttccggcactctcacgctccatcgactcttctggaagagttgatcagtgggcagaaactgtggaaggaaggctccagcgtttgcactcgcctgaggcctatgaaatgatcgagaaccatctcgccctcattctggggcagcgtcagagtgatgccactattgcagccataagtaagctccgtgttggccaggtctatgccgcatctgtgatgtatggctatttcctgaagagagttgatcagaggtttcagctcgagaagacaatgaagagcctcccttggggatcagaagaggaagacggcgctttgtatcaagttatgacgaccgactcgatgccttcagctcagtcttctagctctcacccagagatgggctcctggaccgccgcgcctgacttcaacgcaggaggtcctagcgaatctatcaagccttgtcgccttaggtcgtatgtcatgtcattcgatccagatacgcttcagaggtatgcaacggtcaggtcaaaggaggcctttggtatcatcgagaaacacacagaagcgctatttgggaaagcagagattgtagtcacacctggaggcacggttggttcatccaaggatgagcacattaggataagctttgccgggctgagaaggctggtcctggaggctgttactttcggatcattcctctgggacgttgagagctttgtggattccagctaccattttgtgaccagctaagattgtcatcctaagtaaagaaaggttcgtggtttacgtctctggtctgaatgtctgtgggcttcggaaagacttgtacaatgatgctaggctgttaccacaccccttactgatgcgatggtatcaatgatttgcgcagttctatggcatcgcattatttgtaaagaccaactgccattatcctgatatttagccgttatgttctattaacatctgtgctgcccggggggcgtagcgatgtatttttttggctatcccctctgcaaattgtaagaggaattctaggctcatagccaattctttggcgaagctattattctcgttttacagattgccgttatgatgatttgagtctttctttttgagagcacagccatttcgtactacagaatacttgtgcgtatttgaatagggatgaagtt

SEQ ID NO: 52542 - DNA, 1667 bp, Zea Mays
gggactgtcaactttgggtgcagctaccagaggaagagaggagaagtgtgcctcactggtttcagtgacagtgatcacggtgctgacatagacgggagaaagagtaccacaggagtcctttttttccttggagagaacctgatcacctctaggactaggaggcgaagcagtgtggtcagggcctcctggtccccctcggagtctctgccaccgtcctcgtcgatggcgccgctcaggatggaatcgcccgcggggcagctactctcccagattcttcacacgcacccgcacctgctgcctgccgccgccgagcagcagctcgagctgctccagaccgaccgcgaggcagagaagaataaggataaggagagcgatgctggcgacaagctggctccgacaggtgtcgacctcgtgctgtacaggcggattgctcaagtaaaggagaaggaacggaggaggactttggaggagatactctatgctctggttgttgagaagtttgttgaagccggcgtttccttggttccggcactctcacgctccatcgactcttctggaagagttgatcagtgggcagaaactgtggaaggaaggctccagcgtttgcactcgcctgaggcctatgaaatgatcgagaaccatctcgccctcattctggggcagcgtcagagtgatgccactattgcagccataagtaagctccgtgttggccaggtctatgccgcatctgtgatgtatggctatttcctgaagagagttgatcagaggtttcagctcgagaagacaatgaagagcctcccttggggatcagaagaggaagacggcgctttgtatcaagttatgacgaccgactcgatgccttcagctcagtcttctagctctcacccagagatgggctcctggaccgccgcgcctgacttcaacgcaggaggtcctagcgaatctatcaagccttgtcgccttaggtcgtatgtcatgtcattcgatccagatacgcttcagaggtatgcaacggtcaggtcaaaggaggcctttggtatcatcgagaaacacacagaagcgctatttgggaaagcagagattgtagtcacacctggaggcacggttggttcatccaaggatgagcacattaggataagctttgccgggctgagaaggctggtcctggaggctgttactttcggatcattcctctgggacgttgagagctttgtggattccagctaccattttgtgaccagctaagattgtcatcctaagtaaagaaaggttcgtggtttacgtctctggtctgaatgtctgtgggcttcggaaagacttgtacaatgatgctaggctgttaccacaccccttactgatgcgatggtatcaatgatttgcgcagttctatggcatcgcattatttgtaaagaccaactgccattatcctgatatttagccgttatgttctattaacatctgtgctgcccggggggcgtagcgatgtatttttttggctatcccctctgcaaattgtaagaggaattctaggctcatagccaattctttggcgaagctattattctcgttttacagattgccgttatgatgatttgagtctttctttttgagagcacagccatttcgtactacagaatacttgtgcgtatttgaatagggatgaagtt

SEQ ID NO: 52543 - DNA, 2176 bp, Zea Mays
tgattgagggagaaaatgcagggggtaggaggaggaaaaagttcacagaacggggacatatttttgtacaagttcatctggcagatcattcaaatcttgcaacagaatccaaagttgagccggtggctaatgggatgaatggacatacagatgagaaaactgctgtagcaaccagtgtttctctcaacacactaagtggttttgaagctgctgatagccgaaatagttgggaaaacttcaagcttttgctttcttatgagaaaaatgagatgccctatgaaagtgtatctgataaagttactcttgtagtaagtgtggaagatacaggaataggtataccattggatgcacaagccaaggtgttcacacctttcatgcaggctgatagttcgacttccaggacatatggtggtactggaattggattgagcatcagcaaatgtcttgttgaactaatgggtggtcagataaactttgtcagccgaccacatgttgggagtacgttcacatttactgcggttctcaaaagatgtgacagaagcgctattggtgacagtaagcctgttatgttgcatcctcttccatccagtttcaaaggtttatctgcactattggttgatagaagaccagtaagagctactgtaactaagtatcacttgcaaaggctgggaattgcctgtgatgttgttgcaaccattgaactggctcttggtgtgctgtccgggagaaatggcagttccctaaccagtatgaagcaaccatgcatgttattgatcgagagtgattcatggggcttcaatattgatgtttctttacgatctagactcctggagatgaagcagaatggtcacacacatgtattacccaaaatcatccttcttgcagctgcagaatcgggcaaactcaaagaacactatgcagttgattctgtgatcacgaaacccctgaaagcaagcgcacttgccgcttgtctgttccaaacacttggcatcaaacagtcaagcaacgagagaagtgacaactcaggttctctttacgggttgcttcttggcaagaacatattggtggttgatgacaacaaggtaaatcttagagtggctgctggcacgttaaagaaatttggagcaaaggtggagtgcgtggagagtggaaaagatgccctcgccctcctacaggtcccatataagtttcatctttgtctcatggacattcagatgcccgaaatggatgggtttgaggctaccaagcaaataagggcaatggaagcgaaggcaaatgagcaggcagtcgcctgtgacaattcagaaatagatggtgcgacaagggcagcaagatggcgcctgcctgttcttgcaatgaccgccgatgtcatccaggccacccatgaagagtgcacgaagtgcggtatggatgggtacgtcacaaagcccttcgaggagaagcagctcttccaggcgttgcagaagttcttggaccccggcatgtcctgctaacgccgaagtgatgcgttggagaccgtgcagcgcgggctgctcgtcgatcatgccagcggggaacagcaggcagacaaggcagcacgcaccacgggccttcgctggtctgcctgcctgtgcaggcgtcgtgtaaatgtattgtatttgcagggatactgtttacagcgctagtatgccccgtgccacaatgtccgagctacctgtggctgatgcacgttgcgcataggtggttttttttgtacagcttccaccatttttgtgctccagatcagaccaccgaaggaggcaagcatgctcgctggtgcagtgcagcactggaaggaaaacctgacttcctgagagtagatttttgctgtttaattgcattgggatttatgatgtattataatcagataaatgtgtgatgtaagctggcgtaattggcccaatgcatttccattgttatggatgagttgaaatggcattggttagacacttagactacactattgggtgtatgcccttccacagttccattttccctgcaaaatatcaaaatgtgcaaagggatagtggaatcatggcttgaattatatgaattttctttggtgtttttttcccgtatcgaagctcgactataacattagaagaaagcatctggaggcatgtttaagttttggttattacacactataaaatacaag

SEQ ID NO: 52544 - DNA, 2115 bp, Zea Mays
gaaggagagctgattgagggagaaaatgcagggggtaggaggaggaaaaagttcacagaacggggacatatttttgtacaagttcatctggcagatcattcaaatcttgcaacagaatccaaagttgagccggtggctaatgggatgaatggacatacagatgagaaaactgctgtagcaaccagtgtttctctcaacacactaagtggttttgaagctgctgatagccgaaatagttgggaaaacttcaagcttttgctttcttatgagaaaaatgagatgccctatgaaagtgtatctgataaagttactcttgtagtaagtgtggaagatacaggaataggtataccattggatgcacaagccaaggtgttcacacctttcatgcaggctgatagttcgacttccaggacatatggtggtactggaattggattgagcatcagcaaatgtcttgttgaactaatgggtggtcagataaactttgtcagccgaccacatgttgggagtacgttcacatttactgcggttctcaaaagatgtgacagaagcgctattggtgacagtaagcctgttatgttgcatcctcttccatccagtttcaaaggtttatctgcactattggttgatagaagaccagtaagagctactgtaactaagtatcacttgcaaaggctgggaattgcctgtgatgttgttgcaaccattgaactggctcttggtgtgctgtccgggagaaatggcagttccctaaccagctgcagaatcgggcaaactcaaagaacactatgcagttgattctgtgatcacgaaacccctgaaagcaagcgcacttgccgcttgtctgttccaaacacttggcatcaaacagtcaagcaacgagagaagtgacaactcaggttctctttacgggttgcttcttggcaagaacatattggtggttgatgacaacaaggtaaatcttagagtggctgctggcacgttaaagaaatttggagcaaaggtggagtgcgtggagagtggaaaagatgccctcgccctcctacaggtcccatataagtttcatctttgtctcatggacattcagatgcccgaaatggatgggtttgaggctaccaagcaaataagggcaatggaagcgaaggcaaatgagcaggcagtcgcctgtgacaattcagaaatagatggtgcgacaagggcagcaagatggcgcctgcctgttcttgcaatgaccgccgatgtcatccaggccacccatgaagagtgcacgaagtgcggtatggatgggtacgtcacaaagcccttcgaggagaagcagctcttccaggcgttgcagaagttcttggaccccggcatgtcctgctaacgccgaagtgatgcgttggaggtgaggcactattctcctctattctgtaattccctaaccttggccgcaacctgatccccaagaaagaccgtgcagcgcgggctgctcgtcgatcatgccagcggggaacagcaggcagacaaggcagcacgcaccacgggccttcgctggtctgcctgcctgtgcaggcgtcgtgtaaatgtattgtatttgcagggatactgtttacagcgctagtatgccccgtgccacaatgtccgagctacctgtggctgatgcacgttgcgcataggtggttttttttgtacagcttccaccatttttgtgctccagatcagaccaccgaaggaggcaagcatgctcgctggtgcagtgcagcactggaaggaaaacctgacttcctgagagtagatttttgctgtttaattgcattgggatttatgatgtattataatcagataaatgtgtgatgtaagctggcgtaattggcccaatgcatttccattgttatggatgagttgaaatggcattggttagacacttagactacactattgggtgtatgcccttccacagttccattttccctgcaaaatatcaaaatgtgcaaagggatagtggaatcatggcttgaattatatgaattttctttggtgtttttttcccgtatcgaagctcgactataacattagaagaaagcatctggaggcatgtttaagttttggttattacacactataaaatacaag

SEQ ID NO: 52545 - DNA, 2992 bp, Zea Mays
tgagataccttgggggagcatttgatgtagaatcattagtggaaaatttgttgaggcagctagctggcaatcaggaattggtggtaaatgtttatgatgtcacaaacatttcgaaccctcttgtcatgtatggatcagaagttcctcttggcaacccctcaccatcgcacatctgcatgctagattttggtgatccattcagaaagcatcatatggtttgcagatacagaaacaagcctcatgtcccatggtctgcaatttctaccccatctggtgtctttgtcatatgtatgcttgtggggtacatcgcgggtgccgcttggagtcgttatgataatgttaaggaagattgccggaaaatggaggagctgaaaaaacaggcggaagcagccgatgttgctaaatctcagttccttgcaactgtttctcatgagatcagaacgcccatgaatggagttctaggaatgcttgatatgctgttagacactgacctaacctcaactcagagggattttgcacaaaccgctcaagtctgtggaaaggctttaatatcgctaatcaatgaagtgcttgacagagcgaaaattgaagccagaaagttggatcttgaatctgtaccatttgatctgagatccatccttgatgatgtcatctcattattttcttcaaagtcaagagagaagggaattgagcttgatgtatatgtctctgaaagagttcccgaaatcttgttgggtgatcctggaaggtttcgacagataattacaaatttagtgggcaactcaattaagttcacagaacggggacatatttttgtacaagttcatctggcagatcattcaaatcttgcaacagaatccaaagttgagccggtggctaatgggatgaatggacatacagatgagaaaactgctgtagcaaccagtgtttctctcaacacactaagtggttttgaagctgctgatagccgaaatagttgggaaaacttcaagcttttgctttcttatgagaaaaatgagatgccctatgaaagtgtatctgataaagttactcttgtagtaagtgtggaagatacaggaataggtataccattggatgcacaagccaaggtgttcacacctttcatgcaggctgatagttcgacttccaggacatatggtggtactggaattggattgagcatcagcaaatgtcttgttgaactaatgggtggtcagataaactttgtcagccgaccacatgttgggagtacgttcacatttactgcggttctcaaaagatgtgacagaagcgctattggtgacagtaagcctgttatgttgcatcctcttccatccagtttcaaaggtttatctgcactattggttgatagaagaccagtaagagctactgtaactaagtatcacttgcaaaggctgggaattgcctgtgatgttgttgcaaccattgaactggctcttggtgtgctgtccgggagaaatggcagttccctaaccagtatgaagcaaccatgcatgttattgatcgagagtgattcatggggcttcaatattgatgtttctttacgatctagactcctggagatgaagcagaatggtcacacacatgtattacccaaaatcatccttcttgcagctgcagaatcgggcaaactcaaagaacactatgcagttgattctgtgatcacgaaacccctgaaagcaagcgcacttgccgcttgtctgttccaaacacttggcatcaaacagtcaagcaacgagagaagtgacaactcaggttctctttacgggttgcttcttggcaagaacatattggtggttgatgacaacaaggtaaatcttagagtggctgctggcacgttaaagaaatttggagcaaaggtggagtgcgtggagagtggaaaagatgccctcgccctcctacaggtcccatataagtttcatctttgtctcatggacattcagatgcccgaaatggatgggtttgaggctaccaagcaaataagggcaatggaagcgaaggcaaatgagcaggcagtcgcctgtgacaattcagaaatagatggtgcgacaagggcagcaagatggcgcctgcctgttcttgcaatgaccgccgatgtcatccaggccacccatgaagagtgcacgaagtgcggtatggatgggtacgtcacaaagcccttcgaggagaagcagctcttccaggcgttgcagaagttcttggaccccggcatgtcctgctaacgccgaagtgatgcgttggaggtgaggcactattctcctctattctgtaattccctaaccttggccgcaacctgatccccaagaaagaccgtgcagcgcgggctgctcgtcgatcatgccagcggggaacagcaggcagacaaggcagcacgcaccacgggccttcgctggtctgcctgcctgtgcaggcgtcgtgtaaatgtattgtatttgcagggatactgtttacagcgctagtatgccccgtgccacaatgtccgagctacctgtggctgatgcacgttgcgcataggtggttttttttgtacagcttccaccatttttgtgctccagatcagaccaccgaaggaggcaagcatgctcgctggtgcagtgcagcactggaaggaaaacctgacttcctgagagtagatttttgctgtttaattgcattgggatttatgatgtattataatcagataaatgtgtgatgtaagctggcgtaattggcccaatgcatttccattgttatggatgagttgaaatggcattggttagacacttagactacactattgggtgtatgcccttccacagttccattttccctgcaaaatatcaaaatgtgcaaagggatagtggaatcatggcttgaattatatgaattttctttggtgtttttttcccgtatcgaagctcgactataacattagaagaaagcatctggaggcatgtttaagttttggttattacacactataaaatacaag

SEQ ID NO: 52546 - DNA, 2628 bp, Zea Mays
tcgttttctcatcatatggaaatcgaaacatctcgacttcgcagctgccgatcgttcccgtacgtgttgccatgcggccatgcccatgatgtcgcttttcaagctcccgcgcccgtggcaatacaagcgcatgcgcatccggcgtcccggcggcgagtcgagaggacggcgtcgcattgaggaggcagtgtaagcaggcggcgccatgcacggttccttccttgcccgtgcccccgcgatgagattcagatgtcgctttggcgagacgacgagatcgtcagagggagatcgatcatcgccgggcccgccaccaaaagaaagaggcctcggactgttgcacatgcagacatgcagtagtgcatgcatgtactggaggggactttgattggtttggcggcctctgcatcgctgcctgcctgccaccaccaaaatagaccgaaatttagtgggcggaaaaacgcatgggacgctttctgcacttggaaacagcacgcatcggactatggtcggaggatccctgggccgtcgtcccgatcacgatcggtgtcgccaacgaacaggccatcgcgtgtccgttcaatccaaaccctccaccatcagaaaaggctagaaaggtaactagggttcgctacgtcgcccaccgtctccacccaggaccgccgccctcatccgtctcccctgtcttcctcgccctcgtctacctcgtgctcgtcggaaaaaacagctcaggaccgccgctcgtctgtttggttgaagtcgaagcacccaggaccgccgctctggacctcgcgtggttgaagtcgaagcaccagtggcctctccttggtttcactctcctcgcgtaggatctgctaccaggaacgcccgtgaagcgagcgctgctgccagcgatgtcagagaagcgagcgcttgttcttgcggctacctgcttgagatgtgaccagaatccattgatatagtgtactcggtgcatggcagctacctgcttcctcactttttcatcacaagtttgttttgggatctttcgcctcaagtttcatctagctaccttcaacaaatccttcaatctccatggctacatcggtacttctcctattccaccttatgccactactagtagtgtttttattcttgagtagagcattttgctttcaactagcatgtctaattgcatataaattacatattctagatatcaaatcaatatactaacgaggaggaaattaaaaggaagagaaagaagcgaaagagagttgttgtattagctgtgtctattatggctataattgcaaattggtatcaacggaggagacctagacacatcgtagatgctaacgaagttcaagagagaaatgtcgagtgcagaaaacaaatgctacgtaatatgtaccagggttcaaatgtctattgctatgacagtttgcgcctaactaagagatcttttagtgacttgagtgccatcttacgggaaaagagtggcctacaggataccctaaatgtgtcggtagaagaaaagtttgcaatttttctgcttatagtaggtcataacaccaaaatgaggctgatccgtagcacttatgggtggtcccttgaaccaatcagtcgacacttcaacgaagtgcttagagggattctatctttaagtcatgagttcatcaagcttcctaatccagaaaccactctacctgaggatccaaagtggaaatggtttgaggactgcctaggtgcactagatggcacacatatcgatgtgaatgttccattgactgaccaaggtaggtacagaaataggaagcaacgaatcaccactaatgtattaggggtttgtgatcgacaaatgaagtttttgtatgtcttggctggatgggaagggtcggcttcggattcacgcatactacgtgatgccatgtcacgggaggactcatttgttgttcctagtggtaaatactatctagtggatgctggatatacaaatggtccgggatttcttgccccgtaccgatctacacggtaccacttgaatgaatgggctattcaaggcaacaatccatctactgcgagagagttattcaacctacgccatgcaacagctaggaatgtgatagagagaacttttgggctattgaagatgagatgggcaatcttgaggaccagctcatattttgatttagaaaaccagattaggatcatccatgcttgctgcatattgcataattttttaagggatagacaaagagatatggacgatattctaatacatgaagttgatagtctcatctctgctgctcctgctgaaaatcaaggagaaatgagtatgattacgcatgttcaatcaactaatgagtggggttattttagagacaccaaagctagtgaaatgtttgttgattatcaagcgaggcgtggtcaaagctcatagttgacaagaaaacaaggggctatgttccttggaatgatgagatggataaggtactccttgatacatttgtggactattacaataaaggtgatagatgtcagaatgggtggaagtctcatgtatacacagctgctgtgaagaatgtttgtgagaagtgtaatgtcaccattacaaaggaaaatattagctctcgcagcaagacctttgat

SEQ ID NO: 52547 - DNA, 2090 bp, Zea Mays
cgcagatccctgtcggcagtcgcgcactgttgaggagccagagttgccgacgcccgacgaggtggttggctggtcgccatggaacttgacccggtagccgaggccgagcacgaggagcacttgttggaaacccataacgaggaagaagatgctgctcaagccctgttcggttgtagctctgctgctctccgtcgggatgctgcagcggctccttccggcgatgttgggggaacgggctccggcagtgcgacccgtaccgaggcaagcacggataaccaggggcctccagttctccagtctgggaggactttgaacaggtgttcaactttgagaatggtaagagggtaagaactcatgccatttgtcatcactgcaaacaacaattctctgctaaatcatctgttggcactgggcactgcttaggcacaaggatagttgtaaggttaagaaagagcgcactggcactcagtctatacttaagtacaattcagatggttctctgttgcgttgggagtactctagtgaagttgcacgcactgaacttgtccgattaattgctagagaggatcttccattgtcgtttggtgagtctgatgctttttcaggagtacatagctcgtgcccataaccctagatttgttaaatcttctaggcaaacaactgctagagactttgtgaaacactataatgggcgtgtagagaagttaattgaggtctttaaaactggggtatcctctgttgcccttacctctgacatttggtctggaaaggctaaagaggattacatttctgttgttgctcactttgtgaaccctaattgggagttagagaaaaggttgcttggtctaaggccaattgaagacgaccatactggtaagaacattgctgaacgtgtttccttggtggtagatgagtatggcttaactgataagatctttgcaattactcttgacaatgcttcatctaacaaaactgccatgtcatatcttatacctttgttctctagttaccttggcatacctgactatgaattagatgatactcataatatgtcctctattctgttgcatcaacgatgtgcttgccacattattaatctcattgttaaatctggtttgaaacggttgaactcatgtgttaatgattttagaactgctatcacttatttgaattcttctaatcaacgtattgctgcatataagagctattgtttgagtatgggtatccgtcctcggaagtttggtgtcgatatggatgtgaggtggaattctacttacattatgcttaaacatgtgttgcctcatcgtagcaccttctctgttttcatcaaaacccaacttatcagttgtatgaagccaagtttggtgctgtgtgatcgagcacatatcatcaacctagtggtacttcaggtaagggtattgaagcttgggatgccatttatggtgatgacataccaggtacctctgtctctattacatcttctgcagctatatctgagctgtcttcctacctggacagtgacactgtatcccagtttggttctgatttcagtattctcagttggtggcatcagcatacgattacatatcctattctttctatactagctaaggatgtgttgattgttcctgcttctaccatatcttcggaatctacctttagtcttgctggtagggtgatcgaggatcggcgacgacggctaacctatgatatggtggaaatcttgtcctgtatcaaggattgggagttagctgattcccacatgcagcactgcgtcgacaaggagacaaaggaatttgaagatgaacttgagaatatgaacctggatgaagttgtagctcctagacccgggacaagtaggattagatgaaattgcctgccactctgtcaggctgtttgtgtgagtgtggtgttcatcctcaaactgtgaattgtgatgtaaatatgtaatgaacattggacaatgaaacttttggagctggatgtactcttttccttcctagggttttctcacgagttgtgagtttttacctaggaaggtttttaatgaggcagcattgcactaaggctccactaaatccctctacttc

SEQ ID NO: 52548 - DNA, 779 bp, Zea Mays
gttccgatttccaaatagacgaaagacttatcagttgtatgaagccaagtttggtgctgtgtgatcgagcacatatcatcaacctagtggtacttcaggtaagggtattgaagcttgggatgccatttatggtgatgacataccaggtacctctgtctctattacatcttctgcagctatatctgagctgtcttcctacctggacagtgacactgtatcccagtttggttctgatttcagtattctcagttggtggcatcagcatacgattacatatcctattctttctatactagctaaggatgtgttgattgttcctgcttctaccatatcttcggaatctacctttagtcttgctggtagggtgatcgaggatcggcgacgacggctaacctatgatatggtggaaatcttgtcctgtatcaaggattgggagttagctgattcccacatgcagcactgcgtcgacaaggagacaaaggaatttgaagatgaacttgagaatatgaacctggatgaagttgtagctcctagacccgggacaagtaggattagatgaaattgcctgccactctgtcaggctgtttgtgtgagtgtggtgttcatcctcaaactgtgaattgtgatgtaaatatgtaatgaacattggacaatgaaacttttggagctggatgtactcttttccttcctagggttttctcacgagttgtgagtttttacctaggaaggtttttaatgaggcagcattgcactaaggctccactaaatccctctacttc

SEQ ID NO: 52549 - DNA, 1838 bp, Zea Mays
ctaagcaggaaaatagcttgagatgggaaagggaggatttttggtacagatatgattttttacttggaaaacgatggcgaactttctgctcgatgcaagcactgcattgcattgcaggtaggcgttaagaaagttcgaatgggcatatatctccgaacaccttgggcactctagcctatgagatggatcatggatgacacggagatggagacagcatgatcctgcagctcgcaatcttgacgcctccgccgtcagcatagaatagcagtgtcattctaaactggcagatcagccgaaaagatccccaggataatcattaacgattacacagtaagtaattagcaattcagcacgcctgcacatattttttcctacaaaattaattacaccatggattagcttgatgaaacgagaggtcatacagtactatccagtcaggttgttccgaattcaacagagggagggagtcaacaaaggccctccattcgggaatgaacgtggcttgatttgttaatggcgctgcgagtgccgtgtgccatcagtcgcgacctagaggctttacaccgtcctctaatttccagttaaaaacacaaatcgagaccactcttgagtttcgcgtgactaacatggttaatattgctatataaaaagataaagagatcattttgcgtgaaatcaaatgtaactctttatcaaaaggggttacaaatgaaagtagtaacaaccatgtagacaatttaccaggaaaggaatgcagtaaacgctggacaaagtaaaaaaacagctagccagatgggcctgcagattcagagtctttactttaaatatttggattttttttcaaaaaaaaaaaagagtgcctctctagataaaacagtgcataattcaaaaaggccgagtcctaggtttcttaaaatcaattttgacgttcatagaagataccaagtctggaggctggggcttcattgctagggatgatactggagcagttttggcagcaggaacaaggaacatccaatccctagcaaacccccttcaagctgaagctaccgtttgcttccaggcaataaaatttgcagttgaaaaaaatataatgtacattgaatcggatactgattgtcaagttctgaagactgcactgttatcaaaggattgggatgctgcctttaaaggtgttgtgatcagggaggtcaagttcttaatctcatcagattttagtgttgtcaaaattagtcatgcaccacgttcatgtaatgttgtagctcactgtttagctagcgagggagttggtatgcttcatggtgcatcttttgtttggttagataactttcctggtcatgtaacaaacttggtagccagtgatgttacgctgtgctcagattaaaagaagtttgttgtgttagagaaaagagttgttacatggttgccccctaccatttatccttatcttttaaaagtttacatgtatggccttccatgcccctatattgttaccaacacttacttgttcggttattttcaatccatatggattggaggggattgatacggattggagaggattttgacttactagggatttaaaccccctcaatccatatggattagggtacaaccgaacaagccttaatagtgttaactcagcccacaaaatgacgttcatatctcagcattattgtccctccttttatcatgctgttgagaccgtccgtacgaccgtaccaacccagttggaaccagaccaacagctaatagttatttagatggtatgtaaggaactaactacgctgttagctaagaacaatagaaccttagctagggatgaaaatgagtatcca

SEQ ID NO: 52550 - DNA, 1332 bp, Zea Mays
gtccatgtctcccaaattggatgcctgctgttctctactgctagtacaagttactatgcttgtcattaactcgaattgacagccccgtcttgataagaggcgattagatcactagatccaatcttcaggtgaaaacggtaaaagttagcaacctttcattaaatgttttgaaaagagagctcacagagttctttagtttctctggggatatagaatatgttgaaatgcaaagtgaatctgaatggtcacagcttgcttatgtcacatttaaagactcacagggagcagacactgctgttcttctctcgggggcaacaattgttgatcgtgctgtcattataactcctgctgagaactatcagctgcctcctgaagcacacaaacaattatcgggagcaaacgtctctactgaatcagcagtcaggaaggcagaagatgttgtcagcagcatgttggccaagggatttgtgctcagcaaagatgctctcaacttggcaagatccttcgacgagcgtcacaatatcctatccaatgctactgccactgttgcatctctagaccgccagtatggcctgagtgaaaagatcaatctgggaagggccattgttggcagcaaggtcaaggaggtggatgaacgctaccaggtctcagaactcacaaagtctgccttggctgctgctgagcagaaagccagctttgcaggttctgctatactgagtaaccaatatgtctcagttggtgcctcttggctaacaagtgcattcactttggtaacaaaagcggcaggtgacatgacctccatggccaaagacaaggtagagagagccgaggaggagagaaaggccatcatgtgggaggagaggaatgggctggtgagcgattatgcaaagatccatcttgacgagccctcttcatgggagcccgcagttctgcctttggaatcagtggatgaacagaagctccaggctgtctgatccacaaaaccgaatgccaatcgttgtcgcacgtaattcttttgcagctcgtcctatatatagatttattctttttcgtcgatgcagtggatcaaaacaaatgcgcttatcagccatagcgccatgtaaattttctgaaagttgctcccgtgttattaccaggttttctttctttcttagtttggagaaagagtggtgctaccagcattgctgctctaaactactgtgtgtgtgtgaatggagtactactgtacttgtgtctacttgagtactacagaaacagaatacaacttccttcgttagatacagattgatttaaaattgagttgaaccacttgtgcaaaaaaaaaaaaaaaaa

SEQ ID NO: 52551 - DNA, 1402 bp, Zea Mays
gacatttcgtgcatcatgcgtgcgcgccgttcctccggaagcctgccgccgctgctaggaaactctgggcgcaaattgagtccacccgcggtttcgtgtgtttgtcgttggattctgtagtttggtggcatggtgtgcttggttgaggacatgtcgattggctatttggctgcaccttttttcccattttcctttcaggtgaaaacggtaaaagttagcaacctttcattaaatgttttgaaaagagagctcacagagttctttagtttctctggggatatagaatatgttgaaatgcaaagtgaatctgaatggtcacagcttgcttatgtcacatttaaagactcacagggagcagacactgctgttcttctctcgggggcaacaattgttgatcgtgctgtcattataactcctgctgagaactatcagctgcctcctgaagcacacaaacaattatcgggagcaaacgtctctactgaatcagcagtcaggaaggcagaagatgttgtcagcagcatgttggccaagggatttgtgctcagcaaagatgctctcaacttggcaagatccttcgacgagcgtcacaatatcctatccaatgctactgccactgttgcatctctagaccgccagtatggcctgagtgaaaagatcaatctgggaagggccattgttggcagcaaggtcaaggaggtggatgaacgctaccaggtctcagaactcacaaagtctgccttggctgctgctgagcagaaagccagctttgcaggttctgctatactgagtaaccaatatgtctcagttggtgcctcttggctaacaagtgcattcactttggtaacaaaagcggcaggtgacatgacctccatggccaaagacaaggtagagagagccgaggaggagagaaaggccatcatgtgggaggagaggaatgggctggtgagcgattatgcaaagatccatcttgacgagccctcttcatgggagcccgcagttctgcctttggaatcagtggatgaacagaagctccaggctgtctgatccacaaaaccgaatgccaatcgttgtcgcacgtaattcttttgcagctcgtcctatatatagatttattctttttcgtcgatgcagtggatcaaaacaaatgcgcttatcagccatagcgccatgtaaattttctgaaagttgctcccgtgttattaccaggttttctttctttcttagtttggagaaagagtggtgctaccagcattgctgctctaaactactgtgtgtgtgtgaatggagtactactgtacttgtgtctacttgagtactacagaaacagaatacaacttccttcgttagatacagattgatttaaaattgagttgaaccacttgtgcaaaaaaaaaaaaaaaaa

SEQ ID NO: 52552 - DNA, 1272 bp, Zea Mays
ctcgacgtggtcggccgtgggctcagggcaggcttaggcgattagcaaccggaggcgtttccgaggaggtgaaaacggtaaaagttagcaacctttcattaaatgttttgaaaagagagctcacagagttctttagtttctctggggatatagaatatgttgaaatgcaaagtgaatctgaatggtcacagcttgcttatgtcacatttaaagactcacagggagcagacactgctgttcttctctcgggggcaacaattgttgatcgtgctgtcattataactcctgctgagaactatcagctgcctcctgaagcacacaaacaattatcgggagcaaacgtctctactgaatcagcagtcaggaaggcagaagatgttgtcagcagcatgttggccaagggatttgtgctcagcaaagatgctctcaacttggcaagatccttcgacgagcgtcacaatatcctatccaatgctactgccactgttgcatctctagaccgccagtatggcctgagtgaaaagatcaatctgggaagggccattgttggcagcaaggtcaaggaggtggatgaacgctaccaggtctcagaactcacaaagtctgccttggctgctgctgagcagaaagccagctttgcaggttctgctatactgagtaaccaatatgtctcagttggtgcctcttggctaacaagtgcattcactttggtaacaaaagcggcaggtgacatgacctccatggccaaagacaaggtagagagagccgaggaggagagaaaggccatcatgtgggaggagaggaatgggctggtgagcgattatgcaaagatccatcttgacgagccctcttcatgggagcccgcagttctgcctttggaatcagtggatgaacagaagctccaggctgtctgatccacaaaaccgaatgccaatcgttgtcgcacgtaattcttttgcagctcgtcctatatatagatttattctttttcgtcgatgcagtggatcaaaacaaatgcgcttatcagccatagcgccatgtaaattttctgaaagttgctcccgtgttattaccaggttttctttctttcttagtttggagaaagagtggtgctaccagcattgctgctctaaactactgtgtgtgtgtgaatggagtactactgtacttgtgtctacttgagtactacagaaacagaatacaacttccttcgttagatacagattgatttaaaattgagttgaaccacttgtgcaaaaaaaaaaaaaaaaa

SEQ ID NO: 52553 - DNA, 1542 bp, Zea Mays
ttcaaggcttctgaggtgcgtctcccgaccgcgaccacctcgacttcggatacctcggcatctaggggctaacgtcttcttggagcacacaccggtctctactccagccggtgttctcattcaaattgcggggagcatacaacatgatggcaaagctctcccgtgagcagttagagaggggcgtcatctgctcctctgctggaaaccatgccccagggcgttgctctttctgctcagagactgggttgtgatgctgtcatcgtcatgcccgtgacgacaccagaaatcaagtggaaatcagtggagcggttgggagcaacggtggtccttgagggggactcatatgatgaagctcagtcatacgcaaaattacgatgtcagcaagaagaccgcacattcatacctccctttgaccatcctgatgtcatcactgggcaaggaactgtcggcatggaaattgttcggcaactgcaaggtccactgcatgcaatatttgtacctgttggaggcggtggattaattgctggaattgctgcctatgtaaaacgggttcgcccagaggtgaaaataattggagtggaaccctccgatgcaaatgcaatggcattatccttatatcatggtaagagggtcatgttggagcatgttggtgggtttgctgatggtgttgctgtcaaagctgtaggggaggaaacatttcgcctgtgcagagagcttgtagatggcattgttatggtcagtcgagacgctatttgtgcttcgataaaggatatgtttgaggagaaaagaagtatccttgaacctgccggtgcccttgcattggctggggctgaagcctactgcaaatactataacttgaaaggagatactgtggttgcaataactagtggggcgaatatgaactttgaccgacttagacttgtaactgagctagcagatgttggccgaaaacgggaagcagtgttagctacatttctgcccgaggagcatggaagcttcaaaaaattcacagaattggttggcaggatgaatattactgaatttaaatacagatatgattttaatgcaaaggatgcccttgttctttacagtgttggcatttacactgacaatgagcttggagcaatggtggatcgcatggaattggcgaaactgaagactgttaatctaactgataatgatttagcaaaggaccaccttagatactttattggaggtagatcagaaataaaagatgaacttgtttaccggttcatttttccagaaaggcctggtgcccttatgaaatttttggatgcattcagccctcgttggaacatcagtctttttcattaccgtgcacagggtgaaactggagcaaatgtattagttggtatacaagtgccgccagtggacttcgatgaattcaagagtcatgctgataatctcggatggtgagagcgacaccggcgattgtggattgatgttgtgtactactagtgttgcattattcacagttccagcggtctactaaaatggtggggcgacggaggtaaagttttt

SEQ ID NO: 52554 - DNA, 1681 bp, Zea Mays
ttcaaggcttctgaggtgcgtctcccgaccgcgaccacctcgacttcggatacctcggcatctaggggctaacgtcttcttggagcacacaccggtctctactccagccggtgttctcattcaaattgcggggagcatacaacatgatggcaaagctctcccgtgagcagttagagaggggcgtcatctgctcctctgctggaaaccatgccccagggcgttgctctttctgctcagagactgggttgtgatgctgtcatcgtcatgcccgtgacgacaccagaaatcaagtggaaatcagtggagcggttgggagcaacggtggtccttgagggggactcatatgatgaagctcagtcatacgcaaaattacgatgtcagcaagaagaccgcacattcatacctccctttgaccatcctgatgtcatcactgggcaaggaactgtcggcatggaaattgttcggcaactgcaaggtccactgcatgcaatatttgtacctgttggaggcggtggattaattgctggaattgctgcctatgtaaaacgggttcgcccagaggtgaaaataattggagtggaaccctccgatgcaaatgcaatggcattatccttatatcatggtaagagggtcatgttggagcatgttggtgggtttgctgatggtgttgctgtcaaagctgtaggggaggaaacatttcgcctgtgcagagagcttgtagatggcattgttatggtcagtcgagacgctatttgtgcttcgataaaggatatgtttgaggagaaaagaagtatccttgaacctgccggtgcccttgcattggctggggctgaagcctactgcaaatactataacttgaaaggagatactgtggttgcaataactagtggggcgaatatgaactttgaccgacttagacttgtaactgagctagcagatgttggccgaaaacgggaagcagtgttagctacatttctgcccgaggagcatggaagcttcaaaaaattcacagaattggttggcaggatgaatattactgaatttaaatacagatatgattttaatgcaaaggatgcccttgttctttacagtgttggcatttacactgacaatgagcttggagcaatggtggatcgcatggaattggcgaaactgaagactgttaatctaactgataatgatttagcaaaggaccaccttagatactttattggaggtagatcagaaataaaagatgaacttgtttaccggttcatttttccagaaaggcctggtgcccttatgaaatttttggatgcattcagccctcgttggaacatcagtctttttcattaccgtgcacagggtgaaactggagcaaatgtattagttggtatacaagtgccgccagtggacttcgatgaattcaagagtcatgctgataatctcgggtacgagtacatgtcagagaacaacaatgagatatacaggttgctgttgcgtgacccagaggtctagtataataggtgccgatgggttcctttgctcctataatttggtgtcacttttgaagtaaggttccactccaagatggtgagagcgacaccggcgattgtggattgatgttgtgtactactagtgttgcattattcacagttccagcggtctactaaaatggtggggcgacggaggtaaagttttt

SEQ ID NO: 52555 - DNA, 1688 bp, Zea Mays
ttcaaggcttctgaggtgcgtctcccgaccgcgaccacctcgacttcggatacctcggcatctaggggctaacgtcttcttggagcacacaccggtctctactccagccggtgttctcattcaaattgcggggagcatacaacatgatggcaaagctctcccgtgagcagttagagaggggcgtcatctgctcctctgctggaaaccatgccccagggcgttgctctttctgctcagagactgggttgtgatgctgtcatcgtcatgcccgtgacgacaccagaaatcaagtggaaatcagtggagcggttgggagcaacggtggtccttgagggggactcatatgatgaagctcagtcatacgcaaaattacgatgtcagcaagaagaccgcacattcatacctccctttgaccatcctgatgtcatcactgggcaaggaactgtcggcatggaaattgttcggcaactgcaaggtccactgcatgcaatatttgtacctgttggaggcggtggattaattgctggaattgctgcctatgtaaaacgggttcgcccagaggtgaaaataattggagtggaaccctccgatgcaaatgcaatggcattatccttatatcatggtaagagggtcatgttggagcatgttggtgggtttgctgatggtgttgctgtcaaagctgtaggggaggaaacatttcgcctgtgcagagagcttgtagatggcattgttatggtcagtcgagacgctatttgtgcttcgataaaggatatgtttgaggagaaaagaagtatccttgaacctgccggtgcccttgcattggctggggctgaagcctactgcaaatactataacttgaaaggagatactgtggttgcaataactagtggggcgaatatgaactttgaccgacttagacttgtaactgagctagcagatgttggccgaaaacgggaagcagtgttagctacatttctgcccgaggagcatggaagcttcaaaaaattcacagaattggttggcaggatgaatattactgaatttaaatacagatatgattttaatgcaaaggatgcccttgttctttacagtgttggcatttacactgacaatgagcttggagcaatggtggatcgcatggaattggcgaaactgaagactgttaatctaactgataatgatttagcaaaggaccaccttagatactttattggaggtagatcagaaataaaagatgaacttgtttaccggttcatttttccagaaaggcctggtgcccttatgaaatttttggatgcattcagccctcgttggaacatcagtctttttcattaccgtgcacagggtgaaactggagcaaatgtattagttggtatacaagtgccgccagtggacttcgatgaattcaagagtcatgctgataatctcgggtacgagtacatgtcagagaacaacaatgagatatacaggttgctgttgcgtgacccagaggtctagtataataggtgccgatgggttcctttgctcctataatttggtgtcacttttgaagtaaggttccactccaaggtagaagatggtgagagcgacaccggcgattgtggattgatgttgtgtactactagtgttgcattattcacagttccagcggtctactaaaatggtggggcgacggaggtaaagttttt

SEQ ID NO: 52556 - DNA, 1663 bp, Zea Mays
ttcaaggcttctgaggtgcgtctcccgaccgcgaccacctcgacttcggatacctcggcatctaggggctaacgtcttcttggagcacacaccggtctctactccagccggtgttctcattcaaattgcggggagcatacaacatgatggcaaagctctcccgtgagcagttagagaggggcgtcatctgctcctctgctggaaaccatgccccagggcgttgctctttctgctcagagactgggttgtgatgctgtcatcgtcatgcccgtgacgacaccagaaatcaagtggaaatcagtggagcggttgggagcaacggtggtccttgagggggactcatatgatgaagctcagtcatacgcaaaattacgatgtcagcaagaagaccgcacattcatacctccctttgaccatcctgatgtcatcactgggcaaggaactgtcggcatggaaattgttcggcaactgcaaggtccactgcatgcaatatttgtacctgttggaggcggtggattaattgctggaattgctgcctatgtaaaacgggttcgcccagaggtgaaaataattggagtggaaccctccgatgcaaatgcaatggcattatccttatatcatggtaagagggtcatgttggagcatgttggtgggtttgctgatggtgttgctgtcaaagctgtaggggaggaaacatttcgcctgtgcagagagcttgtagatggcattgttatggtcagtcgagacgctatttgtgcttcgataaaggatatgtttgaggagaaaagaagtatccttgaacctgccggtgcccttgcattggctggggctgaagcctactgcaaatactataacttgaaaggagatactgtggttgcaataactagtggggcgaatatgaactttgaccgacttagacttgtaactgagctagcagatgttggccgaaaacgggaagcagtgttagctacatttctgcccgaggagcatggaagcttcaaaaaattcacagaattggttggcaggatgaatattactgaatttaaatacagatatgattttaatgcaaaggatgcccttgttctttacagtgttggcatttacactgacaatgagcttggagcaatggtggatcgcatggaattggcgaaactgaagactgttaatctaactgataatgatttagcaaaggaccaccttagatactttattggaggtagatcagaaataaaagatgaacttgtttaccggttcatttttccagaaaggcctggtgcccttatgaaatttttggatgcattcagccctcgttggaacatcagtctttttcattaccgtgcacagggtgaaactggagcaaatgtattagttggtatacaagtgccgccagtggacttcgatgaattcaagagtcatgctgataatctcgggtacgagtacatgtcagagaacaacaatgagatatacaggttgctgttgcgtgacccagaggtctagtataataggtgccgatgggttcctttgctcctataatttggtgtcacttttgaaatggtgagagcgacaccggcgattgtggattgatgttgtgtactactagtgttgcattattcacagttccagcggtctactaaaatggtggggcgacggaggtaaagttttt

SEQ ID NO: 52557 - DNA, 1617 bp, Zea Mays
ttcaaggcttctgaggtgcgtctcccgaccgcgaccacctcgacttcggatacctcggcatctaggggctaacgtcttcttggagcacacaccggtctctactccagccggtgttctcattcaaattgcggggagcatacaacatgatggcaaagctctcccgtgagcagttagagaggggcgtcatctgctcctctgctggaaaccatgccccagggcgttgctctttctgctcagagactgggttgtgatgctgtcatcgtcatgcccgtgacgacaccagaaatcaagtggaaatcagtggagcggttgggagcaacggtggtccttgagggggactcatatgatgaagctcagtcatacgcaaaattacgatgtcagcaagaagaccgcacattcatacctccctttgaccatcctgatgtcatcactgggcaaggaactgtcggcatggaaattgttcggcaactgcaaggtccactgcatgcaatatttgtacctgttggaggcggtggattaattgctggaattgctgcctatgtaaaacgggttcgcccagaggtgaaaataattggagtggaaccctccgatgcaaatgcaatggcattatccttatatcatggtaagagggtcatgttggagcatgttggtgggtttgctgatggtgttgctgtcaaagctgtaggggaggaaacatttcgcctgtgcagagagcttgtagatggcattgttatggtcagtcgagacgctatttgtgcttcgataaaggatatgtttgaggagaaaagaagtatccttgaacctgccggtgcccttgcattggctggggctgaagcctactgcaaatactataacttgaaaggagatactgtggttgcaataactagtggggcgaatatgaactttgaccgacttagacttgtaactgagctagcagatgttggccgaaaacgggaagcagtgttagctacatttctgcccgaggagcatggaagcttcaaaaaattcacagaattggttggcaggatgaatattactgaatttaaatacagatatgattttaatgcaaaggatgcccttgttctttacagtgttggcatttacactgacaatgagcttggagcaatggtggatcgcatggaattggcgaaactgaagactgttaatctaactgataatgatttagcaaaggaccaccttagatactttattggaggtagatcagaaataaaagatgaacttgtttaccggttcatttttccagaaaggcctggtgcccttatgaaatttttggatgcattcagccctcgttggaacatcagtctttttcattaccgtgcacagggtgaaactggagcaaatgtattagttggtatacaagtgccgccagtggacttcgatgaattcaagagtcatgctgataatctcgggtacgagtacatgtcagagaacaacaatgagatatacaggttgctgttgcgtgacccagaggtctagtataatagatggtgagagcgacaccggcgattgtggattgatgttgtgtactactagtgttgcattattcacagttccagcggtctactaaaatggtggggcgacggaggtaaagttttt

SEQ ID NO: 52558 - DNA, 1907 bp, Zea Mays
acacgaggtaaacaaatcagaggaatttgacgaggccaccgtcaccaccatggcggccgccgccaccaccgcttcgccctcggcctccttccctgcggcatccctccgtcgcgacgcgcgcaggacctcatgcgtagccgccgccgccgcggcgacgacggccgctgaggcggggctcgcggccgtcccggcgccgccgccaacgccgatggttcgggtggtgccggagtcactgcagcgggaaagcgggtgcctcgtggagggatttagggcgcgcggtgcgtgcgcggcggatggggaggggtttggggacgccgcgggggaaggaggaggccccggcgcgatggagtacctgaccagcgtgctgtcatccaaggtgtacgacgtggcaatcgaatcaccgctgcagctcgcctccaagctctcccaccgcctcggggtcaacatctggatcaagcgcgaggacctgcagccggtgttctcattcaaattgcggggagcatacaacatgatggcaaagctctcccgtgagcagttagagaggggcgtcatctgctcctctgctggaaaccatgccccagggcgttgctctttctgctcagagactgggttgtgatgctgtcatcgtcatgcccgtgacgacaccagaaatcaagtggaaatcagtggagcggttgggagcaacggtggtccttgagggggactcatatgatgaagctcagtcatacgcaaaattacgatgtcagcaagaagaccgcacattcatacctccctttgaccatcctgatgtcatcactgggcaaggaactgtcggcatggaaattgttcggcaactgcaaggtccactgcatgcaatatttgtacctgttggaggcggtggattaattgctggaattgctgcctatgtaaaacgggttcgcccagaggtgaaaataattggagtggaaccctccgatgcaaatgcaatggcattatccttatatcatggtaagagggtcatgttggagcatgttggtgggtttgctgatggtgttgctgtcaaagctgtaggggaggaaacatttcgcctgtgcagagagcttgtagatggcattgttatggtcagtcgagacgctatttgtgcttcgataaaggatatgtttgaggagaaaagaagtatccttgaacctgccggtgcccttgcattggctggggctgaagcctactgcaaatactataacttgaaaggagatactgtggttgcaataactagtggggcgaatatgaactttgaccgacttagacttgtaactgagctagcagatgttggccgaaaacgggaagcagtgttagctacatttctgcccgaggagcatggaagcttcaaaaaattcacagaattggttggcaggatgaatattactgaatttaaatacagatatgattttaatgcaaaggatgcccttgttctttacagtgttggcatttacactgacaatgagcttggagcaatggtggatcgcatggaattggcgaaactgaagactgttaatctaactgataatgatttagcaaaggaccaccttagatactttattggaggtagatcagaaataaaagatgaacttgtttaccggttcatttttccagaaaggcctggtgcccttatgaaatttttggatgcattcagccctcgttggaacatcagtctttttcattaccgtgcacagggtgaaactggagcaaatgtattagttggtatacaagtgccgccagtggacttcgatgaattcaagagtcatgctgataatctcggatggtgagagcgacaccggcgattgtggattgatgttgtgtactactagtgttgcattattcacagttccagcggtctactaaaatggtggggcgacggaggtaaagttttt

SEQ ID NO: 52559 - DNA, 2095 bp, Zea Mays
cttgaagcagcctttagctttacccaccgcataaacacgactacacgaggtaaacaaatcagaggaatttgacgaggccaccgtcaccaccatggcggccgccgccaccaccgcttcgccctcggcctccttccctgcggcatccctccgtcgcgacgcgcgcaggacctcatgcgtagccgccgccgccgcggcgacgacggccgctgaggcggggctcgcggccgtcccggcgccgccgccaacgccgatggttcgggtggtgccggagtcactgcagcgggaaagcgggtgcctcgtggagggatttagggcgcgcggtgcgtgcgcggcggatggggaggggtttggggacgccgcgggggaaggaggaggccccggcgcgatggagtacctgaccagcgtgctgtcatccaaggtgtacgacgtggcaatcgaatcaccgctgcagctcgcctccaagctctcccaccgcctcggggtcaacatctggatcaagcgcgaggacctgcagccggtgttctcattcaaattgcggggagcatacaacatgatggcaaagctctcccgtgagcagttagagaggggcgtcatctgctcctctgctggaaaccatgccccagggcgttgctctttctgctcagagactgggttgtgatgctgtcatcgtcatgcccgtgacgacaccagaaatcaagtggaaatcagtggagcggttgggagcaacggtggtccttgagggggactcatatgatgaagctcagtcatacgcaaaattacgatgtcagcaagaagaccgcacattcatacctccctttgaccatcctgatgtcatcactgggcaaggaactgtcggcatggaaattgttcggcaactgcaaggtccactgcatgcaatatttgtacctgttggaggcggtggattaattgctggaattgctgcctatgtaaaacgggttcgcccagaggtgaaaataattggagtggaaccctccgatgcaaatgcaatggcattatccttatatcatggtaagagggtcatgttggagcatgttggtgggtttgctgatggtgttgctgtcaaagctgtaggggaggaaacatttcgcctgtgcagagagcttgtagatggcattgttatggtcagtcgagacgctatttgtgcttcgataaaggatatgtttgaggagaaaagaagtatccttgaacctgccggtgcccttgcattggctggggctgaagcctactgcaaatactataacttgaaaggagatactgtggttgcaataactagtggggcgaatatgaactttgaccgacttagacttgtaactgagctagcagatgttggccgaaaacgggaagcagtgttagctacatttctgcccgaggagcatggaagcttcaaaaaattcacagaattggttggcaggatgaatattactgaatttaaatacagatatgattttaatgcaaaggatgcccttgttctttacagtgttggcatttacactgacaatgagcttggagcaatggtggatcgcatggaattggcgaaactgaagactgttaatctaactgataatgatttagcaaaggaccaccttagatactttattggaggtagatcagaaataaaagatgaacttgtttaccggttcatttttccagaaaggcctggtgcccttatgaaatttttggatgcattcagccctcgttggaacatcagtctttttcattaccgtgcacagggtgaaactggagcaaatgtattagttggtatacaagtgccgccagtggacttcgatgaattcaagagtcatgctgataatctcgggtacgagtacatgtcagagaacaacaatgagatatacaggttgctgttgcgtgacccagaggtctagtataataggtgccgatgggttcctttgctcctataatttggtgtcacttttgaagtaaggttccactccaaggtagaagatggtgagagcgacaccggcgattgtggattgatgttgtgtactactagtgttgcattattcacagttccagcggtctactaaaatggtggggcgacggaggtaaagttttt

SEQ ID NO: 52560 - DNA, 2049 bp, Zea Mays
ttcaaggcttctgaggtgcgtctcccgaccgcgaccacctcgacttcggatacctcggcatctaggggctaacgtcttcttggagcacacaccggtctctactccagccggtgttctcattcaaattgcggggagcatacaacatgatggcaaagctctcccgtgagcagttagagaggggcgtcatctgctcctctgctggaaaccatgccccagggcgttgctctttctgctcagagactgggttgtgatgctgtcatcgtcatgcccgtgacgacaccagaaatcaagtggaaatcagtggagcggttgggagcaacggtggtccttgagggggactcatatgatgaagctcagtcatacgcaaaattacgatgtcagcaagaagaccgcacattcatacctccctttgaccatcctgatgtcatcactgggcaaggaactgtcggcatggaaattgttcggcaactgcaaggtccactgcatgcaatatttgtacctgttggaggcggtggattaattgctggaattgctgcctatgtaaaacgggttcgcccagaggtgaaaataattggagtggaaccctccgatgcaaatgcaatggcattatccttatatcatggtaagagggtcatgttggagcatgttggtgggtttgctgatggtgttgctgtcaaagctgtaggggaggaaacatttcgcctgtgcagagagcttgtagatggcattgttatggtcagtcgagacgctatttgtgcttcgataaaggatatgtttgaggagaaaagaagtatccttgaacctgccggtgcccttgcattggctggggctgaagcctactgcaaatactataacttgaaaggagatactgtggttgcaataactagtggggcgaatatgaactttgaccgacttagacttgtaactgagctagcagatgttggccgaaaacgggaagcagtgttagctacatttctgcccgaggagcatggaagcttcaaaaaattcacagaattggttggcaggatgaatattactgaatttaaatacagatatgattttaatgcaaaggatgcccttgttctttacagtgttggcatttacactgacaatgagcttggagcaatggtggatcgcatggaattggcgaaactgaagactgttaatctaactgataatgatttagcaaaggaccaccttagatactttaaaggcctggtgcccttatgaaatttttggatgcattcagccctcgttggaacatcagtctttttcattaccgtgcacagggtgaaactggagcaaatgtattagttggtatacaagtgccgccagtggacttcgatgaattcaagagtcatgctgataatctcgggtacgagtacatgtcagagaacaacaatgagatatacaggttgctgttgcgtgacccagaggtctagtataataggtgccgatgggttcctttgctcctataatttggtgtcacttttgaagtaaggttccactccaaggtagaaggtgcaagtttcttcttcagttggaatgcagtcattgccaaatataccttcaatgtgccatctcaccatctgtttactcagttagattttagcgtatcagtcgtgtatttttgttgttgtgcttcgtgaactcacttatccgtttgcggcacctagagtgtgtcaaataatgataactaatatgatatcgaaatgtctgataatatatatgtatttgtgatttgggcagcatcgttgttgtaaagtgtaaacccttgtccctttgcaatattgagttcttttaacaaatttgagatatttgaatttgtttgtttatagtctaatacgagttgtaaaagtagatgaaggcgtattaaacctcgtttgtgccgttagctgttgtctagagttaaaccacgaaaaaatcttccattttattaacatactcgattaaagtaaaccgtgtccgggagagtgccagttttattctagagggatgagcatcatgtgactaaaaatcaatgatgtgtgatgtaatgttctttgtttc

SEQ ID NO: 52561 - DNA, 2445 bp, Zea Mays
ctaacgagccttgatgcatggatgttggagagatcctatatttatggagaaaataaagcatttaaatcagtttttttgtttccatacatgttttcgttatgaaatagatcaatgatttacactaaaattcatacccatttacgctgttttgtttctctctctctctatacatatatatatgtatgcatgtttgtatgcttacatatgtatggttatatatatcacaatatcgctaaaccaaatatatgtggatttactgatctactcttgttgaaacgttgctatattagaaaaccgtgtagaccgtttaattctgtttaaacacgtctaaacactaaacagagcctcgccgttcgtctaccgttatgttaacactgctttgaatccacccgctgccattactgaatgggtgaccgaccttggtgtctcgacctcaacaccaacaacgccggtgttctcattcaaattgcggggagcatacaacatgatggcaaagctctcccgtgagcagttagagaggggcgtcatctgctcctctgctggaaaccatgccccagggcgttgctctttctgctcagagactgggttgtgatgctgtcatcgtcatgcccgtgacgacaccagaaatcaagtggaaatcagtggagcggttgggagcaacggtggtccttgagggggactcatatgatgaagctcagtcatacgcaaaattacgatgtcagcaagaagaccgcacattcatacctccctttgaccatcctgatgtcatcactgggcaaggaactgtcggcatggaaattgttcggcaactgcaaggtccactgcatgcaatatttgtacctgttggaggcggtggattaattgctggaattgctgcctatgtaaaacgggttcgcccagaggtgaaaataattggagtggaaccctccgatgcaaatgcaatggcattatccttatatcatggtaagagggtcatgttggagcatgttggtgggtttgctgatggtgttgctgtcaaagctgtaggggaggaaacatttcgcctgtgcagagagcttgtagatggcattgttatggtcagtcgagacgctatttgtgcttcgataaaggatatgtttgaggagaaaagaagtatccttgaacctgccggtgcccttgcattggctggggctgaagcctactgcaaatactataacttgaaaggagatactgtggttgcaataactagtggggcgaatatgaactttgaccgacttagacttgtaactgagctagcagatgttggccgaaaacgggaagcagtgttagctacatttctgcccgaggagcatggaagcttcaaaaaattcacagaattggttggcaggatgaatattactgaatttaaatacagatatgattttaatgcaaaggatgcccttgttctttacagtgttggcatttacactgacaatgagcttggagcaatggtggatcgcatggaattggcgaaactgaagactgttaatctaactgataatgatttagcaaaggaccaccttagatactttattggaggtagatcagaaataaaagatgaacttgtttaccggttcatttttccagaaaggcctggtgcccttatgaaatttttggatgcattcagccctcgttggaacatcagtctttttcattaccgtgcacagggtgaaactggagcaaatgtattagttggtatacaagtgccgccagtggacttcgatgaattcaagagtcatgctgataatctcgggtacgagtacatgtcagagaacaacaatgagatatacaggttgctgttgcgtgacccagaggtctagtataataggtgccgatgggttcctttgctcctataatttggtgtcacttttgaagtaaggttccactccaaggtagaaggtgcaagtttcttcttcagttggaatgcagtcattgccaaatataccttcaatgtgccatctcaccatctgtttactcagttagattttagcgtatcagtcgtgtatttttgttgttgtgcttcgtgaactcacttatccgtttgcggcacctagagtgtgtcaaataatgataactaatatgatatcgaaatgtctgataatatatatgtatttgtgatttgggcagcatcgttgttgtaaagtgtaaacccttgtccctttgcaatattgagttcttttaacaaatttgagatatttgaatttgtttgtttatagtctaatacgagttgtaaaagtagatgaaggcgtattaaacctcgtttgtgccgttagctgttgtctagagttaaaccacgaaaaaatcttccattttattaacatactcgattaaagtaaaccgtgtccgggagagtgccagttttattctagagggatgagcatcatgtgactaaaaatcaatgatgtgtgatgtaatgttctttgtttc

SEQ ID NO: 52562 - DNA, 2515 bp, Zea Mays
aaaccttgaagcagcctttagctttacccaccgcataaacacgactacacgaggtaaacaaatcagaggaatttgacgaggccaccgtcaccaccatggcggccgccgccaccaccgcttcgccctcggcctccttccctgcggcatccctccgtcgcgacgcgcgcaggacctcatgcgtagccgccgccgccgcggcgacgacggccgctgaggcggggctcgcggccgtcccggcgccgccgccaacgccgatggttcgggtggtgccggagtcactgcagcgggaaagcgggtgcctcgtggagggatttagggcgcgcggtgcgtgcgcggcggatggggaggggtttggggacgccgcgggggaaggaggaggccccggcgcgatggagtacctgaccagcgtgctgtcatccaaggtgtacgacgtggcaatcgaatcaccgctgcagctcgcctccaagctctcccaccgcctcggggtcaacatctggatcaagcgcgaggacctgcagccggtgttctcattcaaattgcggggagcatacaacatgatggcaaagctctcccgtgagcagttagagaggggcgtcatctgctcctctgctggaaaccatgccccagggcgttgctctttctgctcagagactgggttgtgatgctgtcatcgtcatgcccgtgacgacaccagaaatcaagtggaaatcagtggagcggttgggagcaacggtggtccttgagggggactcatatgatgaagctcagtcatacgcaaaattacgatgtcagcaagaagaccgcacattcatacctccctttgaccatcctgatgtcatcactgggcaaggaactgtcggcatggaaattgttcggcaactgcaaggtccactgcatgcaatatttgtacctgttggaggcggtggattaattgctggaattgctgcctatgtaaaacgggttcgcccagaggtgaaaataattggagtggaaccctccgatgcaaatgcaatggcattatccttatatcatggtaagagggtcatgttggagcatgttggtgggtttgctgatggtgttgctgtcaaagctgtaggggaggaaacatttcgcctgtgcagagagcttgtagatggcattgttatggtcagtcgagacgctatttgtgcttcgataaaggatatgtttgaggagaaaagaagtatccttgaacctgccggtgcccttgcattggctggggctgaagcctactgcaaatactataacttgaaaggagatactgtggttgcaataactagtggggcgaatatgaactttgaccgacttagacttgtaactgagctagcagatgttggccgaaaacgggaagcagtgttagctacatttctgcccgaggagcatggaagcttcaaaaaattcacagaattggttggcaggatgaatattactgaatttaaatacagatatgattttaatgcaaaggatgcccttgttctttacagtgttggcatttacactgacaatgagcttggagcaatggtggatcgcatggaattggcgaaactgaagactgttaatctaactgataatgatttagcaaaggaccaccttagatactttattggaggtagatcagaaataaaagatgaacttgtttaccggttcatttttccagaaaggcctggtgcccttatgaaatttttggatgcattcagccctcgttggaacatcagtctttttcattaccgtgcacagggtgaaactggagcaaatgtattagttggtatacaagtgccgccagtggacttcgatgaattcaagagtcatgctgataatctcgggtacgagtacatgtcagagaacaacaatgagatatacaggttgctgttgcgtgacccagaggtctagtataataggtgccgatgggttcctttgctcctataatttggtgtcacttttgaagtaaggttccactccaaggtagaaggtgcaagtttcttcttcagttggaatgcagtcattgccaaatataccttcaatgtgccatctcaccatctgtttactcagttagattttagcgtatcagtcgtgtatttttgttgttgtgcttcgtgaactcacttatccgtttgcggcacctagagtgtgtcaaataatgataactaatatgatatcgaaatgtctgataatatatatgtatttgtgatttgggcagcatcgttgttgtaaagtgtaaacccttgtccctttgcaatattgagttcttttaacaaatttgagatatttgaatttgtttgtttatagtctaatacgagttgtaaaagtagatgaaggcgtattaaacctcgtttgtgccgttagctgttgtctagagttaaaccacgaaaaaatcttccattttattaacatactcgattaaagtaaaccgtgtccgggagagtgccagttttattctagagggatgagcatcatgtgactaaaaatcaatgatgtgtgatgtaatgttctttgtttc

SEQ ID NO: 52563 - DNA, 1473 bp, Zea Mays
acacgaggtaaacaaatcagaggaatttgacgaggccaccgtcaccaccatggcggccgccgccaccaccgcttcgccctcggcctccttccctgcggcatccctccgtcgcgacgcgcgcaggacctcatgcgtagccgccgccgccgcggcgacgacggccgctgaggcggggctcgcggccgtcccggcgccgccgccaacgccgatggttcgggtggtgccggagtcactgcagcgggaaagcgggtgcctcgtggagggatttagggcgcgcggtgcgtgcgcggcggatggggaggggtttggggacgccgcgggggaaggaggaggccccggcgcgatggagtacctgaccagcgtgctgtcatccaaggtgtacgacgtggcaatcgaatcaccgctgcagctcgcctccaagctctcccaccgcctcggggtcaacatctggatcaagcgcgaggacctgcagccggtgttctcattcaaattgcggggagcatacaacatgatggcaaagctctcccgtgagcagttagagaggggcgtcatctgctcctctgctggaaaccatgccccagggcgttgctctttctgctcagagactgggttgtgatgctgtcatcgtcatgcccgtgacgacaccagaaatcaagtggaaatcagtggagcggttgggagcaacggtggtccttgagggggactcatatgatgaagctcagtcatacgcaaaattacgatgtcagcaagaagaccgcacattcatacctccctttgaccatcctgatgtcatcactgggcaaggaactgtcggcatggaaattgttcggcaactgcaaggtccactgcatgcaatatttgtacctgttggaggcggtggattaattgctggaattgctgcctatgtaaaacgggttcgcccagaggtgaaaataattggagtggaaccctccgatgcaaatgcaatggcattatccttatatcatggtaagagggtcatgttggagcatgttggtgggtttgctgatggtgttgctgtcaaagctgtaggggaggaaacatttcgcctgtgcagagagcttgtagatggcattgttatggtcagtcgagacgctatttgtgcttcgataaaggatatgtttgaggagaaaagaagtatccttgaacctgccggtgcccttgcattggctggggctgaagcctactgcaaatactataacttgaaaggagatactgtggttgcaataactagtggggcgaatatgaactttgaccgacttagacttgtaactgagctagcagatgttggccgaaaacgggaagcagtgttagctacatttctgcccgaggagcatggaagcttcaaaaaattcacagaattggttggcaggatgaatattactgaatttaaatacagatatgattttaatgcaaaggatgcccttgttctttacagatgcttaagttattatt

SEQ ID NO: 52564 - DNA, 969 bp, Zea Mays
tataaatggggccaatcacttgtgttctgactggtctgaccacattcgtgagaaggatggcatctgggctgtgcttgcatggctttcaattattgctttcaagaataaggacaaccttggaggagataagcttgtcactgttgaagatattgtccgtcagcactgggccacatatggtcgccattactacacacgctatgactatgagaatgttgatgcaggggctgctaaggagcttatggcaaacctagtaagcatgcagtcatcactttctgatgttaacaagttggtcaaggagatccggtctgatgtttctgaagtagttgcagctgacgagtttgagtacaaggatcctgttgatggctctgtgtccaagcaccagggcatccgatacctctttggagatggttcacgactggtgttccgcctctctggaaccggttctgttggtgccaccatccgtgtctacatcgagcagtacgagagggactcctctaagaccggcagggattcacaggacgcccttgctccgctggttgatgttgcgctcaagctctccaagatgcaagagtacactggacgctctgcccccaccgtcatcacataaattttgaagagtgttttagaatgagttgaggcgcttacacaaactttcattccggcctcttgttccatagtttttcttgcatgttacatctcaccgatgaataaaatgtatgtatcagacttgtctcgtttttttgcccatccaagcagcaaattagccgctggcacagcatgcggtaataatcttgtcacagtgctgtaattgggagcgtttttcttgttagaagtgtttctggtttgtttgagcatttgcggatcgatttttctttctgaagagtatataaacattttactcacctgtatacactgtcgcagtgtcactaatgttctgatggctgtttagactatgtccaataagcgttt

SEQ ID NO: 52565 - DNA, 1678 bp, Zea Mays
gctaactatttactcaccgtttattttaacagcttcagtggacccgaaggcccctttgatgtggatgtttttgactctagtgtagattacataaagttaatgaagacaatttttgacttcgaagcaataaaaaagctgctgacctccccaaagtttacattctgttatgatgcactccatggtgttgcgggagcttatgccaaacacatctttgtggaagagcttggtgctgatgaaagctcactgttgaattgtgtcccgaaagtaatgagttcttctattgtcacaaatatctacttataatgtggctaggtattaattcatcacttatatttttgcaggaggactttggaggtggtcatccggatcctaaccttacctatgcaaaagagttggttgaacgcatgggtcttggaaagtcatcctcaaatgttgagcctcctgaatttggtgctgcagctgatggagatgctgaccgcaacatgattcttggtaaaagattctttgtgacaccgtcggactctgttgccattatcgcagccaatgctgttcaatcaattccttactttgcttctggcctgaagggagttgccaggagcatgccaacatctgctgcccttgatgttgttgcaaagaatttgaaccttaagttctttgaggtgcctactggatggaagttttttgggaatttgatggatgctggaatgtgctcaatctgtggtgaagaaagctttggcactgggtctgaccacattcgtgagaaggatggcatctgggctgtgcttgcatggctttcaattattgctttcaagaataaggacaaccttggaggagataagcttgtcactgttgaagatattgtccgtcagcactgggccacatatggtcgccattactacacacgctatgactatgagaatgttgatgcaggggctgctaaggagcttatggcaaacctagtaagcatgcagtcatcactttctgatgttaacaagttggtcaaggagatccggtctgatgtttctgaagtagttgcagctgacgagtttgagtacaaggatcctgttgatggctctgtgtccaagcaccagggcatccgatacctctttggagatggttcacgactggtgttccgcctctctggaaccggttctgttggtgccaccatccgtgtctacatcgagcagtacgagagggactcctctaagaccggcagggattcacaggacgcccttgctccgctggttgatgttgcgctcaagctctccaagatgcaagagtacactggacgctctgcccccaccgtcatcacataaattttgaagagtgttttagaatgagttgaggcgcttacacaaactttcattccggcctcttgttccatagtttttcttgcatgttacatctcaccgatgaataaaatgtatgtatcagacttgtctcgtttttttgcccatccaagcagcaaattagccgctggcacagcatgcggtaataatcttgtcacagtgctgtaattgggagcgtttttcttgttagaagtgtttctggtttgtttgagcatttgcggatcgatttttctttctgaagagtatataaacattttactcacctgtatacactgtcgcagtgtcactaatgttctgatggctgtttagactatgtccaataagcgttt

SEQ ID NO: 52566 - DNA, 881 bp, Zea Mays
attgtattaccaccttctccatgaactcaatcatcccttcatacttctcaaaatcaacttgaatttcaagggaaacttttgagttaaatgctaattacaaacaaaaaagtgaagcccttcacaaactttatcctaaaaccccccaaaattatctaaacatggtaaaagattgaggaagaatatcaattttttgcttagcagacctaaataacatacagtaaataaagaatagagagtgggttggttctctagagtgcgtacaagatacataaaaattgttagaaggtaaaaaacctataaaaacatatttttatgaaaatggctcgcaaattaaaatttagagagtgaatttaagtaagacccttgggatgctcgtaaacaatttcaggcctagtgcagtagtgagagatgtttgtttcactgggtcaccaaatcataggttcgaggcagcctttatgtggttttcctcggtttatcccttatctaaaccgtattcatgtgagaacctccaggatttttggtttgtcccttggagatgctcttagatcagtatctaagcaaggcttatagtagaaagaaaataaaaaatacctcacatacatgtacgaacttcattcaattaaaataaaaagggttagtcagacatgatgataccatgtccacacattaaatacatggatttctgtgtacattattgtcaatgtactatttatattagataataattcttatatagtttgaagataggttgggaaaaacttaacatacgcagaatttcaaattttatgaacacgtgcatttcagttatagaatatagaaactaaaatggttgaacctaaaagatccgagtaagcaaaattacctacaactgtaggttgatg

SEQ ID NO: 52567 - DNA, 913 bp, Zea Mays
cttaagtcgtcctgtagtggccgtgttcttgtgtatgtgccacgtttgtaagagctgagttcccagaaactttaggctgctagaagaactagaacgtggtgagaagggcattggtgatggaactgtgagctatgggatggatgatgctgatgacatatatatgcggtcctggacaggaactatcattggtcctcccaatactgttcacgagggacgaatctaccaattaaagctgttttgtgatacggattatccagataaaccaccgacagtccgattccagactcggatcaatatgacatgcgtgaaccaagaaactggattggttgaaccaagtctatttcctatgcttggcaagtgggaaagggaacatacaatggaggacatcctgagcagcttaaaaagggagatgtcaactcctcagaaccgcaggctgtaccaacctcatgaagaagctggcaaggtggctagatacaggaaccagatgagcatggccgtcagcgatcttctgcattatgcgctgtagttaatattaattagttaactttgaggtaatgaagatcaaagagtagagcagaaagggctgtcccttagatgtgccgtcatgtaataatgtacatttgaattgagcagcgagatgccgagcttgagcgaaccctctcagggcatgtttaggaacaatcccgttcaattgccttgcttccaaacaagccctgtattaaatcctcctgtagctcaccttattcatgccgccatcgcaataaagtgtcgatgaaactgttaaattgactgcacaccatgtaacatgcaaccgattcgatttctgtgaaggacaacgtgttcagtgtcggctgttccacatgttacactgtgtagtctgttctgtctaggcggctaggcctgttattctttc

SEQ ID NO: 52568 - DNA, 902 bp, Zea Mays
attggatacggccgcccgtcgagcaaggaggagagagcttggtgggagcgggcttggggtcttctgcggttggttggggaacccgatctggcattgcctctgattggaattaacgtcgcatcaggattgccgtgcttgacttattagttcccagaaactttaggctgctagaagaactagaacgtggtgagaagggcattggtgatggaactgtgagctatgggatggatgatgctgatgacatatatatgcggtcctggacaggaactatcattggtcctcccaatactgttcacgagggacgaatctaccaattaaagctgttttgtgatacggattatccagataaaccaccgacagtccgattccagactcggatcaatatgacatgcgtgaaccaagaaactggattggttgaaccaagtctatttcctatgcttggcaagtgggaaagggaacatacaatggaggacatcctgagcagcttaaaaagggagatgtcaactcctcagaaccgcaggctgtaccaacctcatgaaggtaatgaagatcaaagagtagagcagaaagggctgtcccttagatgtgccgtcatgtaataatgtacatttgaattgagcagcgagatgccgagcttgagcgaaccctctcagggcatgtttaggaacaatcccgttcaattgccttgcttccaaacaagccctgtattaaatcctcctgtagctcaccttattcatgccgccatcgcaataaagtgtcgatgaaactgttaaattgactgcacaccatgtaacatgcaaccgattcgatttctgtgaaggacaacgtgttcagtgtcggctgttccacatgttacactgtgtagtctgttctgtctaggcggctaggcctgttattctttc

SEQ ID NO: 52569 - DNA, 1143 bp, Zea Mays
ttggcccctctgctgtatcccttcccctatctgcagcagagcagttcctttcttgctctcctccgctagtccggtaccctctcgacctcggcgtcccaccgaagacgacctcacgcggagctgggaatattccttcgcctccgtgctccctttagcaccaactgtcacggccgcttccagcacgcatcattctcgtctcccgtctcgagagattgcagggggcggcgctcgaagctggaggaagcggacgggttcgcgatggggtccgagggatcctcgggtccggtcgtcgttcccagaaactttaggctgctagaagaactagaacgtggtgagaagggcattggtgatggaactgtgagctatgggatggatgatgctgatgacatatatatgcggtcctggacaggaactatcattggtcctcccaatactgttcacgagggacgaatctaccaattaaagctgttttgtgatacggattatccagataaaccaccgacagtccgattccagactcggatcaatatgacatgcgtgaaccaagaaactggattggttgaaccaagtctatttcctatgcttggcaagtgggaaagggaacatacaatggaggacatcctgagcagcttaaaaagggagatgtcaactcctcagaaccgcaggctgtaccaacctcatgaagctggcaaggtggctagatacaggaaccagatgagcatggccgtcagcgatcttctgcattatgcgctgtagttaatattaattagttaactttgaggtaatgaagatcaaagagtagagcagaaagggctgtcccttagatgtgccgtcatgtaataatgtacatttgaattgagcagcgagatgccgagcttgagcgaaccctctcagggcatgtttaggaacaatcccgttcaattgccttgcttccaaacaagccctgtattaaatcctcctgtagctcaccttattcatgccgccatcgcaataaagtgtcgatgaaactgttaaattgactgcacaccatgtaacatgcaaccgattcgatttctgtgaaggacaacgtgttcagtgtcggctgttccacatgttacactgtgtagtctgttctgtctaggcggctaggcctgttattctttc

SEQ ID NO: 52570 - DNA, 1400 bp, Zea Mays
tcggagtagtcgttttgaggcatgtatcaagatgggatattcaggttgccatgcgatgtggttgtcccagcattgacagaaaggttgtaaactctgggaagcgattgcgggcttatgtaggacttgatgaaggagaggtttgcagccaatgcaatttaagaggaagttgtgatagggcatatgtgaaggctcggaaagaggacgttggaagaactgtggatgttatgcgcatccttttgacttacggtcttgatgttattaccggcaatgtagataatagagcatgcctgaacaaatctgtcaaggaatcaataaagatcctactaagcgaggttgttgaggtggattctaggggacctggttccagcactgtgaaagctgcacagcgcaaaggtcaatctgctgtacccatgaagcagggtgattggaattgtcccaaatgtgactttctgaactttgcaaagaatatcaaatgtttgcgctgcgatggagaattccaagagaggtatcagttgttgcatgaagaccgagagcatctgcctctcaaaaagggtgactggatatgcaaaaggtgcaactttttgaattttgctaagaatacaagatgcttgcaatgtcatgagaaaccaacaaaccgtttactcaacccaggagaatgggagtgtgtctcgtgtaactatgtgaacttcaagaggaatgggttctgcttgaaatgtggctggaaaagaccaaagtctctaaacaatcaagatagtgtcaaattgtgtcatgatttagagcatagtaagaatccacgtatttcatttgttcaagatggtgtccagatgaaggggtggcaaagtctgcaaaagaagggttcaccatccgacacagatttggatttctggagtgcagacgacgaagagggtggtagcagggataatgatacgctgctgcgacagaaggactacagatttcttgagagttttcccattgtcggtggcaggactgctaattcccaagatcttcttgcaagggagaagtggaaggatgaaatgtccaggagaaataaaggccttcaaactacggaatcgcaagaaagcaatcggccttctagccactgccgtcttccaagaagcatggagctggttgactctgatgatgatattgcttcttggttttcgggtggggataataataataggaacctggataaggtataaccagatcttgtaagtggatgcagctcatcaataaaagttgcatcctttggaattattgaaattcaggcaaaaagaattattaaagctcactggagaactgtacaatttaatgtttcggaactttgtttatgggctgctcagagatgatatgattttttgcaaggggtttgtgcctgctctcatgcaattaagttttgg

SEQ ID NO: 52571 - DNA, 2085 bp, Zea Mays
ctaagttggagaaaaagggtagttgggtaacttgaaacctgcctgagtccacctgccggatgcaccgccgccttgccaccgcggccacagcgcccgcgctccggcggttctcgcaccacagcgcgcgtccccagcctgacccaaggtgttagaagagctaagaagcgaccttgctcttgctggagacgctccggcgggtgtggctatagcgcatccgtggccggagtggatttctctgatggagcacctcctccgtcaaggccacgttgacccctccaccttcgccgccgcctcgctgtcttctaaggacgccaacgctgtccgcaccgcctgcctccgattcgggcgccagcggccggagctcatcaggcatgtatcaagatgggatattcaggttgccatgcgatgtggttgtcccagcattgacagaaaggttgtaaactctgggaagcgattgcgggcttatgtaggacttgatgaaggagaggtttgcagccaatgcaatttaagaggaagttgtgatagggcatatgtgaaggctcggaaagaggacgttggaagaactgtggatgttatgcgcatccttttgacttacggtcttgatgttattaccggcaatgtagataatagagcatgcctgaacaaatctgtcaaggaatcaataaagatcctactaagcgaggttgttgaggtggattctaggggacctggttccagcactgtgaaagctgcacagcgcaaaggtcaatctgctgtacccatgaagcagggtgattggaattgtcccaaatgtgactttctgaactttgcaaagaatatcaaatgtttgcgctgcgatggagaattccaagagaggtatcagttgttgcatgaagaccgagagcatctgcctctcaaaaagggtgactggatatgcaaaaggtgcaactttttgaattttgctaagaatacaagatgcttgcaatgtcatgagaaaccaacaaaccgtttactcaacccaggagaatgggagtgtgtctcgtgagtgcctatttctactacactattatatatctccttatttgttgaacatgttcatgaaggacaagcctggcacagtggtgacaagccttttcactgagtcggttattccttcctcagaccccacttgtgtggaagccgccagcactcggtctgtccttttatttgtttgaacatttgaagtgttctgatgcctactgccaatacaagttacaagcttatagttggagatgatgttagcgctgtgtggctatcctttcactgctgtgattttatttctaatacatttgagaaaatggaagataactatgttcatgtgttatgttcaatttcaggtgtaactatgtgaacttcaagaggaatgggttctgcttgaaatgtggctggaaaagaccaaagtctctaaacaatcaagatagtgtcaaattgtgtcatgatttagagcatagtaagaatccacgtatttcatttgttcaagatggtgtccagatgaaggggtggcaaagtctgcaaaagaagggttcaccatccgacacagatttggatttctggagtgcagacgacgaagagggtggtagcagggataatgatacgctgctgcgacagaaggactacagatttcttgagagttttcccattgtcggtggcaggactgctaattcccaagatcttcttgcaagggagaagtggaaggatgaaatgtccaggagaaataaaggccttcaaactacggaatcgcaagaaagcaatcggccttctagccactgccgtcttccaagaagcatggagctggttgactctgatgatgatattgcttcttggttttcgggtggggataataataataggaacctggataaggtataaccagatcttgtaagtggatgcagctcatcaataaaagttgcatcctttggaattattgaaattcaggcaaaaagaattattaaagctcactggagaactgtacaatttaatgtttcggaactttgtttatgggctgctcagagatgatatgattttttgcaaggggtttgtgcctgctctcatgcaattaagttttgg

SEQ ID NO: 52572 - DNA, 1526 bp, Zea Mays
ctaagttggagaaaaagggtagttgggtaacttgaaacctgcctgagtccacctgccggatgcaccgccgccttgccaccgcggccacagcgcccgcgctccggcggttctcgcaccacagcgcgcgtccccagcctgacccaaggcatgtatcaagatgggatattcaggttgccatgcgatgtggttgtcccagcattgacagaaaggttgtaaactctgggaagcgattgcgggcttatgtaggacttgatgaaggagaggtttgcagccaatgcaatttaagaggaagttgtgatagggcatatgtgaaggctcggaaagaggacgttggaagaactgtggatgttatgcgcatccttttgacttacggtcttgatgttattaccggcaatgtagataatagagcatgcctgaacaaatctgtcaaggaatcaataaagatcctactaagcgaggttgttgaggtggattctaggggacctggttccagcactgtgaaagctgcacagcgcaaaggtcaatctgctgtacccatgaagcagggtgattggaattgtcccaaatgtgactttctgaactttgcaaagaatatcaaatgtttgcgctgcgatggagaattccaagagaggtatcagttgttgcatgaagaccgagagcatctgcctctcaaaaagggtgactggatatgcaaaaggtgcaactttttgaattttgctaagaatacaagatgcttgcaatgtcatgagaaaccaacaaaccgtttactcaacccaggagaatgggagtgtgtctcgtgtaactatgtgaacttcaagaggaatgggttctgcttgaaatgtggctggaaaagaccaaagtctctaaacaatcaagatagtgtcaaattgtgtcatgatttagagcatagtaagaatccacgtatttcatttgttcaagatggtgtccagatgaaggggtggcaaagtctgcaaaagaagggttcaccatccgacacagatttggatttctggagtgcagacgacgaagagggtggtagcagggataatgatacgctgctgcgacagaaggactacagatttcttgagagttttcccattgtcggtggcaggactgctaattcccaagatcttcttgcaagggagaagtggaaggatgaaatgtccaggagaaataaaggccttcaaactacggaatcgcaagaaagcaatcggccttctagccactgccgtcttccaagaagcatggagctggttgactctgatgatgatattgcttcttggttttcgggtggggataataataataggaacctggataaggtataaccagatcttgtaagtggatgcagctcatcaataaaagttgcatcctttggaattattgaaattcaggcaaaaagaattattaaagctcactggagaactgtacaatttaatgtttcggaactttgtttatgggctgctcagagatgatatgattttttgcaaggggtttgtgcctgctctcatgcaattaagttttgg

SEQ ID NO: 52573 - DNA, 1736 bp, Zea Mays
ctaagttggagaaaaagggtagttgggtaacttgaaacctgcctgagtccacctgccggatgcaccgccgccttgccaccgcggccacagcgcccgcgctccggcggttctcgcaccacagcgcgcgtccccagcctgacccaaggcatgtatcaagatgggatattcaggttgccatgcgatgtggttgtcccagcattgacagaaaggttgtaaactctgggaagcgattgcgggcttatgtaggacttgatgaaggagaggtttgcagccaatgcaatttaagaggaagttgtgatagggcatatgtgaaggctcggaaagaggacgttggaagaactgtggatgttatgcgcatccttttgacttacggtcttgatgttattaccggcaatgtagataatagagcatgcctgaacaaatctgtcaaggaatcaataaagatcctactaagcgaggttgttgaggtggattctaggggacctggttccagcactgtgaaagctgcacagcgcaaaggtcaatctgctgtacccatgaagcagggtgattggaattgtcccaaatgtgactttctgaactttgcaaagaatatcaaatgtttgcgctgcgatggagaattccaagagaggtatcagttgttgcatgaagaccgagagcatctgcctctcaaaaagggtgactggatatgcaaaagaatacaagatgcttgcaatgtcatgagaaaccaacaaaccgtttactcaacccaggagaatgggagtgtgtctcgtgagtgcctatttctactacactattatatatctccttatttgttgaacatgttcatgaaggacaagcctggcacagtggtgacaagccttttcactgagtcggttattccttcctcagaccccacttgtgtggaagccgccagcactcggtctgtccttttatttgtttgaacatttgaagtgttctgatgcctactgccaatacaagttacaagcttatagttggagatgatgtgtaactatgtgaacttcaagaggaatgggttctgcttgaaatgtggctggaaaagaccaaagtctctaaacaatcaagatagtgtcaaattgtgtcatgatttagagcatagtaagaatccacgtatttcatttgttcaagatggtgtccagatgaaggggtggcaaagtctgcaaaagaagggttcaccatccgacacagatttggatttctggagtgcagacgacgaagagggtggtagcagggataatgatacgctgctgcgacagaaggactacagatttcttgagagttttcccattgtcggtggcaggactgctaattcccaagatcttcttgcaagggagaagtggaaggatgaaatgtccaggagaaataaaggccttcaaactacggaatcgcaagaaagcaatcggccttctagccactgccgtcttccaagaagcatggagctggttgactctgatgatgatattgcttcttggttttcgggtggggataataataataggaacctggataaggtataaccagatcttgtaagtggatgcagctcatcaataaaagttgcatcctttggaattattgaaattcaggcaaaaagaattattaaagctcactggagaactgtacaatttaatgtttcggaactttgtttatgggctgctcagagatgatatgattttttgcaaggggtttgtgcctgctctcatgcaattaagttttgg

SEQ ID NO: 52574 - DNA, 1861 bp, Zea Mays
ctaagttggagaaaaagggtagttgggtaacttgaaacctgcctgagtccacctgccggatgcaccgccgccttgccaccgcggccacagcgcccgcgctccggcggttctcgcaccacagcgcgcgtccccagcctgacccaaggcatgtatcaagatgggatattcaggttgccatgcgatgtggttgtcccagcattgacagaaaggttgtaaactctgggaagcgattgcgggcttatgtaggacttgatgaaggagaggtttgcagccaatgcaatttaagaggaagttgtgatagggcatatgtgaaggctcggaaagaggacgttggaagaactgtggatgttatgcgcatccttttgacttacggtcttgatgttattaccggcaatgtagataatagagcatgcctgaacaaatctgtcaaggaatcaataaagatcctactaagcgaggttgttgaggtggattctaggggacctggttccagcactgtgaaagctgcacagcgcaaaggtcaatctgctgtacccatgaagcagggtgattggaattgtcccaaatgtgactttctgaactttgcaaagaatatcaaatgtttgcgctgcgatggagaattccaagagaggtatcagttgttgcatgaagaccgagagcatctgcctctcaaaaagggtgactggatatgcaaaaggtgcaactttttgaattttgctaagaatacaagatgcttgcaatgtcatgagaaaccaacaaaccgtttactcaacccaggagaatgggagtgtgtctcgtgagtgcctatttctactacactattatatatctccttatttgttgaacatgttcatgaaggacaagcctggcacagtggtgacaagccttttcactgagtcggttattccttcctcagaccccacttgtgtggaagccgccagcactcggtctgtccttttatttgtttgaacatttgaagtgttctgatgcctactgccaatacaagttacaagcttatagttggagatgatgttagcgctgtgtggctatcctttcactgctgtgattttatttctaatacatttgagaaaatggaagataactatgttcatgtgttatgttcaatttcaggtgtaactatgtgaacttcaagaggaatgggttctgcttgaaatgtggctggaaaagaccaaagtctctaaacaatcaagatagtgtcaaattgtgtcatgatttagagcatagtaagaatccacgtatttcatttgttcaagatggtgtccagatgaaggggtggcaaagtctgcaaaagaagggttcaccatccgacacagatttggatttctggagtgcagacgacgaagagggtggtagcagggataatgatacgctgctgcgacagaaggactacagatttcttgagagttttcccattgtcggtggcaggactgctaattcccaagatcttcttgcaagggagaagtggaaggatgaaatgtccaggagaaataaaggccttcaaactacggaatcgcaagaaagcaatcggccttctagccactgccgtcttccaagaagcatggagctggttgactctgatgatgatattgcttcttggttttcgggtggggataataataataggaacctggataaggtataaccagatcttgtaagtggatgcagctcatcaataaaagttgcatcctttggaattattgaaattcaggcaaaaagaattattaaagctcactggagaactgtacaatttaatgtttcggaactttgtttatgggctgctcagagatgatatgattttttgcaaggggtttgtgcctgctctcatgcaattaagttttgg

SEQ ID NO: 52575 - DNA, 2098 bp, Zea Mays
ctaagttggagaaaaagggtagttgggtaacttgaaacctgcctgagtccacctgccggatgcaccgccgccttgccaccgcggccacagcgcccgcgctccggcggttctcgcaccacagcgcgcgtccccagcctgacccaagagagcaattccaggtgttagaagagctaagaagcgaccttgctcttgctggagacgctccggcgggtgtggctatagcgcatccgtggccggagtggatttctctgatggagcacctcctccgtcaaggccacgttgacccctccaccttcgccgccgcctcgctgtcttctaaggacgccaacgctgtccgcaccgcctgcctccgattcgggcgccagcggccggagctcatcaggcatgtatcaagatgggatattcaggttgccatgcgatgtggttgtcccagcattgacagaaaggttgtaaactctgggaagcgattgcgggcttatgtaggacttgatgaaggagaggtttgcagccaatgcaatttaagaggaagttgtgatagggcatatgtgaaggctcggaaagaggacgttggaagaactgtggatgttatgcgcatccttttgacttacggtcttgatgttattaccggcaatgtagataatagagcatgcctgaacaaatctgtcaaggaatcaataaagatcctactaagcgaggttgttgaggtggattctaggggacctggttccagcactgtgaaagctgcacagcgcaaaggtcaatctgctgtacccatgaagcagggtgattggaattgtcccaaatgtgactttctgaactttgcaaagaatatcaaatgtttgcgctgcgatggagaattccaagagaggtatcagttgttgcatgaagaccgagagcatctgcctctcaaaaagggtgactggatatgcaaaaggtgcaactttttgaattttgctaagaatacaagatgcttgcaatgtcatgagaaaccaacaaaccgtttactcaacccaggagaatgggagtgtgtctcgtgagtgcctatttctactacactattatatatctccttatttgttgaacatgttcatgaaggacaagcctggcacagtggtgacaagccttttcactgagtcggttattccttcctcagaccccacttgtgtggaagccgccagcactcggtctgtccttttatttgtttgaacatttgaagtgttctgatgcctactgccaatacaagttacaagcttatagttggagatgatgttagcgctgtgtggctatcctttcactgctgtgattttatttctaatacatttgagaaaatggaagataactatgttcatgtgttatgttcaatttcaggtgtaactatgtgaacttcaagaggaatgggttctgcttgaaatgtggctggaaaagaccaaagtctctaaacaatcaagatagtgtcaaattgtgtcatgatttagagcatagtaagaatccacgtatttcatttgttcaagatggtgtccagatgaaggggtggcaaagtctgcaaaagaagggttcaccatccgacacagatttggatttctggagtgcagacgacgaagagggtggtagcagggataatgatacgctgctgcgacagaaggactacagatttcttgagagttttcccattgtcggtggcaggactgctaattcccaagatcttcttgcaagggagaagtggaaggatgaaatgtccaggagaaataaaggccttcaaactacggaatcgcaagaaagcaatcggccttctagccactgccgtcttccaagaagcatggagctggttgactctgatgatgatattgcttcttggttttcgggtggggataataataataggaacctggataaggtataaccagatcttgtaagtggatgcagctcatcaataaaagttgcatcctttggaattattgaaattcaggcaaaaagaattattaaagctcactggagaactgtacaatttaatgtttcggaactttgtttatgggctgctcagagatgatatgattttttgcaaggggtttgtgcctgctctcatgcaattaagttttgg

SEQ ID NO: 52576 - DNA, 6079 bp, Zea Mays
tttgctatgcatcgtgcaatatcagcaagttcgacaatctgcaaaaattgaaagaaattattattacaacaactccatttgatatctagactctagtactctacaattcaaggtggagtcaaatatccagagtagaagtgttaaaacacctgaatttgttttccttacaggcaaacaaagaataatgtgaacacaagaatgtgaaccttttcaactactatcaataccgactaaaaaatctatggtccactcttacactagcaaggactgtaaaattactgttcttagatgaaccatcaattctggtatgacttgtgtgttggagtcatgcaccccttgtgttgtctgcttgccgtctaaatcttgtgctctctctagcataaccacatatcacagaagttttatatatgttttttcagtctgcacgcccactagtgcagaagacatctcagatcatcaaactatcaccgattcactatgtagcaaacttacttcaaataattctgtcctgaattctgtgaacttccgaaattttcaatttcactgcttccatcagttctaccaaatatttgtcgacacgccactttaatacagtactctcgatactttccgagtaccacacattcaccatgttcgaaacttccatacaaacatatccatgaagactcaagtcagtaatagaatttagaagataagctgatctctttttttgtgaagcgatacaaactattcaaaccccatgacagggtgcagttccattggttcttcaatcctagtgaaaaatataccatatgggaaatttctagcaatgcctcactgatatatggatcctggtcctgggtgaatggaatgatttaggaatcccattgaacagtgctatttcataaactattagagttatagagaccaaactttcaagagagacagagtgaaatgtcgcaaggattaagaactgggtcatagtgactagaagggaaggtcaataagtgagatatcagaaaataattatgtttctcctcacacctataactaggaagcttgcatatctgcaaaagcttgaaactaggcatattgataaaatacaccagaatttaatagactggcagcgtacaactatctaacataattttttttctcgaatacgcagtattagagtatattaggcatgttagagtatattaggcaactcctgatatggttggtttaagattgattgtaatcccgggataatcttccttatatctaggataaccttccttatctctaggatagacttcttgccctccaagtcatgtactcatatatattctccctaaaggctcaatgcaatacatcccacacattatatacattctctacttccttcatgatatcacaagtttaggttttagatccaacaggcgtctcatgctgccacagccgccccgcccccggggagatcgttctccgccggggcagcgccctcctaggatgcgcgcccgatccctctgaccgtcgcgttcatcgtccttgtttccacggtggatccatctaatcctgtcgcgtcatccagcagcaacagtcgggggtgtcgcctgagggtatgtggatccatgagattggggcttctcagtacgccgtcgtggtgatgcctcggacttcagcgccggtcgggccgctctgcgcgccaccatggaggcagcagcaagcgccgacctgcatgtggccctcctccgctcggtccccctccacgccagtcatcgccccttcgccgcggaccggagccacgcctccgcccctccgtcgcgggtcggggctacgccgaatcctgtcatggggcggctctactcttccgccacaggccgggccgtggctcccgctacaaggccacgccgtcgggcctcccctcgcctcagagctatgccacagctcctcgtcgccgggctgcccctcgccatggagcggcactgggctcctcacagtcggttgttcccgcgccatggagctgggctaggccgccggcggcccttgccctgcctcctcgtgtcgtggagacggtcactcctccaatgctggtcgagccctccacgtcgaggtgtgaggagtcttcagtcctatccttggtgtgtatggctcgcgtggagttgtgataaggctgatgcatctatactcactctccattgattttgtctatttggggctgaacgtgatgtggagaaacgagtggagatgggtgtatgcacaacgagagtttctacctagatttgttgttgttgttatgtatattttcctcttttttccgatcagagatcgggtttgcgtcgcccaccatcaatcgactcgcgcgtcctcgacatcggcttcaacaacacggcttcctcattttcttcgacggtgcaactggcgtgacatgcgacgtaaccggaatgcctgcctatgtcgcgcctcttcgtctgcacgtccatctatatcggctcgtcgtcgccaccaccgatcaggaggctccacctttgacatcaccatcgtcgtctccgcctcacacgtcatcgacctgatcaaccgatagcgggcgaaccatcctcccaagacgtttgtcgtccattgcgcgatgcttcgccaagcaagaggaccgtcgctgcgtagcctcctcggtcagcatctacatcaccgtcgactttgttagtgcgtgtctcccgcgcacggtttgagcaagctatttgacacatgcgagctgcgtcggcacacccgtcgttctgcactgcgggtgtcggtgtttagagcccgaccgcacacccagggttacccctcgcggtgcttttgggtaggacagtgctgtcgactgtagctcaatggttcgtgctagatgcacgagagaaggacaagcaattttctacaggttcgggccgcttggagaggcataataccctacttcctggtgtggatctttatgtggtgggttacaagtgaagtctcctaaatggagaaaactaatgagataggtagatggtcgatggaaatgatggggtaccccttaggccttatatactcgatcgtggggcactacatgcgtacatgaggattatgtgtatcctaaataatagtgaaccgactgaactgatcttcctacaatcttgccgacttatccctaattcgcctcgatattcaaggacgccgcacacgggaaagtcgggtgggcgctacggatggcgcacgagtctgacgggtcgcctgggcctgagtctgcttctttctcgggtcggcccattccgccagtaattctgacccgacccacgaagggatggccttgcgaggtagctggcccaaggccccgcgcgaggccttcttgccttctagtggacccgggggatatctgtcccccacaacgggtcctctgcgtgttgtgtcaacaccttgcgcttgtcctaggcgtgccagccatcgtcgccggtctacaccgcatttatcgagttcttcgccaacaaacacctccatcgcgctccactggcgccattgaggctcgtttcccatgcgtcgtggctctcacctccacgactccaggaacctcgaagtgtcgccacgcctacctctccgcttcgttcagcacaacctcgtcgccagcatcatcgtctcgtcctcgactacttcgtctactccgctctgataactgtgtgttgcgtcggcactcccgtcgtgctgcacctcaaccgtcgcggaggccttctctgttggtcctttgagatgatatggttggggccctctacctagtacatctgatgctggcaccaccgacatgtgcattcatccacaacgtgtttccaggcttggcaaacctggaacatgcatcgtccatggctgcttgatgcgtcgaccccgacatcgataccctcatctgcctcgacgcatcgcgcctttgtctacggctgcttctcagcgccaccatcaccacgacgtgctctggcgcgctgcaggccttcctgcgtgccgcaccagcgcccgccacttgtgtggcttgtcttctacgacgtcctcgaccacagctaccctacgcacgacactttgacaacggctccgcgtcctcgtcattggttatctcgacattattggcacaaagggctatcatctgcatgggctactccagtcgcagcattcacattgtcgttccaactgtgagggggatatctccgttattctccagtctgttcgttcgtgttgctaactgttagctacccgtcccttgtaatgggcctggcccatctatgtgatctattaatactcagcctaaccctattctagggttagggtttccaatatggagccaagccttttttctctccctcccagccgccaccccctctcccctaccctcgccggcctcccctgcccggccgcgccggcgccgccagcagtcacaagggacggggaaaagatggtagaatcttatttgtcgaaagacctgtcaaatgtcgcctcatcccttcagtgacataccggatagagttgtgactgcggggggtgttagctacccgtcccttgtaatgggcctagcccagctatgtgatctattaatattcagcccaaccctattctagggttagggtttctaatactaacgctatggccgcgggggggggggggggatgttagagtatattaggcaactctgatatggttggtttaggattgattgtaatcctgggataaccttccttatctctagggtaggcttcttgcccttcaagtcatgtactcatatatattctccctagaggctcaatgcaatacatcccacacattatatgcattctctacttccttcacgcgggagagttgcgtatcattatattaaaaagaaaaaaaaaggcatcaagcccaaaacaaaacaaacacacgcacccaaagatacccctaaaacacaacctacaaacacccaccgacttacactatctaacataataggcaataggttttaacagaataaatcaaaatgcttgaagcacatgatgatacatgctctcttttgcatgtgatatgcagcagcactcatgtgggagcagccagcactgggtttatcctttttttatatgcagcagcagctggatgggagaaaagtcaattgccataaacagcagacaagtataacgatataatcgtttcgatttttgttgtggtcaatagcttacatttcaccggcaaataaaaaaatacatgctactacctccatttctaaatatttgacgcccaatagttcatttttgaactagaaaacggcatatataaaaaaacagagggagtacttctttagtcgcgtattaaatgacgaatttgtagagaaaagagagaagcaaaatagagaaactgcatctcttacctgtggaagatcatcactctcattaattgcatttttaccggctaaaagcatgtctatatgatttgatcttggagttgttattggagacctaggagtcatacttcccgcagatgaagtggccattccatgatcagattttggtccaaaacgagtcttacatgtctgtcatggaccttcggtccatgaggatagctgtcttctccggcgaggttatacccctctgccgcaggcttggttctagggtagcagccctaggcgcttgagagtcattgcaagagagagagagattggtttgataatatattcctccttcatttgtctcctgcgtacaggcctatatataggccaccggttgacaaactaggcaaccactaattaggcaagtgactaattgaaatcatctcccctaaatttaggtctatcaatttagccaccaaatcagtcaccttcctttgccatgccttccttgcacgcgctttcctttgccatgccttccttgtgcgcgctttcctttgccatgccttcctttgccatgccttccttgtgcgcgctttcctttgccatgccttccttgcgtgcgctgctgccagcgcccgtgccttccttgcgcgcgctgctgccagcgccccctgcggcctctcgcttttggcgcacataagtgcgaccccacatgagtgaccgctccctatgatgcccatgacatctccccctcccttgaggaccagcttgtcc

SEQ ID NO: 52577 - DNA, 4339 bp, Zea Mays
gggggtcccgagtcccgactcgcccctccagatccaccaccaccacctcttctcctccagatccaccaccccatcctctccgcagctacagccaggtggagctcggcttagccgtcgacgtggctgggcacgccgggacgggaggatgctgaccaagttcgagacgaagagcaaccgggtgaaggggctgagtttccacccgcgtcggccatggatcctggcgagtctccacagcggggtgatccagatgtgggactaccgcatgggcaccctcctcgaccgcttcgacgagcacgacgggccggttcgcggcgtccacttccacgccactcagcctctcttcgtctccggaggtgatgattataagattaaggtctggaattacaagacgcaccgctgcctcttcacacttcatgggcatcttgactacattcgcaccgtgcaattccatcatgagtacccatggattgtaagtgctagtgacgatcagacaatccggatctggaactggcagtcacgcacctgtgtggctgtgctgactgggcataaccattatgtcatgtgtgcatctttccatcccaaagaagacctagttgtatcggcatcacttgatcagactgtgcgtgtttgggatattggagctctaaggaagaagacagtgtcacctgcggatgacatcctccgtctcacccagatgaacacagatctttttggaggtgttgatgctgtagtgaaatatgtcctcgaaggccatgaccgtggggtcaactgggcctcgtttcatcccactttgccgctcattgtttctggggcagatgaccggcaggtgaagctatggagaatgaacgataccaaggcttgggaagttgatactttaaggggtcacgtgaataatgtgtcctgtgtgatgttccatgcgaagcaagacatcattgtgtctaactcagaagacaaaagcattcgcatttgggatgccacaaagagaactggtatccagacatttagacgggagcacgaccgtttctggattcttgctgctcaccctgaaatgaaccttcttgctgctggccatgacagtggcatgattgtgttcaaattggagagggaacgcccggccttctgcgttagtggtgacactgttttctatgtgaaagatcgatttctccgtttctttgagtactccacccagaaggaagttcaagtggctccaataagaagacctggatcggtcagcttgaaccagtcacccaggatgctgtcctacagcccaaccgagaatgctgtcttgatttgctctgatgctgacgggggttcatatgaactctacattgttcccaaggattctgctggcaggtctgattacttacaagaggcaaagaaaggggcgggtagttctgctgtttttgtagcgcgtaacaggtttgcagtccttgagaagagtagcaatcaagttttggtgaagaatcttaagaatgaaattgtgaagaaaagcccccttcccattgcgactgatgcaatatattaagctggttgcagttgatgcatcggagtacattttcaagcttgcccttctccgaaagcgctatgaccatgttatgagtatgattaagaactcccagttgtgtgggcaagctgtgatttcttatttacaacagaaaggtttcccagaagttgctctacactttgtgaaggatgagaagaccagatttaacttagctcttgagagtggaaacattcaaattgcagttgcttctgcgaaggagattgatgacaaggatcactggtacaagttgggaattgaggccctgaggcagggaaatgttggtatagtggaatatgcttaccaacgaacaaagaattttgagaggcttgcttttctgtatcttattaccggttacttggacaaggtgggcttcatgtgcaaaattgctggacagaacaacaatttgatgggacagttccacaatgcgttgtatcttggggatgccaagaagcgtgttgagatcttggagaatgctgggcagctgcctcttgcttatgttaccgctgccactcatgggctcacagaatttgctgagaggattgctgctgaattaggcgagaatgttccttctctacctgaaggaaaacccaaatcactactgatcccccctgcacctctcacagcctgtggtgattggccattgctgagggtaatgcgcggtatttttgaaggtggattggatgctactggaagggcggatcttgaggaagatgatgaagctgctggtgctgattggggtgatgaggagttggatattgttgatgcaagtgaggttgtggccaatggtgatggttttgatgtagaagagggtgaaccaaatgaggagggtggtgaggaaggtggctgggacctggaagatctggaacttccgcctgaaactgagactccaaaagctgttggcaatgctcgttctgctttatttgttgctcctacaccaggtattcctgtcagccaaatttggactcagagatcttctctggctggggagcaagcggctgcagggaactttgacacagcaatgaggttgcttagccgccagttgggtatcaagaactttgttccactaatgcccttgtttcttgatctgcacatgggcagtcatacatatttgcgtgggcttgctgccgctcctgttatatcagttgcagtagagaaaggttggaatgagtccgcaagtcctaatgtgaggggccctcctgcgcttgttttcagcttctcacggatggaagacagactcaaggctgcctacaaagccacaactgagggcaagttcccagaagcactgaggcagttccttagcatcttacataccattccagttatcgtggtggactcacggagagaagttgatgaggtgaaggagttaatcgagatagtgagggagtatgtccttggtctgaggatggaactcaagagaaaggaactgagggatgatgtgacccgtcaacaggagttggctgcttacttcacaaactgcaagcttcagagagttcatatgaggcttgtgctcgctagtgccatggctctttgcttcaagcagaaaaactatgcaactgcggcacactttgctaggatgcttcttgagaacagccctcaggaggcccaagcaaagaaggcccgacaggtgctgcaagcttgccatgacaaggacgattcccaccaactgaactatgacttcagaaatccattcgttgtttgtggcgctacgtatgttcctatctatcgtggccaaaaggatgtttcgtgcccatactgtggatcccgatttgttccttccatcgaaggacagctttgtaccatatgcgagcttgctgcggttggggcagatgcatcaggcctcctctgctctcctacacagtcgagataagcgatggtagttagaggtcccctatattctttctagcgtctcaagttccaagatttcatcatatatatgttaccagagagtttactgattgtaaggaataagtattatacatgctgttgagtttttcttttcttttttgttctgttaccataatttttgtttgccttaggggctgctgtcatcacctgccgtatggtttagatttctgatcgacttccaatatgctggaaattgatgtatgagatgtttctttcgttcttcaaaaatcttttttgggatgcctcagctttgcttttagtctggaggtgatctctgctcgctaggcgggctaatgtgacgtcaaaattcctcaagcctgaaagagtttacatgctagagtgccaatctcagatctcttagtacacacgaagagacatgggaattagtggtgagagttgacaagagttaaggtgagaaattgactttcagtgttaggacttgttcagttatttccattccatgtgggtcggggtggattgagatggattaggatgtattttgacttgtatgaatttaaactaacccaatatcattcaatccatatggataaacggtgaatcgataagtcttcaatctcttgtttgattcatgagagggaaataagagaggcagttgaagatggatttacattcatggtttgtgtttggtgtgtgggattaaagcatgaaattagtaaacaataaaacatgataaacgatgaggttatctataccactatataatccatcactttaaactttttaaaaaacacccaaccaaattatctacatatttacaaccactactaaattcatcaaataaataacactcagatgtaacacaaactcaatccatcattaaaaactacggtttaaatcactgaataattttttctcttacttaaatctaat

SEQ ID NO: 52578 - DNA, 4764 bp, Zea Mays
ctctcctgtcatccattgcattttcctccccctctctctcgcgcgggggtcccgagtcccgactcgcccctccagatccaccaccaccacctcttctcctccagatccaccaccccatcctctccgcagctacagccaggtggagctcggcttagccgtcgacgtggctgggcacgccgggacgggaggatgctgaccaagttcgagacgaagagcaaccgggtgaaggggctgagtttccacccgcgtcggccatggatcctggcgagtctccacagcggggtgatccagatgtgggactaccgcatgggcaccctcctcgaccgcttcgacgagcacgacgggccggttcgcggcgtccacttccacgccactcagcctctcttcgtctccggaggtgatgattataagattaaggtctggaattacaagacgcaccgctgcctcttcacacttcatgggcatcttgactacattcgcaccgtgcaattccatcatgagtacccatggattgtaagtgctagtgacgatcagacaatccggatctggaactggcagtcacgcacctgtgtggctgtgctgactgggcataaccattatgtcatgtgtgcatctttccatcccaaagaagacctagttgtatcggcatcacttgatcagactgtgcgtgtttgggatattggagctctaaggaagaagacagtgtcacctgcggatgacatcctccgtctcacccagatgaacacagatctttttggaggtgttgatgctgtagtgaaatatgtcctcgaaggccatgaccgtggggtcaactgggcctcgtttcatcccactttgccgctcattgtttctggggcagatgaccggcaggtgaagctatggagaatgaacggcttgggaagttgatactttaaggggtcacgtgaataatgtgtcctgtgtgatgttccatgcgaagcaagacatcattgtgtctaactcagaagacaaaagcattcgcatttgggatgccacaaagagaactggtatccagacatttagacgggagcacgaccgtttctggattcttgctgctcaccctgaaatgaaccttcttgctgctggccatgacagtggcatgattgtgttcaaattggagagggaacgcccggccttctgcgttagtggtgacactgttttctatgtgaaagatcgatttctccgtttctttgagtactccacccagaaggaagttcaagtggctccaataagaagacctggatcggtcagcttgaaccagtcacccaggatgctgtcctacagcccaaccgagaatgctgtcttgatttgctctgatgctgacgggggttcatatgaactctacattgttcccaaggattctgctggcaggtctgattacttacaagaggcaaagaaaggggcgggtagttctgctgtttttgtagcgcgtaacaggtttgcagtccttgagaagagtagcaatcaagttttggtgaagaatcttaagaatgaaattgtgaagaaaagcccccttcccattgcgactgatgcaatatattatgctgggaccggtaacctgctttgcaaagctgaagatcgggtggccatctttgatcttcagcaaaggttagttcttggtgagcttcagacacctgctatcaaatacgttgtttggtccagtgatatggaatccgttgcactgctgagcaagcatgcagtggttatagctaccaagaagcttgtccataggtgcacactacatgaaaccatccgtgtgaaaagtggtgcctgggatgagaatggtgtgttcatttacactacactgaaccatatgaagtactgtcttcccaatggagacagtgggatcataaaaaccattgatgttcctatttacataacgagggttgttgggaacaatattttctgcttagatcgtgatgggaagaacaagctggttgcagttgatgcatcggagtacattttcaagcttgcccttctccgaaagcgctatgaccatgttatgagtatgattaagaactcccagttgtgtgggcaagctgtgatttcttatttacaacagaaaggtttcccagaagttgctctacactttgtgaaggatgagaagaccagatttaacttagctcttgagagtggaaacattcaaattgcagttgcttctgcgaaggagattgatgacaaggatcactggtacaagttgggaattgaggccctgaggcagggaaatgttggtatagtggaatatgcttaccaacgaacaaagaattttgagaggcttgcttttctgtatcttattaccggttacttggacaaggtgggcttcatgtgcaaaattgctggacagaacaacaatttgatgggacagttccacaatgcgttgtatcttggggatgccaagaagcgtgttgagatcttggagaatgctgggcagctgcctcttgcttatgttaccgctgccactcatgggctcacagaatttgctgagaggattgctgctgaattaggcgagaatgttccttctctacctgaaggaaaacccaaatcactactgatcccccctgcacctctcacagcctgtggtgattggccattgctgagggtaatgcgcggtatttttgaaggtggattggatgctactggaagggcggatcttgaggaagatgatgaagctgctggtgctgattggggtgatgaggagttggatattgttgatgcaagtgaggttgtggccaatggtgatggttttgatgtagaagagggtgaaccaaatgaggagggtggtgaggaaggtggctgggacctggaagatctggaacttccgcctgaaactgagactccaaaagctgttggcaatgctcgttctgctttatttgttgctcctacaccaggtattcctgtcagccaaatttggactcagagatcttctctggctggggagcaagcggctgcagggaactttgacacagcaatgaggttgcttagccgccagttgggtatcaagaactttgttccactaatgcccttgtttcttgatctgcacatgggcagtcatacatatttgcgtgggcttgctgccgctcctgttatatcagttgcagtagagaaaggttggaatgagtccgcaagtcctaatgtgaggggccctcctgcgcttgttttcagcttctcacggatggaagacagactcaaggctgcctacaaagccacaactgagggcaagttcccagaagcactgaggcagttccttagcatcttacataccattccagttatcgtggtggactcacggagagaagttgatgaggtgaaggagttaatcgagatagtgagggagtatgtccttggtctgaggatggaactcaagagaaaggaactgagggatgatgtgacccgtcaacaggagttggctgcttacttcacaaactgcaagcttcagagagttcatatgaggcttgtgctcgctagtgccatggctctttgcttcaagcagaaaaactatgcaactgcggcacactttgctaggatgcttcttgagaacagccctcaggaggcccaagcaaagaaggcccgacaggtgctgcaagcttgccatgacaaggacgattcccaccaactgaactatgacttcagaaatccattcgttgtttgtggcgctacgtatgttcctatctatcgtggccaaaaggatgtttcgtgcccatactgtggatcccgatttgttccttccatcgaaggacagctttgtaccatatgcgagcttgctgcggttggggcagatgcatcaggcctcctctgctctcctacacagtcgagataagcgatggtagttagaggtcccctatattctttctagcgtctcaagttccaagatttcatcatatatatgttaccagagagtttactgattgtaaggaataagtattatacatgctgttgagtttttcttttcttttttgttctgttaccataatttttgtttgccttaggggctgctgtcatcacctgccgtatggtttagatttctgatcgacttccaatatgctggaaattgatgtatgagatgtttctttcgttcttcaaaaatcttttttgggatgcctcagctttgcttttagtctggaggtgatctctgctcgctaggcgggctaatgtgacgtcaaaattcctcaagcctgaaagagtttacatgctagagtgccaatctcagatctcttagtacacacgaagagacatgggaattagtggtgagagttgacaagagttaaggtgagaaattgactttcagtgttaggacttgttcagttatttccattccatgtgggtcggggtggattgagatggattaggatgtattttgacttgtatgaatttaaactaacccaatatcattcaatccatatggataaacggtgaatcgataagtcttcaatctcttgtttgattcatgagagggaaataagagaggcagttgaagatggatttacattcatggtttgtgtttggtgtgtgggattaaagcatgaaattagtaaacaataaaacatgataaacgatgaggttatctataccactatataatccatcactttaaactttttaaaaaacacccaaccaaattatctacatatttacaaccactactaaattcatcaaataaataacactcagatgtaacacaaactcaatccatcattaaaaactacggtttaaatcactgaataattttttctcttacttaaatctaat

SEQ ID NO: 52579 - DNA, 1728 bp, Zea Mays
gaaagggctcccgagctcgtcgccacactgttcccgttttttttgttaagctctcgcttaacctaaacgccgggagcacaagtgctcggcgaaatgacgagcgccggagcggcgacaggcgccgcgctaggcgcgcggacggcgcggtcctgcgacggctgcatgaggcggcgggcgcggtggcactgccccgccgacgacgccttcttgtgccagacctgcgacgtctccgtgcactcggcgaacccgctcgcgcgccgccaccaccgcgtccgcctcccctctgcgtcctgctcctccccaccgcgcgacccggacgcgccaacgtggctccacggcctcaagcgacggccacgcacgccgcggtccaagccaggggggagcaagagcaacaagcatgaggcgactcccagctttatcgccgcggctgcgtcgtcggcagcggtccccgacctcgaggcggaggagtccggctccggtatcctgggcggtaacgacgaccaccacgggttcctgcaggatgacgacgaagaccttctgtaccgcgtgccggtgttcgaccctatgctcgccgagttctacaaccccgtggccgacgagggggagcagaagccggcctgcagcctgctgatgccgtctctcgcggaaacatcgccggagttcgcctccggcggctcggcggaggcggacgggctctccgtgtcgttccacgtcccggacatggagctcgctagcttcgccgcggacatggagagcctcctcatgggagtcgacgacgacgggtttgactgtttgggtttcttggacgaagagaaacctcaggtgaacgcggacttggacgccatagtagcgccggcgcctgaaccagaggacaagaaacggaagcggccggagatgatactcaagctcaactacgaaggcgtcatcgcctcatgggtccgtgacggcggctcgccgtggttccacggcgagcgtcctcacctcgactgtcacgagctatggtcggacgacttcacgacgggtagccgggaactcctcggcggagccgtgacaccggtgaccggtggcgagcgtgaggcgcgggtgtcgcgatacagggagaagcggcggacgcgactgttcgccaagaagatccggtacgaggtgcgcaagctcaacgccgagaagcggccgcggatgaagggtcggttcgtgaagcgcgccacgcttccgccgctgccaaggccgccgccgccgcagcagcagcagcagcagaagcagctgccacgcgcaccgccacacgtgggcatggtgctcccaccacctccggtatcgaacgggcgcttgtggttttgagaccatatgcatgcatggaagcatgcatgaagcaacgtatgtgcgtgatgcatcgatgcatctatctcgctcgtagcatgcgcatgttctttctactctacttttaattcgtgcgtgcgaattagggcaccccacaagataatgctccctgcttacgactgaaatatatttgtttgtacatgtgcagaatagttaagaaagtatatttatagcctaggtttgttgtttatcttttctagttgttgtaaagaaggatgcactaaatacaagggaagggtgtagattttgatagatgcagagccatgcgtgctacactatagcgtcctttgattcacatatttgtaacgtaatagttaaataataacgttaaattatgtttgttttaaaaaaaaa

SEQ ID NO: 52580 - DNA, 842 bp, Zea Mays
caagattttacacggctggcgaggtgaaatccaacgagtgatgcctggataacatggcgccatattatttattactttcatcagatcttccttctttctagaaaagaacacacgtcaccgaaaaaaaaacgaactttgcaatcttctccttcaaggaagctccaggaaagaaagttgtcgcgttgatttgactcgcggtcgattgcgtgcagactctttcagtatttcaatggtgaacgatctcatcggtgccggcaagtcgtaccgcacgctgagcgacatcctcgacaaggacatccagaacgactgcgtgaagaagcagggaagccactcccggaacctgcgcagggtccgtctcggactcggcctcatcaaggccctcttcgagcaattcctcgccaccgagggttcattgtatgatgctgctacgatagcttacgggcaggtctgcgcgccgtttcatagctgggcgatcaggaaggctgttggcgctggcatgtacacccttccaaccagggagcagttggtagtgcggctgaacgaaactgatctctcggtgcagaagcagatgaggagatacattgacgcttctagtcctatcatagagtacatcgataaccttttcctctcgaggaacattagtctagattggtgaactagtttttctgagctgtactgaaagtcaagtttgtaacttgttcacaagctgttgttggtaccatcgatttatttcttcatagttgtttactaggtatgtgtccgtgcgttacgaaagaagtaaaaaatttatattaaacatatatacgaaacgacaaacgtcactatgatatgcaaaatttgtg

SEQ ID NO: 52581 - DNA, 1972 bp, Zea Mays
gaggaattcttcgttgccatgcgtacaaagaacccttaaaccctaatcctcccccgctacacgttcgcttgatctttacggccgccgctactcgttcgccatggctgcctgctcctccaggctcctatacctcactctgagctcctctttcctccgctcctgccgcctcgcgtccagctccctacttcccaccgcctcccgctgccacccggggtcgctccactccctccgcttctgctctgctgtccccgagtttgtcgatgtcgccgccgaccctgccgaggcggctgtatcctccggacacccgtggccggagtggggcaacttccttgataagctgcgggccaaggggtacttcgagcaaggtttgccctccagcgtgagttctggcgagggagccgccggagatggggatccagcaactgcatctgagaacgcagcaacggctgcttccggtaatacggtggtggatgcggaggatagcgcggtgacctcggaagatatctatcattttctcaaggacgagaacagggtgaagaatgcgtgcctcaaatttgggcgagaccgcttcgatctcctcagcttgcttcccaagcaggatattcaagctattgttatgtctggctgtcctaataacaatcggaagcccgtctattctgcaaaaaggttgagagagtacgtgcaggtcaaagaagaagatgcatgcagcatttgcaaatttaaggcatcttgtgatagagcttatgtcactccaaagggtgaggttgaagttaggactgttgatgttgttcgtatactgttaagttatgcaatggataaaaaccattcaggagataactctgttatcgaagaaagtgtgcaagaatctgcaaaaaagcttctctcaaagcttactgaatttagtgacacaacaatcgatccatctcttccgaaacctgcatttcaagttgctaggaaggctcagggctcagtggggaaggggagagaaacgactgcagttgaaatgaagaagggtgactggttgtgcactaactgtaacttcttaaattttgctcgcaatcgtcactgtctcgaatgcaaagcagatggaccaaagaagatagaagcggccgtggatgcaatgaaaatgggcgattggatctgcacacagtaacttgcaccttacattataccattctttttccatttctttccagcaccgtttgatttgcatcaccctgtctgtgccttctaggtgtcagtttatgaacttctctcgcaacaagatatgttttaaatgtgaagaacctcacccgaagaggcaactcaatcctggagagtgggagtgcccctcatgcgactttgttaacttccgacgcaacgctatctgcaagaagtgcaatcaggaccgccccgaggatgatacccgagatagtcagcggggactgagaaaaaccagaggggctggcaagtttagaagattcgactatattgatcagaagagcgatgacgatgatgacaatgcctggttccagaagcgtggggcaagcatgaggtcgaaaccggaccagagaaccaccactgccaagagcagaggctctgacggtctggatgatattcttgttaccaccaagcgtagaagcaccaagcaagacgaggacgacgaggtcttgccgtacgagggtgcgcgcaagcatgttgtgagcagaagggcaacgccttcccagaggaggttcacggctgcccgtaaccagtaataatacccgagcttggagctttgatgactccgttctgtgaacaaatttcacagcgtcgctcgctctgctgctgtgatgcagacgaatagatgatggacataacacataagcgtgttcgatctgtagtgttattatacaaattattagggaacacacattgataaagctggtcctttacgatgattttttttgaacacacaaaccgtatacctttattggtagcaagtacatcactc

SEQ ID NO: 52582 - DNA, 1159 bp, Zea Mays
caaaaccaatatttatgatacttctttctgtaacttcttaaattttgctcgcaatcgtcactgtctcgaatgcaaagcagatggaccaaagaagatagaagcggccgtggatgcaatgaaaatgggcgattggatctgcacacagtgtcagtttatgaacttctctcgcaacaagatatgttttaaatgtgaagaacctcacccgaagaggcaactcaatcctggagagtgggagtgcccctcatgcgactttgttaacttccgacgcaacgctatctgcaagaagtgcaatcaggaccgccccgaggatgatacccgagatagtcagcggggactgagaaaaaccagaggggctggcaagtttagaagattcgactatattgatcagaagagcgatgacgatgatgacaatgcctggttccagaagcgtggggcaagcatgaggtcgaaaccggaccagagaaccaccactgccaagagcagaggctctgacggtctggatgatattcttgttaccaccaagcgtagaagcaccaagcaagacgaggacgacgaggtcttgccgtacgagggtgcgcgcaagcatgttgtgagcagaagggcaacgccttcccagaggaggttcacggctgcccgtaaccagtaataatacccgagcttggagctttgatgactccgttctgtgaacaaatttcacagcgtcgctcgctctgctgctgtgatgcagacgaatagatgatggacataacacataagcgtgttcgatctgtagtgttattatacaaattattagggaacacacattgataaagctggtcctttacgatgatttttttgttgtcacttatgtaatgacgagttatggcgcttgccctttggccagttggcggagctgaagttccaccgaccgtgtacaccgtcgacccggcgagctcgccgtggaggagcatgctgataggcacaaggacgaaccgaaacggatgggaaaatccctttccgttttcgcattttttttcactggtaacggatttgaaatagtcgggaatgaagtaggataaacaggtgtatgaaaaacgaacgagaacgaaaatattaagtttaatattaatagataactagtacgtgattgactgggaggataacactacgaaacaattaa

SEQ ID NO: 52583 - DNA, 1200 bp, Zea Mays
cgacaataaaaaaactcgaccggtagggaaaagacccgccccctcaatcggagcccccttcgagaaagctgtaacttcttaaattttgctcgcaatcgtcactgtctcgaatgcaaagcagatggaccaaagaagatagaagcggccgtggatgcaatgaaaatgggcgattggatctgcacacagtgtcagtttatgaacttctctcgcaacaagatatgttttaaatgtgaagaacctcacccgaagaggcaactcaatcctggagagtgggagtgcccctcatgcgactttgttaacttccgacgcaacgctatctgcaagaagtgcaatcaggaccgccccgaggatgatacccgagatagtcagcggggactgagaaaaaccagaggggctggcaagtttagaagattcgactatattgatcagaagagcgatgacgatgatgacaatgcctggttccagaagcgtggggcaagcatgaggtcgaaaccggaccagagaaccaccactgccaagagcagaggctctgacggtctggatgatattcttgttaccaccaagcgtagaagcaccaagcaagacgaggacgacgaggtcttgccgtacgagggtgcgcgcaagcatgttgtgagcagaagggcaacgccttcccagaggaggttcacggctgcccgtaaccagtaataatacccgagcttggagctttgatgactccgttctgtgaacaaatttcacagcgtcgctcgctctgctgctgtgatgcagacgaatagatgatggacataacacataagcgtgttcgatctgtagtgttattatacaaattattagggaacacacattgataaagctggtcctttacgatgatttttttgttgtcacttatgtaatgacgagttatggcgcttgccctttggccagttggcggagctgaagttccaccgaccgtgtacaccgtcgacccggcgagctcgccgtggaggagcatgctgataggcacaaggacgaaccgaaacggatgggaaaatccctttccgttttcgcattttttttcactggtaacggatttgaaatagtcgggaatgaagtaggataaacaggtgtatgaaaaacgaacgagaacgaaaatattaagtttaatattaatagataactagtacgtgattgactgggaggataacactacgaaacaattaa

SEQ ID NO: 52584 - DNA, 2148 bp, Zea Mays
gaggaattcttcgttgccatgcgtacaaagaacccttaaaccctaatcctcccccgctacacgttcgcttgatctttacggccgccgctactcgttcgccatggctgcctgctcctccaggctcctatacctcactctgagctcctctttcctccgctcctgccgcctcgcgtccagctccctacttcccaccgcctcccgctgccacccggggtcgctccactccctccgcttctgctctgctgtccccgagtttgtcgatgtcgccgccgaccctgccgaggcggctgtatcctccggacacccgtggccggagtggggcaacttccttgataagctgcgggccaaggggtacttcgagcaaggtttgccctccagcgtgagttctggcgagggagccgccggagatggggatccagcaactgcatctgagaacgcagcaacggctgcttccggtaatacggtggtggatgcggaggatagcgcggtgacctcggaagatatctatcattttctcaaggacgagaacagggtgaagaatgcgtgcctcaaatttgggcgagaccgcttcgatctcctcaggatattcaagctattgttatgtctggctgtcctaataacaatcggaagcccgtctattctgcaaaaaggttgagagagtacgtgcaggtcaaagaagaagatgcatgcagcatttgcaaatttaaggcatcttgtgatagagcttatgtcactccaaagggtgaggttgaagttaggactgttgatgttgttcgtatactgttaagttatgcaatggataaaaaccattcaggagataactctgttatcgaagaaagtgtgcaagaatctgcaaaaaagcttctctcaaagcttactgaatttagtgacacaacaatcgatccatctcttccgaaacctgcatttcaagttgctaggaaggctcagggctcagtggggaaggggagagaaacgactgcagttgaaatgaagaagggtgactggttgtgcactaactgtaacttcttaaattttgctcgcaatcgtcactgtctcgaatgcaaagcagatggaccaaagaagatagaagcggccgtggatgcaatgaaaatgggcgattggatctgcacacagtgtcagtttatgaacttctctcgcaacaagatatgttttaaatgtgaagaacctcacccgaagaggcaactcaatcctggagagtgggagtgcccctcatgcgactttgttaacttccgacgcaacgctatctgcaagaagtgcaatcaggaccgccccgaggatgatacccgagatagtcagcggggactgagaaaaaccagaggggctggcaagtttagaagattcgactatattgatcagaagagcgatgacgatgatgacaatgcctggttccagaagcgtggggcaagcatgaggtcgaaaccggaccagagaaccaccactgccaagagcagaggctctgacggtctggatgatattcttgttaccaccaagcgtagaagcaccaagcaagacgaggacgacgaggtcttgccgtacgagggtgcgcgcaagcatgttgtgagcagaagggcaacgccttcccagaggaggttcacggctgcccgtaaccagtaataatacccgagcttggagctttgatgactccgttctgtgaacaaatttcacagcgtcgctcgctctgctgctgtgatgcagacgaatagatgatggacataacacataagcgtgttcgatctgtagtgttattatacaaattattagggaacacacattgataaagctggtcctttacgatgatttttttgttgtcacttatgtaatgacgagttatggcgcttgccctttggccagttggcggagctgaagttccaccgaccgtgtacaccgtcgacccggcgagctcgccgtggaggagcatgctgataggcacaaggacgaaccgaaacggatgggaaaatccctttccgttttcgcattttttttcactggtaacggatttgaaatagtcgggaatgaagtaggataaacaggtgtatgaaaaacgaacgagaacgaaaatattaagtttaatattaatagataactagtacgtgattgactgggaggataacactacgaaacaattaa

SEQ ID NO: 52585 - DNA, 2757 bp, Zea Mays
gaggaattcttcgttgccatgcgtacaaagaacccttaaaccctaatcctcccccgctacacgttcgcttgatctttacggccgccgctactcgttcgccatggctgcctgctcctccaggctcctatacctcactctgagctcctctttcctccgctcctgccgcctcgcgtccagctccctacttcccaccgcctcccgctgccacccggggtcgctccactccctccgcttctgctctgctgtccccgagtttgtcgatgtcgccgccgaccctgccgaggcggctgtatcctccggacacccgtggccggagtggggcaacttccttgataagctgcgggccaaggggtacttcgagcaaggtttgccctccagcgtgagttctggcgagggagccgccggagatggggatccagcaactgcatctgagaacgcagcaacggctgcttccggtaatacggtggtggatgcggaggatagcgcggtgacctcggaagatatctatcattttctcaaggacgagaacagggtgaagaatgcgtgcctcaaatttgggcgagaccgcttcgatctcctcaggtggaagaaaccttgcgactcttttcctctttccctctatagaggaatcaaatttctcggtcgcgtactttattatgtaatatttaggatacatggatctcggatttcagtttttcggatgctgcacgaataatcatgccacttatttagtggagatgcagccgcaaattgctaactaggccttttggtgttctcatgaaacaggatcctgagtgtgatagccaataattatccacttgcatgccttccattatatcaacgcttccttcattttttactcagtcgactgaaggatatctactaaatttctgtcctacatatactcatgtttggtagaacgctcaataactatgttagttgaattatgcccccaccccaccttttttttcataactgccaactgctgattgacatggaattgaaagttacccatataaactgtaacattgtttaaaatatcaacatttgggtcatggttgtctttagtgcttgtgtcatgaactgggttttcatgcccatgacctggcacggcagcaagcattgtatatcttctggctaaactggatctttatttgagtgcttcaccgctgcagcttgcttcccaagcaggatattcaagctattgttatgtctggctgtcctaataacaatcggaagcccgtctattctgcaaaaaggttgagagagtacgtgcaggtcaaagaagaagatgcatgcagcatttgcaaatttaaggcatcttgtgatagagcttatgtcactccaaagggtgaggttgaagttaggactgttgatgttgttcgtatactgttaagttatgcaatggataaaaaccattcaggagataactctgttatcgaagaaagtgtgcaagaatctgcaaaaaagcttctctcaaagcttactgaatttagtgacacaacaatcgatccatctcttccgaaacctgcatttcaagttgctaggaaggctcagggctcagtggggaaggggagagaaacgactgcagttgaaatgaagaagggtgactggttgtgcactaactgtaacttcttaaattttgctcgcaatcgtcactgtctcgaatgcaaagcagatggaccaaagaagatagaagcggccgtggatgcaatgaaaatgggcgattggatctgcacacagtgtcagtttatgaacttctctcgcaacaagatatgttttaaatgtgaagaacctcacccgaagaggcaactcaatcctggagagtgggagtgcccctcatgcgactttgttaacttccgacgcaacgctatctgcaagaagtgcaatcaggaccgccccgaggatgatacccgagatagtcagcggggactgagaaaaaccagaggggctggcaagtttagaagattcgactatattgatcagaagagcgatgacgatgatgacaatgcctggttccagaagcgtggggcaagcatgaggtcgaaaccggaccagagaaccaccactgccaagagcagaggctctgacggtctggatgatattcttgttaccaccaagcgtagaagcaccaagcaagacgaggacgacgaggtcttgccgtacgagggtgcgcgcaagcatgttgtgagcagaagggcaacgccttcccagaggaggttcacggctgcccgtaaccagtaataatacccgagcttggagctttgatgactccgttctgtgaacaaatttcacagcgtcgctcgctctgctgctgtgatgcagacgaatagatgatggacataacacataagcgtgttcgatctgtagtgttattatacaaattattagggaacacacattgataaagctggtcctttacgatgatttttttgttgtcacttatgtaatgacgagttatggcgcttgccctttggccagttggcggagctgaagttccaccgaccgtgtacaccgtcgacccggcgagctcgccgtggaggagcatgctgataggcacaaggacgaaccgaaacggatgggaaaatccctttccgttttcgcattttttttcactggtaacggatttgaaatagtcgggaatgaagtaggataaacaggtgtatgaaaaacgaacgagaacgaaaatattaagtttaatattaatagataactagtacgtgattgactgggaggataacactacgaaacaattaa

SEQ ID NO: 52586 - DNA, 1246 bp, Zea Mays
gtaatacgagccataaaccgtagcaagatggtgattgacgccgtactcccaggatacagaaggtaatcagccaattatagtatgtggtcctggagttcatagttttgctactttttctggcgcgacgatgtggcggaggcgatgacagggcctagaacggattggtcgtcctgctctgtgtcggaagttatgtgaattttctgcctcctagcactagacagatgattttcttcattttgcgaactccttgctcttgctttctactgttgtttgtttattttagtgcagcaacggagcctatgaagaagccctattttctgctgctgtttgccaactccaagcagatcgctcgctgaagaagcccaccctcctcgctatagaagaaccgtgaaattctgttttgttgccatagtggaaattgctgttgcaatgcgtgagggatggttgttgagtgtgtttccctgactatatatgccttgagatatttccatgaggaggcaatcaatccctggcatcacgcctcatcattgggctctttgtattgtggaggaggctaatatgatgtatgaagcgcctaccacatggacatatgctgcttctaccacaatgatgtatttgcctctactgtgggggatagatatcccctgggtccactaaagaagtaaaaggcctcacgaaaggcccaagggcccaataattcgtaaggtcattctttcgtgggcctagggaaagacaaccgacaaagaagagaagacgtgagactggattggtgcaaacccggacggcccacaacgtcgaacgaataaatcgcaacagagacccgactttcccgcgctgaagcccccatgcagcggagccatgcgaggataagtcggcgagggttacgtagggataagctcaagaggttcactatcttttagctacttgacgttatcatatcacatgtactgccccacggtcgagtatataaggcctagggggcaccccttcagatcgatcgaccctactttacttagccacccatgtaaactctctgtgctttcaactcagagagtcctcctgtaaccatactcgaacactcatcaggacatagggtgttacgcatctctaagcggcccgaacctgcaaatcttgtccattgtccctcgtgcgatcggcacgaaccattttgctacagtcgtcgacaccgtcctactcctaaaaacaccttgaggggcaaccccgggtgtgcggtcggacccaaaac

SEQ ID NO: 52587 - DNA, 1866 bp, Zea Mays
ctcgctctacgctcctccaaggaaaccctagccgatgtcttcgaccacctcaagccccataccgtggctccgccgccgcctccgtgaccctcgcgaccgcgccatcctcgcccgcgcatgcccgctgaccgcgcctccctccgcgccatcctcaaccgacgccgccccctcttgactcttctctctctctctgctcctacctccttgaggagcaatccgctgatgcatcttctcccaggacaaccttggacgacggtgaccatgcggctgggggatcgtgggtaggggaggacggacgcgggcgaggatggcacggtcaggcgttgaggtcttggaagaacaaccgtgtagatatccataaagagaaacgttttgtttcttctgtaggctatctactccatgggcatttccttgtttactaatgaagaaatctgatgatacgagtgtgtcaactttgttgagcatataatcttcagaatgctttaccactctatgcagcataggaaagcgtctcgctggtgatcaacagtaatacgagccataaaccgtagcaagatggtgattgacgccgtactcccaggatacagaagatcatcgacgaggcaagatactcggtggagtacatttcagaagctatttatgttagttggtccaacaacatcgctcggaccagagaaaaaatgtaatcagccaattatagtatgtggtcctggagttcatagttttgctactttttctggcgcgacgatgtggcggaggcgatgacagggcctagaacggattggtcgtcctgctctgtgtcggaagttatgtgaattttctgcctcctagcactagacagatgattttcttcattttgcgaactccttgctcttgctttctactgttgtttgtttattttagtgcagcaacggagcctatgaagaagccctattttctgctgctgtttgccaactccaagcagatcgctcgctgaagaagcccaccctcctcgctatagaagaaccgtgaaattctgttttgttgccatagtggaaattgctgttgcaatgcgtgagggatggttgttgagtgtgtttccctgactatatatgccttgagatatttccatgaggaggcaatcaatccctggcatcacgcctcatcattgggctctttgtattgtggaggaggctaatatgatgtatgaagcgcctaccacatggacatatgctgcttctaccacaatgatgtatttgcctctactgtgggggatagatatcccctgggtccactaaagaagtaaaaggcctcacgaaaggcccaagggcccaataattcgtaaggtcattctttcgtgggcctagggaaagacaaccgacaaagaagagaagacgtgagactggattggtgcaaacccggacggcccacaacgtcgaacgaataaatcgcaacagagacccgactttcccgcgctgaagcccccatgcagcggagccatgcgaggataagtcggcgagggttacgtagggataagctcaagaggttcactatcttttagctacttgacgttatcatatcacatgtactgccccacggtcgagtatataaggcctagggggcaccccttcagatcgatcgaccctactttacttagccacccatgtaaactctctgtgctttcaactcagagagtcctcctgtaaccatactcgaacactcatcaggacatagggtgttacgcatctctaagcggcccgaacctgcaaatcttgtccattgtccctcgtgcgatcggcacgaaccattttgctacagtcgtcgacaccgtcctactcctaaaaacaccttgaggggcaaccccgggtgtgcggtcggacccaaaac

SEQ ID NO: 52588 - DNA, 2672 bp, Zea Mays
ctcagctcgagcaggatgttgctcaccgtgatgaatgccatgaattcgcccagctccacgcggaggtattgcgaaagacctgccagcgacaaggatctcgacggtgaactcgttgtagcagaagacaaaattgaagtttgagatgctaggggaaatcgttcagaacagaagtggcttacaagaaaaataggacatcgttcttttaatggttatatgtacaatagcttctatcattctttcaatggttatatgtacaatagcttctaattgggaatgtgaaagcctgaagaacatgaataaagttatcatctgcagcgatcaacaagaggaagacatgcgaacagcaacgctaatccagtaatcgtagattagtactgctcaaattgttaaactcggaaataatagcccgaggctttctagaccggaaaggtaagagcaaaactgacgaagacgtaacaaagccagcctaacttcaatacatgtagtaacatatgggcaacgggtggcagcagcacatcaccaaaaagccaacaaaatatctgcttcattgcgcagcccctgcatcaacctcaacctccggctttaagaaatcaagtcccgtccatcctccggcttaagacgtcaagttcatccatcctctgcactctccacggcttggcaagctcgctttcctcaacacctccatccacatggtcaccattgatatcctgttaacctttgcgtccctcaggcactcaaatacgtccagcacagcatttgccattgggtgttgctgctgcaatgcactgccattttgcagtccacattcgtctcattgccagttccattgttctaattggggagagcagccacggcctgatgtgtggtgtaagactatctccagcagactctttatcctgctccttatctcactcactatttcaaacttcactctgcaaacaatgcaatctacagtgtaaaacagtattttgcactggcgtttacacggcctgttggagatgacctgttgtacctttgtgattgtctagttgcctgctttcctgcttaaagtagaacatattcaacactggaaccatctgaaaacaagctgggaggagaggagctaatcacattgtagtcatggaacaaattcctcttcttctcaattttcttgatatttttcctcggagcgcaagagacaaaattctgctatgctgtacttgctcatttacggaagctgtcaaaattttcgtcgttagatagacgcttaaagtccattactaacagtgtagctgtgctaaattagactgacatatcttactacttatacacattattgttcaatcggcaatgaacggtggaatctacttcttttccctgatataaaatattggcttccacatattatactgtaaacgtataaaaaggggcatacccagtgccgtaggcttcccgcactgtgcgggatctgtggaagggtatctttaagcgccaagccttactcgcataatatgcagagactggtgctccaacccgggaccttccggttacagacggtaggctctaccgctgcaccaagcccgcccttctggaataaacatgtattattttcaccttttgcaagtacagaagtttgatattggtcccaactatagcactcaaccagcgaatgcatctgcatggtattcctacctgtataattatcacacatgtcatggtcgattatatatagaaacatacaagtgcctgcagtcttaatcttaaccagtggaacattgaacatgcattggatccttctacattagctctatgcagctcagctcacaactctaaacactagtgtactcaatcaaacaaagtagcactggtactgcaagccaaactgaacatattcacaagctgaaataatccccatccattccaagaaacggattgaaacttctgagtgcaatttagatctaattaaagtgaacactaccaaactgaacatatgctctcacctcaggttgcagtgatgtccacagtttctcttctgctcccaatgttatgtcagggatgtctcccgctccagcatatcattctggatatctaccaaaccacacctgcggcctgcctcttcctattatagcacaaatgagtatgaacaaaacaaagagaacaaaattaattggatgaaaacaaaactatcatggtggtggtggcggcagcctgcaccacaacaggtcaaagatgccgcaataccagcaaaacggacagatggctatgatcttgcctttctggcaccactgcccacacaaggtgatggagcacctgctcctccatggattcaatgggccaacgccatggtaccactagaacccacacacccaaaaccttgtattgcctgcaaggaggagaccagccctgaaagcaccacgcagaggagactgtcacatccttggagcttgttcccacataccgccgccaggagcgaagtgaagggcgctatcccaccactcctatccaccagcccaagcagctccatcgtcctctgatggagctccgtttagcccagagggaaggcggctgcagcctgcaggcaggcggggatgaggagaagccattggagcaggcgggcgctgccggtggcgtggtggggtggaagtgtggatgcgctgcagacaagcgaggaagcgcttgcaaataaatcatgg

SEQ ID NO: 52589 - DNA, 325 bp, Zea Mays
cgggactcgccggaatgcggtgggagccggcgcggaccacgcaggctggtttcaccgtggaatccaaggaagcacagaaaccagtgccttccgtcccgaatccttccccgggcgcccggaattagattggcacggagtggaggacgcaacccggacgtgattcgcgctagtggcaagcgaccactgacggactcggctcctctggaggaacgcacaaactcctcccgaggcaacgtgctactgctacagattgcaggaaagactccacaggtcgaatcggggaccgagaccgagatcaggaacccggaagaggaacgaacgaaat

SEQ ID NO: 52590 - DNA, 797 bp, Zea Mays
ttccagagttcaataactatatatataaagcagcactcgcaccgaaagattgcatatccggaataaaatgagcgaaaaagaacaaaaggcaaagaccacgctcttatcgaacaatagtcatgctattgctatgcacacacccaacaccctccatcattccagaagcccaaagcacattacatacagctagaggatttacaggaaaagaatttaggagggaaaaaagaaatatataaaaaaactagtgaagcccactctatccgtatccggcagcaaagctggcatcggcatgttttcaggataaatgaattcttttaaaagcttgcacagggccatgattgccgccacaacccacaagcacacccccatggacccgggcagctcactaaccctggaccttggaatgcagacagacttgctccgcgatctgccttccggatggcgtttccgaacagactgtgactgttccaggaggagctcctttctcctctccgggaaccaacaacgaaacctctccaatgacaatgctagttattagtcgacaatccttttttccccttatcattgtcctatggtttccatcttcaagcaatattgggcacgagactttgcagctgatctggaacccaacaagtaaaatgaaccatttttcttagtagagaacaatcattctgtcaccatccatgtcgaaaataaaattaaaaaaaaaacccagcaaaatatcaatactagttgtagcaccttaccttcagtccgtgtaaagatgtaggtaatgaggcgaaagctccccagagttc

SEQ ID NO: 52591 - DNA, 1764 bp, Zea Mays
caagcattcgcatagcccgcgccgcaagtattcgcggtcgcacaggctggtccagtccaacactggcctccctgtttcgatgctggccacaagctcgcccggccgcccggggtgaggatgactgccactcccaccgggctcctccggctccacatctgccgtcgaccaaacccgccctgctaaatactcgctccctacagctctcctcgcaattaacacctccgttagcacgagctgcagggagggagttgggaggagaaacagagctaccggggcgatgggcaccgtgctcgattcgcacttcctggcgctcaccgccatcgttactgtggggtaccagctgctgttcttcatcatcacagctctcctccggttcgataaggtcaccgatttcgcaggcagtacaaattttatcataatcgccatcctaacattagctttgaagggagcatggcatttccgtcagattgtgctgacagtgcttgtcaccatttggggtcttcgtctaggattatttttattgatgaggattttgcaatggggtgaagaccgaaggtttgacaaaatgcgtgataatttggggaaattagcagttttttggattttccaggctgtgtgggtttggtctgtcagcttgcccgtcactgttgtgaatgcaagtgacagaaacccctcgattgaagccagggatataatcggttggataatatggttggtcgggatatgtgtagaagcaacagctgatcagcagaagcttgtgttcaaaaattctccaagtaacaggggaaagtggtgcaacgccggtctttggaagtactctcgccacccgaactactttggggagatattcctttggtggggagtatttgtagcatcgaccccagttatctcagatgccgaatggcttgtgattcttggacctatattcctgactcttctgcttcttttcgttagtggaatcccactcctcgagtcatctgctgataagcgctatggacgattggaggaataccgtgcatacaagaacactacaaggttgccttcctccttgagctcccgctctacaatcctgggccgggaggtgatccaatcaaaccagaatgagcccattgatgggtcagcctgatgtttatgttgctattgtgtgcgtggcagttattccaccttcgattccaaggggttacagtggagtttggcccctgatttatcgctcgcgaggctcaaacatgtatcttgttggttgaaagttagatttcttttgttgccctccctgcctccatgtgcagatgaatagatgcttagaaacctgaacgtggaacgtgttcaccttcctcgctccaaaaaagtgggaacggaacaatcttgtccatatagtgttaaagtatttttttttaagtacggtaccacgttcctgtttctggttcccatcaatccgagaactgattagatgatcacgcgaactgaactctgagccgatacttgtcccaatttggtagtatttgttatgcaatgtattttcgtattttacattctcggttagtactgggactgaaccttttaaactcttgtttatgtgtgtgttggttagaccttggggcaggggttcagggaaacaagaggcttaaagaaagtcaataaatttggaagaaggaaaataattaaaaacaaaccgagaatgtgaccagttcacggggtaccagtgcggaagctcaaaacgagcttggtttgcaagctccagaaatctctctgctcttttgggagatc

SEQ ID NO: 52592 - DNA, 1775 bp, Zea Mays
gtgcctctcgctttgggccaagcattcgcatagcccgcgccgcaagtattcgcggtcgcacaggctggtccagtccaacactggcctccctgtttcgatgctggccacaagctcgcccggccgcccggggtgaggatgactgccactcccaccgggctcctccggctccacatctgccgtcgaccaaacccgccctgctaaatactcgctccctacagctctcctcgcaattaacacctccgttagcacgagctgcagggagggagttgggaggagaaacagagctaccggggcgatgggcaccgtgctcgattcgcacttcctggcgctcaccgccatcgttactgtggggtaccagctgctgttcttcatcatcacagctctcctccggttcgataaggtcaccgatttcgcaggcagtacaaattttatcataatcgccatcctaacattagctttgaagggagcatggcatttccgtcagattgtgctgacagtgcttgtcaccatttggggtcttcgtctaggattatttttattgatgaggattttgcaatggggtgaagaccgaaggtttgacaaaatgcgtgataatttggggaaattagcagttttttggattttccaggctgtgtgggtttggtctgtcagcttgcccgtcactgttgtgaatgcaagtgacagaaacccctcgattgaagccagggatataatcggttggataatatggttggtcgggatatgtgtagaagcaacagctgatcagcagaagcttgtgttcaaaaattctccaagtaacaggggaaagtggtgcaacgccggtctttggaagtactctcgccacccgaactactttggggagatattcctttggtggggagtatttgtagcatcgaccccagttatctcagatgccgaatggcttgtgattcttggacctatattcctgactcttctgcttcttttcgttagtggaatcccactcctcgagtcatctgctgataagcgctatggacgattggaggaataccgtgcatacaagaacactacaagccctcttatcccattgccacctgctgtgtatggttccctgcctgcgtggttcaaggttgccttcctccttgagctcccgctctacaatcctgggccgggaggtgatccaatcattattccaccttcgattccaaggggttacagtggagtttggcccctgatttatcgctcgcgaggctcaaacatgtatcttgttggttgaaagttagatttcttttgttgccctccctgcctccatgtgcagatgaatagatgcttagaaacctgaacgtggaacgtgttcaccttcctcgctccaaaaaagtgggaacggaacaatcttgtccatatagtgttaaagtatttttttttaagtacggtaccacgttcctgtttctggttcccatcaatccgagaactgattagatgatcacgcgaactgaactctgagccgatacttgtcccaatttggtagtatttgttatgcaatgtattttcgtattttacattctcggttagtactgggactgaaccttttaaactcttgtttatgtgtgtgttggttagaccttggggcaggggttcagggaaacaagaggcttaaagaaagtcaataaatttggaagaaggaaaataattaaaaacaaaccgagaatgtgaccagttcacggggtaccagtgcggaagctcaaaacgagcttggtttgcaagctccagaaatctctctgctcttttgggagatc

SEQ ID NO: 52593 - DNA, 2200 bp, Zea Mays
atgaccgagcaagaaactccaaagcattattatttgttaacttgtaaaaaggcagagggaaagcagagcatggttgatgcaaacagctcagagacactagctccagagtcaggactaactactagccaaagccaagatcacacaacttccattccaagaccaagagcgcttccaaattgcgggcttctcctcgcggtgcaacagtgtgtatgctctgcctgctattctgatcttagggggcaagcgcgactgccacttcacaccttcctcaaggcggcgaagatgtcggtggccgtgtaccgtggcccagctgctgttccggcgttcgaggcgccctgctggctgcgccctgctgagccgtacaagcagccggaggccgtcgtcgacgaccggcctgcgcaggtggacatatggaacgccatccaggccgacgtggacagggcgtccgccggcgctaagaaggcgtcgaagccgtacgtgcaccggtcgcggagcctgatgagccagaagagcctcgaggtctgcacagagagcctgggcaacgagaccggctctggcgacttcacgtcgtccctggacatggccttcctgttcgactcgccgctgccggcgggtgctgccgcagaggaggagtccttctggcagcacgacgggtctcgccgctgcgaggaggagcagtgggaaagcgaggacctcgcggcggtgaactaccactgctcggccgggacgcggccgctgaaccgccgctcgttcccgccgccgctgccgtccatgtcgcgccgcgacgggccgtgcctgcagatgcgcccacgccgccaggacgggcgcctcgtggtcgaggccgtggcggtgaggccgcgcggctacctccacgcgaagcgccagggcgggcgcctccgcctctccttcgtcgagtgctctgctcgcgcccagagcgcggcgagcaggatcaccgcggcggcagctgaggcgccgtatttccccgccgtggagcccaagaacgcgcaagaggaagaggcggccgtggaagtggtggacgacgacgacgaggaggtgatggaggaggaggaggaggaggtggaggtgctggacaggggcaccgtcgttgaggtcaaggtgagcacgcagccgcaggcgcccaccgcgggcaaggtgcaccgctcgaggctcgtgatcaacaagttcgtcggcagcacgccgctgtccgtggaccagccccggtgcgatgacggcgcgagacagcccgaggcgaacacccgcgacgacgagacgacggcggcggcacagccgtcacgcccgaccatgcgacgggtgccgtcgtctacgacgacgctggcggccgcggtcgccgcagcctcgacagggaccgacgtcccgccggctccggaggacgacgacgagtgcggcgggctgcaccttcccgccccggccgcggccgagaccaaacagcttctgctgctgtcgttcacgtcgcggaggggggacaagcaggacctgctgcagagcgtgcggcggtgccggcagctgcggcagaagaagctcttcatcctggagccctactgcattgccacctcctgaacaaaaccgtccatcactgcgctggcacaccacagagctgcgaatgcgacagttcggtcgcgtcgccattgctagccttaaattaatcactagcaaatcaagcacggtcctgattagccgattataagaacccctgccagtcccgtctccgtcgtcgtcacagtggctttccccatgtgttgcttggtgtttcgccttttgactgcgcgtgcatcggctagcagtcgccgtttgtttgttcccttcccgctggcctcgtgcgtgctgtgattgttgttgttgttgctgctgctcaggtagtttgtccccggcatttgcagagtgtgatttgagtaagtaatttatcaatggattaacagattcgctcttgtgaatctgctactttatttggacgagccatccatcagagagcttgccatttccagacgttgtgttatatcctggactggatacggtttcggagaagtcgtgcgtaccgaacaattgtcgaaatggggaaaaggatggagataaaaaaaggtagtagtactatacagtacagtatagcgcgccttgctgctttgggtaaccctacctagctcaatcacgcagattgaataaacagaggccctgtctgtttcgg

SEQ ID NO: 52594 - DNA, 1086 bp, Zea Mays
ctttttcactgtttccctgtgggccatacacgcaagtgcaaggtgttgttcaggatagaaatggtcgaactgttgctacactatttggaaaatgggatgaaagcatgcactatgtaatgggtgattgctttgggaaaggcatgggaactgaacagttttcagaggcccatttgttgtggaaaagaagcaaaccacctaattttcccactagatacaatctcactcgctttgcaattacactgaacgaacttacccctggattgaaggaaaaattgccaccaacagactcaagattacgaccagaccagagatgtctggagaaaggtgaatatgaaagggcaaatgctgagaagttgaggcttgaacagaaacagcggcagcataaagggcgtggctgtaccttactgcctttacctttgttactgcttgctattgaacagactatattaaagtcttatttctcaggcacgaaagatgcaggatagcggatggaagcctcggtggtttgcaaaggataaagctactgacacataccgttacctcggtgggtactgggaatccagagaaaagagcagctgggaaggctgccccgacatcttcgggcaagaccctaacgatctgatgatagctgactaggtttgagtaggttataggtcttttggttctctttttcgggaacgcataattccggaaatttttagtggttcatattatagagcaattaaatggccgttgatatgtaagcattggcagtgcctcagggagtattgatctcgtacataataattagacaatggttcgtctcacatgtcaccttatttttttggcaaagtatttttagccctcttgtgaggttttcacgctcacaagttcagtcttcagagtggtggtataaggtgggcgatcagtgattcaccagtatatggctattattattatataaatgtagtcttatactggatatgtaactacacatacaagtgcaggagggcgtgactttgttcatcattttggtggagtgctagtaaagatattaagctggtcatttgcgtatctttattctcgtgaatgtatgttgcgttgttg

SEQ ID NO: 52595 - DNA, 1039 bp, Zea Mays
cagcaatctcaggtccctaagctcctgcaaaaaaaggactttttcactgtttccctgtgggccatacacgcaagtgcaaggtgttgttcaggatagaaatggtcgaactgttgctacactatttggaaaatgggatgaaagcatgcactatgtaatgggtgattgctttgggaaaggcatgggaactgaacagttttcagaggcccatttgttgtggaaaagaagcaaaccacctaattttcccactagatacaatctcactcgctttgcaattacactgaacgaacttacccctggattgaaggaaaaattgccaccaacagactcaagattacgaccagaccagagatgtctggagaaaggtgaatatgaaagggcaaatgctgagaagttgaggcttgaacagaaacagcggcaggcacgaaagatgcaggatagcggatggaagcctcggtggtttgcaaaggataaagctactgacacataccgttacctcggtgggtactgggaatccagagaaaagagcagctgggaaggctgccccgacatcttcgggcaagaccctaacgatctgatgatagctgactaggtttgagtaggttataggtcttttggttctctttttcgggaacgcataattccggaaatttttagtggttcatattatagagcaattaaatggccgttgatatgtaagcattggcagtgcctcagggagtattgatctcgtacataataattagacaatggttcgtctcacatgtcaccttatttttttggcaaagtatttttagccctcttgtgaggttttcacgctcacaagttcagtcttcagagtggtggtataaggtgggcgatcagtgattcaccagtatatggctattattattatataaatgtagtcttatactggatatgtaactacacatacaagtgcaggagggcgtgactttgttcatcattttggtggagtgctagtaaagatattaagctggtcatttgcgtatctttattctcgtgaatgtatgttgcgttgttg

SEQ ID NO: 52596 - DNA, 1002 bp, Zea Mays
caaagacagttttttttcaccagccatctcccataggtgcaaggtgttgttcaggatagaaatggtcgaactgttgctacactatttggaaaatgggatgaaagcatgcactatgtaatgggtgattgctttgggaaaggcatgggaactgaacagttttcagaggcccatttgttgtggaaaagaagcaaaccacctaattttcccactagatacaatctcactcgctttgcaattacactgaacgaacttacccctggattgaaggaaaaattgccaccaacagactcaagattacgaccagaccagagatgtctggagaaaggtgaatatgaaagggcaaatgctgagaagttgaggcttgaacagaaacagcggcaggcacgaaagatgcaggatagcggatggaagcctcggtggtttgcaaaggataaagctactgacacataccgttacctcggtgggtactgggaatccagagaaaagagcagctgggaaggctgccccgacatcttcgggcaagaccctaacgatctgatgatagctgactaggtttgagtaggttataggtcttttggttctctttttcgggaacgcataattccggaaatttttagtggttcatattatagagcaattaaatggccgttgatatgtaagcattggcagtgcctcagggagtattgatctcgtacataataattagacaatggttcgtctcacatgtcaccttatttttttggcaaagtatttttagccctcttgtgaggttttcacgctcacaagttcagtcttcagagtggtggtataaggtgggcgatcagtgattcaccagtatatggctattattattatataaatgtagtcttatactggatatgtaactacacatacaagtgcaggagggcgtgactttgttcatcattttggtggagtgctagtaaagatattaagctggtcatttgcgtatctttattctcgtgaatgtatgttgcgttgttg

SEQ ID NO: 52597 - DNA, 1463 bp, Zea Mays
cacatcttatttcttcaatctggcttataagagggaatagtcttatgaggattcttagcatagcagcatttgctgtttctggatatgcctctacagatgggaggagctgtaagccttttaatccccttcttggggagacatatgaagcagactatccagacaaaggcctccgttttttctctgaaaaggttagtcatcaccctatggttattgcatgccactgtgtgggaactggctggaggttttgggctgatagcaacctgaagagtaaattctggggtcgttccattcaacttgatcctgttggtgcattaacactggagtttgatgatggtgaagttttccaatggagcaaggtgacaacttcaatttacaatctcatattgggcaagctatattgcgatcactatggtactatgcgcatacaaggtaattgtgaatattcatgtaagcttaagttcaaggagcagtcaattatcgatcgcaaccctcaccaggtgcaaggtgttgttcaggatagaaatggtcgaactgttgctacactatttggaaaatgggatgaaagcatgcactatgtaatgggtgattgctttgggaaaggcatgggaactgaacagttttcagaggcccatttgttgtggaaaagaagcaaaccacctaattttcccactagatacaatctcactcgctttgcaattacactgaacgaacttacccctggattgaaggaaaaattgccaccaacagactcaagattacgaccagaccagagatgtctggagaaaggtgaatatgaaagggcaaatgctgagaagttgaggcttgaacagaaacagcggcaggcacgaaagatgcaggatagcggatggaagcctcggtggtttgcaaaggataaagctactgacacataccgttacctcggtgggtactgggaatccagagaaaagagcagctgggaaggctgccccgacatcttcgggcaagaccctaacgatctgatgatagctgactaggtttgagtaggttataggtcttttggttctctttttcgggaacgcataattccggaaatttttagtggttcatattatagagcaattaaatggccgttgatatgtaagcattggcagtgcctcagggagtattgatctcgtacataataattagacaatggttcgtctcacatgtcaccttatttttttggcaaagtatttttagccctcttgtgaggttttcacgctcacaagttcagtcttcagagtggtggtataaggtgggcgatcagtgattcaccagtatatggctattattattatataaatgtagtcttatactggatatgtaactacacatacaagtgcaggagggcgtgactttgttcatcattttggtggagtgctagtaaagatattaagctggtcatttgcgtatctttattctcgtgaatgtatgttgcgttgttg

SEQ ID NO: 52598 - DNA, 2928 bp, Zea Mays
gtcctgttcaccacccttttcgttctcgtcttcctggctcccggcggcacccacccgttcccggagcaaaaataaaacgatcccaaaacacaaaagaatccgccacctcgccggcgacaggggcgacctcgcgcgccccggccggtgctgaccccgacttctccatgcatccattctgctgcgcgcctctcgtgcccgtatcgcccgcggcctctgccgcccccgctgcgtcctccgctgtggcgggcacccaggccgtgatgccgccaccgcagcccccgccgttgccgcctccgccgcctcgaaacaactccgccactggcggtgagaggcgcgcgcgcgcagcgggggtcagcggtggtggaggaggcgattcctcgccgctcgagggggtgaagctgaacgagatcgtcggcggcggcatctcgggaatcatgtacaagtgggtgaactacgggcgcgggtggaggccgcgctggttcgctctccacgaaggcgtgctctccttctacaagatccacgggcccgaccgcatcatcctatcgcgcgagaccgagcggggcgccaaggtcatcggcgaggagtccctccgccgcctcaaccgcccctccgccttctcgccgtcccactccaacggccaccaccaccctcgaaatcccatcggcgaaatccacctcaaggtgtcaaccgtgagggagagcagatcggacgacaggagattctccatcttctcggggacgaagacgttgcacctgcgggcggagaccagggaggacagagctgcgtggctcgaggcgctgcgggtgaccaaggacatgttcccgaggatgtcctctagcgagatggtcgggccaggggacaccgctgcggcagtggccgtctcaaccgagcgcctaaggcagcggctgcagcaggaaggggtcagcgaggcggccattgctgacagcgagaggatcgtgcgagaagaattcgaggctctgcacaagcagcttgtgctcgccaagcagaagcatgcgctcctcttggaaactcttcgccagctagagacagaaaaggttgatttggagaatacccttgttgatgagagccaaaggcagtcaaaagagtatggatctgcttctaaaccaaggcatgagaagtatagtgaaggaagtgctagcgaatctgatgattataatgaaccacaagatccagctgaagagactgacgatgaagcaaatctttactttgatacaagagattttctatcctcaagctcttttaaaagtagtggatctgatttccaaaggtctgaagctggttcggatgatgaagatgattatccaatggatggaattaatccttctatgaagtctatcggagttagttatgcatatgtaagaagacggaacaggctgccagatccagttgagaaagaaaagggtgtaagtttgtggtcaatgatcaaggacaacataggaaaggatcttacaaaagtttgtctgcctgtttacttcaatgagccactctcatcgctacaaaaatgttttgaagatcttgaatattcctaccttattgatcgtgcatccgaatgggggaaaagggggaatagtcttatgaggattcttagcatagcagcatttgctgtttctggatatgcctctacagatgggaggagctgtaagccttttaatccccttcttggggagacatatgaagcagactatccagacaaaggcctccgttttttctctgaaaaggttagtcatcaccctatggttattgcatgccactgtgtgggaactggctggaggttttgggctgatagcaacctgaagagtaaattctggggtcgttccattcaacttgatcctgttggtgcattaacactggagtttgatgatggtgaagttttccaatggagcaaggtgacaacttcaatttacaatctcatattgggcaagctatattgcgatcactatggtactatgcgcatacaaggatagaaatggtcgaactgttgctacactatttggaaaatgggatgaaagcatgcactatgtaatgggtgattgctttgggaaaggcatgggaactgaacagttttcagaggcccatttgttgtggaaaagaagcaaaccacctaattttcccactagatacaatctcactcgctttgcaattacactgaacgaacttacccctggattgaaggaaaaattgccaccaacagactcaagattacgaccagaccagagatgtctggagaaaggtgaatatgaaagggcaaatgctgagaagttgaggcttgaacagaaacagcggcaggcacgaaagatgcaggatagcggatggaagcctcggtggtttgcaaaggataaagctactgacacataccgttacctcggtgggtactgggaatccagagaaaagagcagctgggaaggctgccccgacatcttcgggcaagaccctaacgatctgatgatagctgactaggtttgagtaggttataggtcttttggttctctttttcgggaacgcataattccggaaatttttagtggttcatattatagagcaattaaatggccgttgatatgtaagcattggcagtgcctcagggagtattgatctcgtacataataattagacaatggttcgtctcacatgtcaccttatttttttggcaaagtatttttagccctcttgtgaggttttcacgctcacaagttcagtcttcagagtggtggtataaggtgggcgatcagtgattcaccagtatatggctattattattatataaatgtagtcttatactggatatgtaactacacatacaagtgcaggagggcgtgactttgttcatcattttggtggagtgctagtaaagatattaagctggtcatttgcgtatctttattctcgtgaatgtatgttgcgttgttg

SEQ ID NO: 52599 - DNA, 2946 bp, Zea Mays
gtcctgttcaccacccttttcgttctcgtcttcctggctcccggcggcacccacccgttcccggagcaaaaataaaacgatcccaaaacacaaaagaatccgccacctcgccggcgacaggggcgacctcgcgcgccccggccggtgctgaccccgacttctccatgcatccattctgctgcgcgcctctcgtgcccgtatcgcccgcggcctctgccgcccccgctgcgtcctccgctgtggcgggcacccaggccgtgatgccgccaccgcagcccccgccgttgccgcctccgccgcctcgaaacaactccgccactggcggtgagaggcgcgcgcgcgcagcgggggtcagcggtggtggaggaggcgattcctcgccgctcgagggggtgaagctgaacgagatcgtcggcggcggcatctcgggaatcatgtacaagtgggtgaactacgggcgcgggtggaggccgcgctggttcgctctccacgaaggcgtgctctccttctacaagatccacgggcccgaccgcatcatcctatcgcgcgagaccgagcggggcgccaaggtcatcggcgaggagtccctccgccgcctcaaccgcccctccgccttctcgccgtcccactccaacggccaccaccaccctcgaaatcccatcggcgaaatccacctcaaggtgtcaaccgtgagggagagcagatcggacgacaggagattctccatcttctcggggacgaagacgttgcacctgcgggcggagaccagggaggacagagctgcgtggctcgaggcgctgcgggtgaccaaggacatgttcccgaggatgtcctctagcgagatggtcgggccaggggacaccgctgcggcagtggccgtctcaaccgagcgcctaaggcagcggctgcagcaggaaggggtcagcgaggcggccattgctgacagcgagaggatcgtgcgagaagaattcgaggctctgcacaagcagcttgtgctcgccaagcagaagcatgcgctcctcttggaaactcttcgccagctagagacagaaaaggttgatttggagaatacccttgttgatgagagccaaaggcagtcaaaagagtatggatctgcttctaaaccaaggcatgagaagtatagtgaaggaagtgctagcgaatctgatgattataatgaaccacaagatccagctgaagagactgacgatgaagcaaatctttactttgatacaagagattttctatcctcaagctcttttaaaagtagtggatctgatttccaaaggtctgaagctggttcggatgatgaagatgattatccaatggatggaattaatccttctatgaagtctatcggagttagttatgcatatgtaagaagacggaacaggctgccagatccagttgagaaagaaaagggtgtaagtttgtggtcaatgatcaaggacaacataggaaaggatcttacaaaagtttgtctgcctgtttacttcaatgagccactctcatcgctacaaaaatgttttgaagatcttgaatattcctaccttattgatcgtgcatccgaatgggggaaaagggggaatagtcttatgaggattcttagcatagcagcatttgctgtttctggatatgcctctacagatgggaggagctgtaagccttttaatccccttcttggggagacatatgaagcagactatccagacaaaggcctccgttttttctctgaaaaggttagtcatcaccctatggttattgcatgccactgtgtgggaactggctggaggttttgggctgatagcaacctgaagagtaaattctggggtcgttccattcaacttgatcctgttggtgcattaacactggagtttgatgatggtgaagttttccaatggagcaaggtgacaacttcaatttacaatctcatattgggcaagctatattgcgatcactatggtactatgcgcatacaaggtgcaaggtgttgttcaggatagaaatggtcgaactgttgctacactatttggaaaatgggatgaaagcatgcactatgtaatgggtgattgctttgggaaaggcatgggaactgaacagttttcagaggcccatttgttgtggaaaagaagcaaaccacctaattttcccactagatacaatctcactcgctttgcaattacactgaacgaacttacccctggattgaaggaaaaattgccaccaacagactcaagattacgaccagaccagagatgtctggagaaaggtgaatatgaaagggcaaatgctgagaagttgaggcttgaacagaaacagcggcaggcacgaaagatgcaggatagcggatggaagcctcggtggtttgcaaaggataaagctactgacacataccgttacctcggtgggtactgggaatccagagaaaagagcagctgggaaggctgccccgacatcttcgggcaagaccctaacgatctgatgatagctgactaggtttgagtaggttataggtcttttggttctctttttcgggaacgcataattccggaaatttttagtggttcatattatagagcaattaaatggccgttgatatgtaagcattggcagtgcctcagggagtattgatctcgtacataataattagacaatggttcgtctcacatgtcaccttatttttttggcaaagtatttttagccctcttgtgaggttttcacgctcacaagttcagtcttcagagtggtggtataaggtgggcgatcagtgattcaccagtatatggctattattattatataaatgtagtcttatactggatatgtaactacacatacaagtgcaggagggcgtgactttgttcatcattttggtggagtgctagtaaagatattaagctggtcatttgcgtatctttattctcgtgaatgtatgttgcgttgttg

SEQ ID NO: 52600 - DNA, 3198 bp, Zea Mays
gtcctgttcaccacccttttcgttctcgtcttcctggctcccggcggcacccacccgttcccggagcaaaaataaaacgatcccaaaacacaaaagaatccgccacctcgccggcgacaggggcgacctcgcgcgccccggccggtgctgaccccgacttctccatgcatccattctgctgcgcgcctctcgtgcccgtatcgcccgcggcctctgccgcccccgctgcgtcctccgctgtggcgggcacccaggccgtgatgccgccaccgcagcccccgccgttgccgcctccgccgcctcgaaacaactccgccactggcggtgagaggcgcgcgcgcgcagcgggggtcagcggtggtggaggaggcgattcctcgccgctcgagggggtgaagctgaacgagatcgtcggcggcggcatctcgggaatcatgtacaagtgggtgaactacgggcgcgggtggaggccgcgctggttcgctctccacgaaggcgtgctctccttctacaagatccacgggcccgaccgcatcatcctatcgcgcgagaccgagcggggcgccaaggtcatcggcgaggagtccctccgccgcctcaaccgcccctccgccttctcgccgtcccactccaacggccaccaccaccctcgaaatcccatcggcgaaatccacctcaaggtgtcaaccgtgagggagagcagatcggacgacaggagattctccatcttctcggggacgaagacgttgcacctgcgggcggagaccagggaggacagagctgcgtggctcgaggcgctgcgggtgaccaaggacatgttcccgaggatgtcctctagcgagatggtcgggccaggggacaccgctgcggcagtggccgtctcaaccgagcgcctaaggcagcggctgcagcaggaaggggtcagcgaggcggccattgctgacagcgagaggatcgtgcgagaagaattcgaggctctgcacaagcagcttgtgctcgccaagcagaagcatgcgctcctcttggaaactcttcgccagctagaggtacttccataatctgtacctgtggattcgaaaagaatcttgttgtgcatgaagtgggaataattgctttttagtgcagggtgtgtcatgcactcatgcttgtgatattctgcatcttgtacatgattgagttcattgaagaaaaaagtacgaagctactgacagaaaaggttgatttggagaatacccttgttgatgagagccaaaggcagtcaaaagagtatggatctgcttctaaaccaaggcatgagaagtatagtgaaggaagtgctagcgaatctgatgattataatgaaccacaagatccagctgaagagactgacgatgaagcaaatctttactttgatacaagagattttctatcctcaagctcttttaaaagtagtggatctgatttccaaaggtctgaagctggttcggatgatgaagatgattatccaatggatggaattaatccttctatgaagtctatcggagttagttatgcatatgtaagaagacggaacaggctgccagatccagttgagaaagaaaagggtgtaagtttgtggtcaatgatcaaggacaacataggaaaggatcttacaaaagtttgtctgcctgtttacttcaatgagccactctcatcgctacaaaaatgttttgaagatcttgaatattcctaccttattgatcgtgcatccgaatgggggaaaagggggaatagtcttatgaggattcttagcatagcagcatttgctgtttctggatatgcctctacagatgggaggagctgtaagccttttaatccccttcttggggagacatatgaagcagactatccagacaaaggcctccgttttttctctgaaaaggttagtcatcaccctatggttattgcatgccactgtgtgggaactggctggaggttttgggctgatagcaacctgaagagtaaattctggggtcgttccattcaacttgatcctgttggtgcattaacactggagtttgatgatggtgaagttttccaatggagcaaggtgacaacttcaatttacaatctcatattgggcaagctatattgcgatcactatggtactatgcgcatacaaggtaattgtgaatattcatgtaagcttaagttcaaggagcagtcaattatcgatcgcaaccctcaccaggtgcaaggtgttgttcaggatagaaatggtcgaactgttgctacactatttggaaaatgggatgaaagcatgcactatgtaatgggtgattgctttgggaaaggcatgggaactgaacagttttcagaggcccatttgttgtggaaaagaagcaaaccacctaattttcccactagatacaatctcactcgctttgcaattacactgaacgaacttacccctggattgaaggttcatactttacatgtaagcaggaaaaattgccaccaacagactcaagattacgaccagaccagagatgtctggagaaaggtgaatatgaaagggcaaatgctgagaagttgaggcttgaacagaaacagcggcaggcacgaaagatgcaggatagcggatggaagcctcggtggtttgcaaaggataaagctactgacacataccgttacctcggtgggtactgggaatccagagaaaagagcagctgggaaggctgccccgacatcttcgggcaagaccctaacgatctgatgatagctgactaggtttgagtaggttataggtcttttggttctctttttcgggaacgcataattccggaaatttttagtggttcatattatagagcaattaaatggccgttgatatgtaagcattggcagtgcctcagggagtattgatctcgtacataataattagacaatggttcgtctcacatgtcaccttatttttttggcaaagtatttttagccctcttgtgaggttttcacgctcacaagttcagtcttcagagtggtggtataaggtgggcgatcagtgattcaccagtatatggctattattattatataaatgtagtcttatactggatatgtaactacacatacaagtgcaggagggcgtgactttgttcatcattttggtggagtgctagtaaagatattaagctggtcatttgcgtatctttattctcgtgaatgtatgttgcgttgttg

SEQ ID NO: 52601 - DNA, 3095 bp, Zea Mays
gtcctgttcaccacccttttcgttctcgtcttcctggctcccggcggcacccacccgttcccggagcaaaaataaaacgatcccaaaacacaaaagaatccgccacctcgccggcgacaggggcgacctcgcgcgccccggccggtgctgaccccgacttctccatgcatccattctgctgcgcgcctctcgtgcccgtatcgcccgcggcctctgccgcccccgctgcgtcctccgctgtggcgggcacccaggccgtgatgccgccaccgcagcccccgccgttgccgcctccgccgcctcgaaacaactccgccactggcggtgagaggcgcgcgcgcgcagcgggggtcagcggtggtggaggaggcgattcctcgccgctcgagggggtgaagctgaacgagatcgtcggcggcggcatctcgggaatcatgtacaagtgggtgaactacgggcgcgggtggaggccgcgctggttcgctctccacgaaggcgtgctctccttctacaagatccacgggcccgaccgcatcatcctatcgcgcgagaccgagcggggcgccaaggtcatcggcgaggagtccctccgccgcctcaaccgcccctccgccttctcgccgtcccactccaacggccaccaccaccctcgaaatcccatcggcgaaatccacctcaaggtgtcaaccgtgagggagagcagatcggacgacaggagattctccatcttctcggggacgaagacgttgcacctgcgggcggagaccagggaggacagagctgcgtggctcgaggcgctgcgggtgaccaaggacatgttcccgaggatgtcctctagcgagatggtcgggccaggggacaccgctgcggcagtggccgtctcaaccgagcgcctaaggcagcggctgcagcaggaaggggtcagcgaggcggccattgctgacagcgagaggatcgtgcgagaagaattcgaggctctgcacaagcagcttgtgctcgccaagcagaagcatgcgctcctcttggaaactcttcgccagctagagaaaaggttgatttggagaatacccttgttgatgagagccaaaggcagtcaaaagagtatggatctgcttctaaaccaaggcatgagaagtatagtgaaggaagtgctagcgaatctgatgattataatgaaccacaagatccagctgaagagactgacgatgaagcaaatctttactttgatacaagagattttctatcctcaagctcttttaaaagtagtggatctgatttccaaaggtctgaagctggttcggatgatgaagatgattatccaatggatggaattaatccttctatgaagtctatcggagttagttatgcatatgtaagaagacggaacaggctgccagatccagttgagaaagaaaagggtgtaagtttgtggtcaatgatcaaggacaacataggaaaggatcttacaaaagtttgtctgcctgtttacttcaatgagccactctcatcgctacaaaaatgttttgaagatcttgaatattcctaccttattgatcgtgcatccgaatgggggaaaagggggaatagtcttatgaggattcttagcatagcagcatttgctgtttctggatatgcctctacagatgggaggagctgtaagccttttaatccccttcttggggagacatatgaagcagactatccagacaaaggcctccgttttttctctgaaaaggttagtcatcaccctatggttattgcatgccactgtgtgggaactggctggaggttttgggctgatagcaacctgaagagtaaattctggggtcgttccattcaacttgatcctgttggtgcattaacactggagtttgatgatggtgaagttttccaatggagcaaggtgacaacttcaatttacaatctcatattgggcaagctatattgcgatcactatggtactatgcgcatacaaggtaattgtgaatattcatgtaagcttaagttcaaggagcagtcaattatcgatcgcaaccctcaccaggtgcaaggtgttgttcaggatagaaatggtcgaactgttgctacactatttggaaaatgggatgaaagcatgcactatgtaatgggtgattgctttgggaaaggcatgggaactgaacagttttcagaggcccatttgttgtggaaaagaagcaaaccacctaattttcccactagatacaatctcactcgctttgcaattacactgaacgaacttacccctggattgaaggaaaaattgccaccaacagactcaagattacgaccagaccagagatgtctggagaaaggtgaatatgaaagggcaaatgctgagaagttgaggcttgaacagaaacagcggcagcataaagggcgtggctgtaccttactgcctttacctttgttactgcttgctattgaacagactatattaaagtcttatttctcaggcacgaaagatgcaggatagcggatggaagcctcggtggtttgcaaaggataaagctactgacacataccgttacctcggtgggtactgggaatccagagaaaagagcagctgggaaggctgccccgacatcttcgggcaagaccctaacgatctgatgatagctgactaggtttgagtaggttataggtcttttggttctctttttcgggaacgcataattccggaaatttttagtggttcatattatagagcaattaaatggccgttgatatgtaagcattggcagtgcctcagggagtattgatctcgtacataataattagacaatggttcgtctcacatgtcaccttatttttttggcaaagtatttttagccctcttgtgaggttttcacgctcacaagttcagtcttcagagtggtggtataaggtgggcgatcagtgattcaccagtatatggctattattattatataaatgtagtcttatactggatatgtaactacacatacaagtgcaggagggcgtgactttgttcatcattttggtggagtgctagtaaagatattaagctggtcatttgcgtatctttattctcgtgaatgtatgttgcgttgttg

SEQ ID NO: 52602 - DNA, 3029 bp, Zea Mays
ggcaaacatagctcctgtagtcctgttcaccacccttttcgttctcgtcttcctggctcccggcggcacccacccgttcccggagcaaaaataaaacgatcccaaaacacaaaagaatccgccacctcgccggcgacaggggcgacctcgcgcgccccggccggtgctgaccccgacttctccatgcatccattctgctgcgcgcctctcgtgcccgtatcgcccgcggcctctgccgcccccgctgcgtcctccgctgtggcgggcacccaggccgtgatgccgccaccgcagcccccgccgttgccgcctccgccgcctcgaaacaactccgccactggcggtgagaggcgcgcgcgcgcagcgggggtcagcggtggtggaggaggcgattcctcgccgctcgagggggtgaagctgaacgagatcgtcggcggcggcatctcgggaatcatgtacaagtgggtgaactacgggcgcgggtggaggccgcgctggttcgctctccacgaaggcgtgctctccttctacaagatccacgggcccgaccgcatcatcctatcgcgcgagaccgagcggggcgccaaggtcatcggcgaggagtccctccgccgcctcaaccgcccctccgccttctcgccgtcccactccaacggccaccaccaccctcgaaatcccatcggcgaaatccacctcaaggtgtcaaccgtgagggagagcagatcggacgacaggagattctccatcttctcggggacgaagacgttgcacctgcgggcggagaccagggaggacagagctgcgtggctcgaggcgctgcgggtgaccaaggacatgttcccgaggatgtcctctagcgagatggtcgggccaggggacaccgctgcggcagtggccgtctcaaccgagcgcctaaggcagcggctgcagcaggaaggggtcagcgaggcggccattgctgacagcgagaggatcgtgcgagaagaattcgaggctctgcacaagcagcttgtgctcgccaagcagaagcatgcgctcctcttggaaactcttcgccagctagagaaaaggttgatttggagaatacccttgttgatgagagccaaaggcagtcaaaagagtatggatctgcttctaaaccaaggcatgagaagtatagtgaaggaagtgctagcgaatctgatgattataatgaaccacaagatccagctgaagagactgacgatgaagcaaatctttactttgatacaagagattttctatcctcaagctcttttaaaagtagtggatctgatttccaaaggtctgaagctggttcggatgatgaagatgattatccaatggatggaattaatccttctatgaagtctatcggagttagttatgcatatgtaagaagacggaacaggctgccagatccagttgagaaagaaaagggtgtaagtttgtggtcaatgatcaaggacaacataggaaaggatcttacaaaagtttgtctgcctgtttacttcaatgagccactctcatcgctacaaaaatgttttgaagatcttgaatattcctaccttattgatcgtgcatccgaatgggggaaaagggggaatagtcttatgaggattcttagcatagcagcatttgctgtttctggatatgcctctacagatgggaggagctgtaagccttttaatccccttcttggggagacatatgaagcagactatccagacaaaggcctccgttttttctctgaaaaggttagtcatcaccctatggttattgcatgccactgtgtgggaactggctggaggttttgggctgatagcaacctgaagagtaaattctggggtcgttccattcaacttgatcctgttggtgcattaacactggagtttgatgatggtgaagttttccaatggagcaaggtgacaacttcaatttacaatctcatattgggcaagctatattgcgatcactatggtactatgcgcatacaaggtaattgtgaatattcatgtaagcttaagttcaaggagcagtcaattatcgatcgcaaccctcaccaggtgcaaggtgttgttcaggatagaaatggtcgaactgttgctacactatttggaaaatgggatgaaagcatgcactatgtaatgggtgattgctttgggaaaggcatgggaactgaacagttttcagaggcccatttgttgtggaaaagaagcaaaccacctaattttcccactagatacaatctcactcgctttgcaattacactgaacgaacttacccctggattgaaggaaaaattgccaccaacagactcaagattacgaccagaccagagatgtctggagaaaggtgaatatgaaagggcaaatgctgagaagttgaggcttgaacagaaacagcggcaggcacgaaagatgcaggatagcggatggaagcctcggtggtttgcaaaggataaagctactgacacataccgttacctcggtgggtactgggaatccagagaaaagagcagctgggaaggctgccccgacatcttcgggcaagaccctaacgatctgatgatagctgactaggtttgagtaggttataggtcttttggttctctttttcgggaacgcataattccggaaatttttagtggttcatattatagagcaattaaatggccgttgatatgtaagcattggcagtgcctcagggagtattgatctcgtacataataattagacaatggttcgtctcacatgtcaccttatttttttggcaaagtatttttagccctcttgtgaggttttcacgctcacaagttcagtcttcagagtggtggtataaggtgggcgatcagtgattcaccagtatatggctattattattatataaatgtagtcttatactggatatgtaactacacatacaagtgcaggagggcgtgactttgttcatcattttggtggagtgctagtaaagatattaagctggtcatttgcgtatctttattctcgtgaatgtatgttgcgttgttg

SEQ ID NO: 52603 - DNA, 3107 bp, Zea Mays
aattaattttgtaactcgttatttaaacattcgtgacagtgatgaagaaaagcgacaaccaaccgtcatgcaaaggcaaacatagctcctgtagtcctgttcaccacccttttcgttctcgtcttcctggctcccggcggcacccacccgttcccggagcaaaaataaaacgatcccaaaacacaaaagaatccgccacctcgccggcgacaggggcgacctcgcgcgccccggccggtgctgaccccgacttctccatgcatccattctgctgcgcgcctctcgtgcccgtatcgcccgcggcctctgccgcccccgctgcgtcctccgctgtggcgggcacccaggccgtgatgccgccaccgcagcccccgccgttgccgcctccgccgcctcgaaacaactccgccactggcggtgagaggcgcgcgcgcgcagcgggggtcagcggtggtggaggaggcgattcctcgccgctcgagggggtgaagctgaacgagatcgtcggcggcggcatctcgggaatcatgtacaagtgggtgaactacgggcgcgggtggaggccgcgctggttcgctctccacgaaggcgtgctctccttctacaagatccacgggcccgaccgcatcatcctatcgcgcgagaccgagcggggcgccaaggtcatcggcgaggagtccctccgccgcctcaaccgcccctccgccttctcgccgtcccactccaacggccaccaccaccctcgaaatcccatcggcgaaatccacctcaaggtgtcaaccgtgagggagagcagatcggacgacaggagattctccatcttctcggggacgaagacgttgcacctgcgggcggagaccagggaggacagagctgcgtggctcgaggcgctgcgggtgaccaaggacatgttcccgaggatgtcctctagcgagatggtcgggccaggggacaccgctgcggcagtggccgtctcaaccgagcgcctaaggcagcggctgcagcaggaaggggtcagcgaggcggccattgctgacagcgagaggatcgtgcgagaagaattcgaggctctgcacaagcagcttgtgctcgccaagcagaagcatgcgctcctcttggaaactcttcgccagctagagacagaaaaggttgatttggagaatacccttgttgatgagagccaaaggcagtcaaaagagtatggatctgcttctaaaccaaggcatgagaagtatagtgaaggaagtgctagcgaatctgatgattataatgaaccacaagatccagctgaagagactgacgatgaagcaaatctttactttgatacaagagattttctatcctcaagctcttttaaaagtagtggatctgatttccaaaggtctgaagctggttcggatgatgaagatgattatccaatggatggaattaatccttctatgaagtctatcggagttagttatgcatatgtaagaagacggaacaggctgccagatccagttgagaaagaaaagggtgtaagtttgtggtcaatgatcaaggacaacataggaaaggatcttacaaaagtttgtctgcctgtttacttcaatgagccactctcatcgctacaaaaatgttttgaagatcttgaatattcctaccttattgatcgtgcatccgaatgggggaaaagggggaatagtcttatgaggattcttagcatagcagcatttgctgtttctggatatgcctctacagatgggaggagctgtaagccttttaatccccttcttggggagacatatgaagcagactatccagacaaaggcctccgttttttctctgaaaaggttagtcatcaccctatggttattgcatgccactgtgtgggaactggctggaggttttgggctgatagcaacctgaagagtaaattctggggtcgttccattcaacttgatcctgttggtgcattaacactggagtttgatgatggtgaagttttccaatggagcaaggtgacaacttcaatttacaatctcatattgggcaagctatattgcgatcactatggtactatgcgcatacaaggtaattgtgaatattcatgtaagcttaagttcaaggagcagtcaattatcgatcgcaaccctcaccaggtgcaaggtgttgttcaggatagaaatggtcgaactgttgctacactatttggaaaatgggatgaaagcatgcactatgtaatgggtgattgctttgggaaaggcatgggaactgaacagttttcagaggcccatttgttgtggaaaagaagcaaaccacctaattttcccactagatacaatctcactcgctttgcaattacactgaacgaacttacccctggattgaaggaaaaattgccaccaacagactcaagattacgaccagaccagagatgtctggagaaaggtgaatatgaaagggcaaatgctgagaagttgaggcttgaacagaaacagcggcaggcacgaaagatgcaggatagcggatggaagcctcggtggtttgcaaaggataaagctactgacacataccgttacctcggtgggtactgggaatccagagaaaagagcagctgggaaggctgccccgacatcttcgggcaagaccctaacgatctgatgatagctgactaggtttgagtaggttataggtcttttggttctctttttcgggaacgcataattccggaaatttttagtggttcatattatagagcaattaaatggccgttgatatgtaagcattggcagtgcctcagggagtattgatctcgtacataataattagacaatggttcgtctcacatgtcaccttatttttttggcaaagtatttttagccctcttgtgaggttttcacgctcacaagttcagtcttcagagtggtggtataaggtgggcgatcagtgattcaccagtatatggctattattattatataaatgtagtcttatactggatatgtaactacacatacaagtgcaggagggcgtgactttgttcatcattttggtggagtgctagtaaagatattaagctggtcatttgcgtatctttattctcgtgaatgtatgttgcgttgttg

SEQ ID NO: 52604 - DNA, 2504 bp, Zea Mays
gtcctgttcaccacccttttcgttctcgtcttcctggctcccggcggcacccacccgttcccggagcaaaaataaaacgatcccaaaacacaaaagaatccgccacctcgccggcgacaggggcgacctcgcgcgccccggccggtgctgaccccgacttctccatgcatccattctgctgcgcgcctctcgtgcccgtatcgcccgcggcctctgccgcccccgctgcgtcctccgctgtggcgggcacccaggccgtgatgccgccaccgcagcccccgccgttgccgcctccgccgcctcgaaacaactccgccactggcggtgagaggcgcgcgcgcgcagcgggggtcagcggtggtggaggaggcgattcctcgccgctcgagggggtgaagctgaacgagatcgtcggcggcggcatctcgggaatcatgtacaagtgggtgaactacgggcgcgggtggaggccgcgctggttcgctctccacgaaggcgtgctctccttctacaagatccacgggcccgaccgcatcatcctatcgcgcgagaccgagcggggcgccaaggtcatcggcgaggagtccctccgccgcctcaaccgcccctccgccttctcgccgtcccactccaacggccaccaccaccctcgaaatcccatcggcgaaatccacctcaaggtgtcaaccgtgagggagagcagatcggacgacaggagattctccatcttctcggggacgaagacgttgcacctgcgggcggagaccagggaggacagagctgcgtggctcgaggcgctgcgggtgaccaaggacatgttcccgaggatgtcctctagcgagatggtcgggccaggggacaccgctgcggcagtggccgtctcaaccgagcgcctaaggcagcggctgcagcaggaaggggtcagcgaggcggccattgctgacagcgagaggatcgtgcgagaagaattcgaggctctgcacaagcagcttgtgctcgccaagcagaagcatgcgctcctcttggaaactcttcgccagctagagtgcagggtgtgtcatgcactcatgcttgtgatattctgcatcttgtacatgattgagttcattgaagaaaaaagtacgaagctactgacagaaaaggttgatttggagaatacccttgttgatgagagccaaaggcagtcaaaagagtatggatctgcttctaaaccaaggcatgagaagtatagtgaaggaagtgctagcgaatctgatgattataatgaaccacaagatccagctgaagagactgacgatgaagcaaatctttactttgatacaagagattttctatcctcaagctcttttaaaagtagtggatctgatttccaaaggtctgaagctggttcggatgatgaagatgattatccaatggatggaattaatccttctatgaagtctatcggagttagttatgcatatgtaagaagacggaacaggctgccagatccagttgagaaagaaaagggtgtaagtttgtggtcaatgatcaaggacaacataggaaaggatcttacaaaagtttgtctgcctgtttacttcaatgagccactctcatcgctacaaaaatgttttgaagatcttgaatattcctaccttattgatcgtgcatccgaatgggggaaaagggggaatagtcttatgaggattcttagcatagcagcatttgctgtttctggatatgcctctacagatgggaggagctgtaagccttttaatccccttcttggggagacatatgaagcagactatccagacaaaggcctccgttttttctctgaaaaggttagtcatcaccctatggttattgcatgccactgtgtgggaactggctggaggttttgggctgatagcaacctgaagagtaaattctggggtcgttccattcaacttgatcctgttggtgcattaacactggagtttgatgatggtgaagttttccaatggagcaaggtgacaacttcaatttacaatctcatattgggcaagctatattgcgatcactatggtactatgcgcatacaaggtaattgtgaatattcatgtaagcttaagttcaaggagcagtcaattatcgatcgcaaccctcaccaggtgcaaggtgttgttcaggatagaaatggtcgaactgttgctacactatttggaaaatgggatgaaagcatgcactatgtaatgggtgattgctttgggaaaggcatgggaactgaacagttttcagaggcccatttgttgtggaaaagaagcaaaccacctaattttcccactagatacaatctcactcgctttgcaattacactgaacgaacttacccctggattgaaggaaaaattgccaccaacagactcaagattacgaccagaccagagatgtctggagaaaggtgaatatgaaagggcaaatgctgagaagttgaggcttgaacagaaacagcggcaggtaataggtgacactctgactctg

SEQ ID NO: 52605 - DNA, 2148 bp, Zea Mays
gtcctgttcaccacccttttcgttctcgtcttcctggctcccggcggcacccacccgttcccggagcaaaaataaaacgatcccaaaacacaaaagaatccgccacctcgccggcgacaggggcgacctcgcgcgccccggccggtgctgaccccgacttctccatgcatccattctgctgcgcgcctctcgtgcccgtatcgcccgcggcctctgccgcccccgctgcgtcctccgctgtggcgggcacccaggccgtgatgccgccaccgcagcccccgccgttgccgcctccgccgcctcgaaacaactccgccactggcggtgagaggcgcgcgcgcgcagcgggggtcagcggtggtggaggaggcgattcctcgccgctcgagggggtgaagctgaacgagatcgtcggcggcggcatctcgggaatcatgtacaagtgggtgaactacgggcgcgggtggaggccgcgctggttcgctctccacgaaggcgtgctctccttctacaagatccacgggcccgaccgcatcatcctatcgcgcgagaccgagcggggcgccaaggtcatcggcgaggagtccctccgccgcctcaaccgcccctccgccttctcgccgtcccactccaacggccaccaccaccctcgaaatcccatcggcgaaatccacctcaaggtgtcaaccgtgagggagagcagatcggacgacaggagattctccatcttctcggggacgaagacgttgcacctgcgggcggagaccagggaggacagagctgcgtggctcgaggcgctgcgggtgaccaaggacatgttcccgaggatgtcctctagcgagatggtcgggccaggggacaccgctgcggcagtggccgtctcaaccgagcgcctaaggcagcggctgcagcaggaaggggtcagcgaggcggccattgctgacagcgagaggatcgtgcgagaagaattcgaggctctgcacaagcagcttgtgctcgccaagcagaagcatgcgctcctcttggaaactcttcgccagctagagtgcagggtgtgtcatgcactcatgcttgtgatattctgcatcttgtacatgattgagttcattgaagaaaaaagtacgaagctactgacagaaaaggttgatttggagaatacccttgttgatgagagccaaaggcagtcaaaagagtatggatctgcttctaaaccaaggcatgagaagtatagtgaaggaagtgctagcgaatctgatgattataatgaaccacaagatccagctgaagagactgacgatgaagcaaatctttactttgatacaagagattttctatcctcaagctcttttaaaagtagtggatctgatttccaaaggtctgaagctggttcggatgatgaagatgattatccaatggatggaattaatccttctatgaagtctatcggagttagttatgcatatgtaagaagacggaacaggctgccagatccagttgagaaagaaaagggtgtaagtttgtggtcaatgatcaaggacaacataggaaaggatcttacaaaagtttgtctgcctgtttacttcaatgagccactctcatcgctacaaaaatgttttgaagatcttgaatattcctaccttattgatcgtgcatccgaatgggggaaaagggggaatagtcttatgaggattcttagcatagcagcatttgctgtttctggatatgcctctacagatgggaggagctgtaagccttttaatccccttcttggggagacatatgaagcagactatccagacaaaggcctccgttttttctctgaaaaggttagtcatcaccctatggttattgcatgccactgtgtgggaactggctggaggttttgggctgatagcaacctgaagagtaaattctggggtcgttccattcaacttgatcctgttggtgcattaacactggagtttgatgatggtgaagttttccaatggagcaaggtgacaacttcaatttacaatctcatattgggcaagctatattgcgatcactatggtactatgcgcatacaaggtaattgtgaatattcatgtaagcttaagttcaaggagcagtcaattatcgatcgcaaccctcaccaggagaactgcgcga

SEQ ID NO: 52606 - DNA, 2334 bp, Zea Mays
ggcaaacatagctcctgtagtcctgttcaccacccttttcgttctcgtcttcctggctcccggcggcacccacccgttcccggagcaaaaataaaacgatcccaaaacacaaaagaatccgccacctcgccggcgacaggggcgacctcgcgcgccccggccggtgctgaccccgacttctccatgcatccattctgctgcgcgcctctcgtgcccgtatcgcccgcggcctctgccgcccccgctgcgtcctccgctgtggcgggcacccaggccgtgatgccgccaccgcagcccccgccgttgccgcctccgccgcctcgaaacaactccgccactggcggtgagaggcgcgcgcgcgcagcgggggtcagcggtggtggaggaggcgattcctcgccgctcgagggggtgaagctgaacgagatcgtcggcggcggcatctcgggaatcatgtacaagtgggtgaactacgggcgcgggtggaggccgcgctggttcgctctccacgaaggcgtgctctccttctacaagatccacgggcccgaccgcatcatcctatcgcgcgagaccgagcggggcgccaaggtcatcggcgaggagtccctccgccgcctcaaccgcccctccgccttctcgccgtcccactccaacggccaccaccaccctcgaaatcccatcggcgaaatccacctcaaggtgtcaaccgtgagggagagcagatcggacgacaggagattctccatcttctcggggacgaagacgttgcacctgcgggcggagaccagggaggacagagctgcgtggctcgaggcgctgcgggtgaccaaggacatgttcccgaggatgtcctctagcgagatggtcgggccaggggacaccgctgcggcagtggccgtctcaaccgagcgcctaaggcagcggctgcagcaggaaggggtcagcgaggcggccattgctgacagcgagaggatcgtgcgagaagaattcgaggctctgcacaagcagcttgtgctcgccaagcagaagcatgcgctcctcttggaaactcttcgccagctagagacagaaaaggttgatttggagaatacccttgttgatgagagccaaaggcagtcaaaagagtatggatctgcttctaaaccaaggcatgagaagtatagtgaaggaagtgctagcgaatctgatgattataatgaaccacaagatccagctgaagagactgacgatgaagcaaatctttactttgatacaagagattttctatcctcaagctcttttaaaagtagtggatctgatttccaaaggtctgaagctggttcggatgatgaagatgattatccaatggatggaattaatccttctatgaagtctatcggagttagttatgcatatgtaagaagacggaacaggctgccagatccagttgagaaagaaaagggtgtaagtttgtggtcaatgatcaaggacaacataggaaaggatcttacaaaagtttgtctgcctgtttacttcaatgagccactctcatcgctacaaaaatgttttgaagatcttgaatattcctaccttattgatcgtgcatccgaatgggggaaaagggggaatagtcttatgaggattcttagcatagcagcatttgctgtttctggatatgcctctacagatgggaggagctgtaagccttttaatccccttcttggggagacatatgaagcagactatccagacaaaggcctccgttttttctctgaaaaggttagtcatcaccctatggttattgcatgccactgtgtgggaactggctggaggttttgggctgatagcaacctgaagagtaaattctggggtcgttccattcaacttgatcctgttggtgcattaacactggagtttgatgatggtgaagttttccaatggagcaaggtgacaacttcaatttacaatctcatattgggcaagctatattgcgatcactatggtactatgcgcatacaaggtaattgtgaatattcatgtaagcttaagttcaaggagcagtcaattatcgatcgcaaccctcaccaggcaagtgttacatttctcactatggaaagacacattcttttaaacaattttgtcgagaagattgcatgggaacatgtttttgaaagcgctgggaattatggcatgtagcgttctgcttgaaataatttacactatgtgtttgaacctgaacattcttattattgttagaagatgttttggcttttctagatacatagcttttgttatgtatttagatatacaatatgtctagatatattgtatgtatttaggaaagccaaaacgtct

SEQ ID NO: 52607 - DNA, 1330 bp, Zea Mays
cagctttgtgctgatgggggttaccagctgagaattaggagccttgagggtacccctaattatggtccccgacaaactgatatcatcatcttggcagttttctttagtgttttcttggatattttggacttggcaaaatatgcatatgtacctgtcataaatggtctcactgactataaccatccatgccagataatggctgatgcacttactatgcttgagcagattggtcgtattgaaaacactaaggttgtctatgttggagatgggaacaacattgtgcactcatggctgttattggctgatgtgcttccttttcactttgtatgtgcttgtcccaagggatttgagcctgatgcacacatagtggagatggccaggggtgctggaatcagtaagattgaaataacaaacagtcccagggaagcagttaagggagcagacgttgtgtacacagatgtttgggccagtatgggacaaaaggaagaagttgattatagaaaacagaagttccagggattcacgttcaactcaacacctggttggagacatagtattttagtctctagagataaaaaaagatgctactgtaggcgtacacaatcttttggtgcacggttctgtcgatacgccatcaacgtgcacgtggccgtcaaggaaggttgtcgcgccgcgaatcccccacctcctccccctctgctccccgccatcaacgtgcacgcgtcgcatcgagccgcagatcccccaccctcctccccctctgcacgccgcccgtggttggaccacttcagctttccaggggtcgaggacgaggatgaggcggtagtgttcttccagcagcggtacctggtaggccgcgacagtggatgggctggacccggtggccccatcttcttctactgcggcaacgagggcgacatcgcctgtgctagctgcttggatgagactcaaatatccccatattgctattggggtcttgcatcatcagctccgatcctgcagtttgaggacattgttccttctactatattctatgatctcgtatctgatgattttagggaccctgaaaacaagtggagacctttcagattggttgagctcagcgtacagttatctggccatggtggattacccacttccatcagaatttctcaggcctttgccagccaatcctattaaagaagtatgcggaaatatcgacagtcaacctaagggcattggtactctggaacgtatatatgcaggagtaaatgtatattacaattatactgacattgttgactgctttgatctaaatgatgatccccatggaatgggtggatgggactga

SEQ ID NO: 52608 - DNA, 2335 bp, Zea Mays
atggcatctcgggcgcgcctgccgggctcgccggcctcgatcgccgtcctcatcctctccttcttccaagggtcggtatgcggcatcacgttcacctttcaccaaccgctgcggcgacacggtgtggtcgggcctgctgtccggctcggggacgccgccgctggagaccacgggcttcgcgctcgcgctggggcagtcgcgctctctgtacgcgccgcaggggtggtcgggccgcttctgggccgctccggctgcaccttcgacgcctccggcaaggggtcctgcgccacgggcgactgcggctccggcaagatggtggatgttatgcttctcaatgcacagagatattgcggtggacggagtgatgctgcccactccacaggaacactactgatacgagaacttaaaacaaatggtggacaacatgatgcggtccagtgcatatcaagtctacatgtgcaaaagcttagagaaaatcaaatcaagctttatgggtcctcgtccttcctagaatctattgtagatgacacaagaggtgattttactcactacacaatagactgcaatggcataaagctcagtgcacaacaacattgctaagacaggagtttcaagctgcacgtgatagcatgcaagaggttatggtgagaaattcagttgaagctaccacatccttgacaagtacaaaacaagggagacacatgagaactggattattcaatgtgtcaactgtgacaccatttccccggcaattttgatcttgccacgtcaaggtcttctccgagtgagtgaattcacattgatagagattgggcatttcgtggacctagaggacaaatcacatccaaaatttgttgatgtggctcctatcaagtgcactgtgttcccctcgtcaagaatcaagagtttgatgctgccgccaaagagatcaccaaggcattaacaactgttggtatctctcatattattgacactactgcaatttctattgggaggagatatgggaggaccgatgagattggtgttccatttgttgtggcaatggattcaacaaacgtgacgatccgagagagggatgacaaggagcagatccgtgtggacatcaacgaggtggcgtccgtggatattttggacttggcaaaatatgcatatgtacctgtcataaatggtctcactgactataaccatccatgccagataatggctgatgcacttactatgcttgagcagattggtcgtattgaaaacactaaggttgtctatgttggagatgggaacaacattgtgcactcatggctgttattggctgatgtgcttccttttcactttgtatgtgcttgtcccaagggatttgagcctgatgcacacatagtggagatggccaggggtgctggaatcagtaagattgaaataacaaacagtcccagggaagcagttaagggagcagacgttgtgtacacagatgtttgggccagtatgggacaaaaggaagaagttgattatagaaaacagaagttccagggattcacgttcaactcaacacctggttggagacatagtattttagtctctagagataaaaaaagatgctactgtaggcgtacacaatcttttggtgcacggttctgtcgatacgccatcaacgtgcacgtggccgtcaaggaaggttgtcgcgccgcgaatcccccacctcctccccctctgctccccgccatcaacgtgcacgcgtcgcatcgagccgcagatcccccaccctcctccccctctgcacgccgcccgtggttggaccacttcagctttccaggggtcgaggacgaggatgaggcggtagtgttcttccagcagcggtacctggtaggccgcgacagtggatgggctggacccggtggccccatcttcttctactgcggcaacgagggcgacatcgcctgtgctagctgcttggatgagactcaaatatccccatattgctattggggtcttgcatcatcagctccgatcctgcagtttgaggacattgttccttctactatattctatgatctcgtatctgatgattttagggaccctgaaaacaagtggagacctttcagattggttgagctcagcgtacagttatctggccatggtggattacccacttccatcagaatttctcaggcctttgccagccaatcctattaaagaagtatgcggaaatatcgacagtcaacctaagggcattggtactctggaacgtatatatgcaggagtaaatgtatattacaattatactgacattgttgactgctttgatctaaatgatgatccccatggaatgggtggatgggactga

SEQ ID NO: 52609 - DNA, 478 bp, Zea Mays
ctcaaagcaggttgggtacactccagattatctcttcctcctccagaccatcttgcgtacagatccacaaggagctgtgaactttgctcttatgatgtcacaaatggagggaggctgcccagtagattataatacaataactgatcttttccttcagttatgcttatattcataatcataggtaactgtcttgttgtctatttacattccttggttttatgagtccttatggatttttgctttatgcatctgttaacagagaaatatgatacgggaggcaacaacttttctgttggatgttctgaaaccaaacttgccagagcatgcttttcttcaaaccaaggttttggagataaacttagtgacttacccaaatgttgttgatgccattcttgctaatggtatgttcagtcattatgatcgccctcgtattgcttacctgtgtgaaaaggctgggttgtacttgcgagccctccag

SEQ ID NO: 52610 - DNA, 1789 bp, Zea Mays
attccaattagggataatatttttacaaagcccgttgttcgggtactgccgatccaataaaactcctgccattgtcctatctctttctcctccattccccactgcatgcgcgctaccttggcgacgactggttgaccgccgctgccgctctagagcaggtgcccactgcccagggtgattcaagtactctgctttcaccaatatgtctgacggtcaggaaactgacaaaaacattgagatttggaagatcaagaagttgatcaaggcattggaatctgctagaggcaatggcaccagcatgatctctctgattatgccaccacgtgaccaaatttcccgtgtgaccaagatgttgggtgatgaatatggtactgcttcaaatattaagagtagagtcaaccggcaatctgttttagcagccatcacctcagctcagcagaggctgaagctgtataacaaggttcccccaaatggacttgttctctacactggaacaattgttactgaagatggcaaggaaaagaaagtcactattgattttgagcccttcaagcctatcaatgcatccctgtacctttgtgacaataagttccacactgaagctttgaatgaactcttggaatctgatgacaagtttggtttcattgttatggatggtaatggaactctttttggtacactgagtggcaatactcgtgaagtgcttcacaaattcactgttgatctcccaaagaagcatggaagaggaggtcaatctgcccttcgctttgctcggcttcgaatggaaaaacgtcataattatgtccgaaagacagctgagcttgctacacaattttttatcaatccagctaccagtcagcctaatgttgctggacttatattggctggttctgctgattttaagacagaactgagccaatctgacatgtttgatcagcgtctccaggccaaaatacttaatgttgttgatgtttcatatggtggggagaacggttttaaccaagctattgagttgtcagctgaaattctagcaaatgtgaagttcatacaagagaaaaagctgattggaaagtattttgaagaaattagtcaagatacgggtaagtatgtgtttggtgttgatgacacactgaaagcccttgaaatgggcgctgtggaaacactgatagtgtgggaaaaccttgatgtcaacagatatgtgcttaagaatactgcaactggagaaactgttatcaaacatctgaataaagagcaagaagctgaccagagtcatttccgtgatccatctaccaatgctgagctggaggttcaggagaaaacttcgctcttggaatggtttgccaatgagtacaaaaagtttgggtgcacacttgagtttgttaccaacaaatctcaagaaggatctcagttttgcagaggatttggtggcattggtggcatgttgcgctatcaactggacatccgttctttcgacgagctttctgatgacgaaggtgtctatgaagattctgattaagcaaacgtcattcatatggctgtgctggaccctggattgatgcaattgctcgtgttgttcttctatttttttgcttgattagtcggtttttgaggagatcgccacttgagacacttgctttgtttcctatgccgcagcatacaattgcaatgtcaagcacatcattacaatctggttgatacctcatgtactgttgttatgttgacatcggctctgtccaatatttatcaagatttggtgtagcgaatcatctacatgtttccacaaagttag

SEQ ID NO: 52611 - DNA, 504 bp, Zea Mays
tggacaaggacccacatgcaggaggcgtgtagatggcagaaccagagcggggcagaacacatccttggcagaacatgtcagaggcagactactattgcttacttaataagtagtagagatacaacagcaaacaaactgaggtacgcgcgctgagacttcctcaggaacgcggcatcattgtcatatataggaattttgcagaaacggttctcttctgaaaccagaaaaaaaaatctcctgccttcaaaacttcgctaaagctgatctagaagactagagagcacacaaacacagcatcgccggctctagcctgtgcctgtacctcagttgtggtgtgtccctgcagcaagcagctccagctctgcagcggtctacgtcagctgaagaccctccaaggccctgccgccgcgccggcgctcccacaggctcggcgcgttgccgtcggtcacgggccgtctcaccaccggcaacggcggatcaaacacgtccaccgacacggccgcc

SEQ ID NO: 52612 - DNA, 1652 bp, Zea Mays
ggtacagttggtcatacagtccaccgctgcaggaatattttactgtaaatggcgatgcatccggtttgcggtccgcgagtgcagataggccaaagctccaaagcgaagcagtgtcactgaagcggaaaacgcgtcgccttcaggggtcagctgagagagtgttgatctcacctttgctggtggtctggtcggcggcgatggagcctctggaggtggccataacgatcatattcgacgcgctgctgctggtgttcatggtgaagctcttcttcgccatgttccagatgaagctcgtcgtcatcctcttctacctcgtcatcctcctcttcgccatggccttctccggccgggcgcccagcagcttctagctcgtagcagctggcagagaactttcttctcccccctccccccccccccctcttccgtttcttctcctttggggcttgttcggttctaccccaatccatatggattgagggggattgaaggggttttaatccctagcaagtcaaaatctctctcaatccatatcaatcccctccaatccatatggattgaaaataaccgaacaagcccttggagggtagatcggaggagtcgtgcagcagtagcactacgtcctgtgaaaagagtatcatctcggtttttgttttgttgttgttgaagagtatttttttttctctagaaaaaaaaggtgcgcatgatccgaggcgcaaattgcgtaagcgtgaagagagatcgtacgctcaaaacacgtgaactagtcaatcttgagcttcgatctccagcctttcatacttctatttccatgtaatttcgtgacgtcccttgcttttttgttacacgggtctagttgttcggactactgtagctacaattcactctagataaaaagtagtagaagttgatacgaattaaagtcaaacgaactgcatggtgatttcgtggatcacacagtagtggtgcatattaaaggagatgaagacatttgttttcttggaaaaaaattggttcttgtttggggttagttgtaaaatagtgtctgttgttttttgactggtataaaaggggttccaacttttcctagaaccctagctcttgccttgtggcctccatgatcaaagaaggtcccgaaagtgtgtctttatcgactgcacgctcactgatttgtgcaatacaaaggagggaaaaaaagaaaagaaaaggagcgtggactgtggtactggtggtgggtatcagtctatcatcaattgctcttttctcgtccgcatcgtatgttgaggttgccttttctcattattctatatatacacaattgttgtgttgtgctttgtatattcaccgtacattctcgtcgtgacgatgatagcaaacgctgatgcaaaattggcgccacactcacgctgaagcgaagcagggtcgtcctaacccataccatacgtacaggggatgcccgtttactagttgcagcttaaaatgtccaaaaagatatagatagacaagaaatcagtgtgctaataatatttaaggcccaaaatgtgtataagaaaaaaaaataaaataataataaaataaatatatgaagaaaataaaatagcaaattcagtgatctaaaattatacttgagtgttgaaaattaaggactggacgag

SEQ ID NO: 52613 - DNA, 4112 bp, Zea Mays
tctgcgacgcgttggcccatccctgctccccgccatggtctctcgcccaccgaggtatgttcgaggagcaaataagatgaggagccagttttcttcttccgttcttctctcgcattagccaaggaaggcaccgtagaaagatccccaaagctttccagaaatccgctttcacgatcagtagggctcgcagtttttttttctttcctacagcgcatttctcggtcttcacctcgctcctgttgtagagttctcgtggcaggggaattccaagcggaaaaggggggaattctggaataaaaggtggctcggtcttaactgttgaggtttcagttgggaggaactacgaagacacctcatcactagttcatgtgctgtggatgatcatcttctctgaggagtggcaatcgactaattggatcgtaaagagagtcaagatggcctgagtttggtttactgttcgctattaagcttagtggtctggtgtcttccatactttcgctgattaacattatttctgcaccatgaatagtgtgcatagtatagaatctctggctgctggggatgctcaacataaacttttccaaacccttggaccaacgctcttgatttcgatggcatatattgaccttggaaagtggttggtagcagtggatgctggatctcggttcggctatgatcttgtgctactggtgctgttcttcaatttctcagccattttattccaatatctgtcaacgtgtatcggcatggtcactgggaagaatcttgcagaggtacgatttactgtgatctttcttgttcttgccgttgcagagataattcgtggaactcttgccagtcaatacaaccactgtgcagagatctcactaattttagttgacatagtagtgcttagcataaccttgaaaatgttgcgtttcttatgcaattcataacaatgatttggcatctcatctatggtctatggacctggcacttatctttgagtagacaagggcaggcttggattctcaagttctgaatgtttgtctcagaatctaaaaagaagcgtatccctttctgagtgaaatataatgtaacttagttactctgtgcctgtatttacttcttactgttaagattatttctgggttgctggtgaggactttaaaatatacagtattttctcacaataacctcggtttcatggatataatgacagtacagataataggaaactaaggtatcatttgtctcttatctttcaacaagcaaacatgcatgtgtattgcattatccgttccaatacatcttggaatcagactctatacttcgttggacatgccctattttaactcagttactcacatgttgtgagttcgggtcaaggacgagacagtaaactaatttggattcttattctaattcatcacaacagtaaaccaattaggattcgtatctctaattcattacgtactgctactctcagtaaaaccggttaggaattatgcttggggagtggagggacagacggaccggggcatgaatgaaaattacttcttttagtattagatgcaaataagaaacaaggagaactgccaacaataaactttatagcttggagtttaagttctatcaatttagtgttcttttcattctaaagccttttaaactgtttcctgtgtagtcttttggagatatcaaccttattctgtacttctacatgactgatagatctgctgcctggaatacagtaaggtgatatgtgttgttcttggtctccaggcatggctatccttattgacctctgaattgacaatgattgcaggcatggcagtggggttcaaccttgtgtttgaacatgacaatcttatcacagccatatgttttgcaagtgttgttgttaatctactaccatacacactctcccgactggataaggtggctgggatatgtaatgcctgtatagctggatttacacttctttgttttgtgcttggtttattaatcagtcacccacataccccagtcaatatgaatgcgatgtttcccaagttgagtggtgaaagcgcttattcactgatggcacttcttggcgcaaatataatagtacacaacttttatacgcattcggcatttgttcaggtccagagaagatcatctcatacccttggttccctgtttcatgaccaccttttctctatattatttatatttactgggatttaccttgtgaattatattctcctgagttcagccgcagatgaatccagtgagacagtggtcatgaactttcaagatgctacagagctaatgcaccagatattcacaaatcctgcaggaccaattgtgctattagtgatccttctcttttcaagccatatcatctcattgacatgcattgttagtggtgaagtaatttcagagaacttctttggtgttaaactgccgctttcggcacatcatctgctacctaagggtctggccatggttcttaatatctattttgcgaaggttgctggtcctgaagggatatatcagttacttattatgtgcccagttatccaggctatgcttcttccttcatcgattatacccattttacgtgtttcctcgtcaagattattgatgggaagatacaggatagctttatgtattgaaatctttgccttcctcgcattccttcttgtggtgttcacaaatataattttcacagcagaaattatgtttggtactagcacttggacaaacaacctgaaaggagatactggaagccctgctatacttccatattctgttgtagtcctaatttcatgtgcatcgattggatttacactgttacttgctgttactccactaaaatcagcaagtaatgaagctcagactcatttatcgtccatgcactcacaaagaggagctttaggcactactcagagagaagcaacatctctgaaaaaatttgagcatgaagaagttcagagctgttctgttggagctgttcttatgggttcatcggaaggtcataagaagtcagtccatctgcggagaactttatctggataattgtgcagatgaagaaattaaggggtcctctgttgatgctgttccaagggattcattggagggtcttcagaagtcaacttttgagattaagtatgattcggacgcctctgatggtggcgccgagcaatttgtggatagattgaagctgaaccatcaccatctataaccaatgaggagccaaaatcagttgtgtagtggatgcaaccagttccagaggtttgtgctatcatcgtaccagtaccataccatagtgtttcagaaaatttcgagatgaagccctcaaatgaaaaaggtggttaaacaagaaggtgaaggtaactcagatgaaggggaaatagatgagctcttaactagacattcaacctgttgatgcccttcctgttatagtgtgttcctatattatccatgtatgtggttgccgctccattaggattagggtttccataggtgtatatatgtaaccattctctattggattagggtttccataggtgtatatatgtaaccattctctatgcaatggaagtgtaatctcaatctgttacatggtataagagctaggtcttctctggcgcccccgcctccctgccccagatctggcgccctcgcctccttgcctctgttgtggtgcctcatgcacacacgtttgcctagccgcggcagagagcacgggcgccgtgcaagcgccgtcgctgttgcgggctagccatgcgagcgtgcgagtgtcgctgtgggccagccacacgtacaggcacgaccatcaccccttgcctggccccttcaagcttcacctgtcgtcgacgtcgctccttcgcctggctagatccggcgtagccccctgcttggatgaaccgcccagccgccctcccattctcttcatcgccgtcacaaccggattcaacgctatcgcgaccttcacggtcgggttcaccgtcttcctggttggatctggcgcggccttctcgtgtggatccatcgtcgcctcctctgttccacgtcgtcggctcccctggccagaatccgacatggcccctccagcgggagcggccaccctgatcgacgcaaacgtg

SEQ ID NO: 52614 - DNA, 3262 bp, Zea Mays
tctgcgacgcgttggcccatccctgctccccgccatggtctctcgcccaccgaggtatgttcgaggagcaaataagatgaggagccagttttcttcttccgttcttctctcgcattagccaaggaaggcaccgtagaaagatccccaaagctttccagaaatccgctttcacgatcaagttctcgtggcaggggaattccaagcggaaaaggggggaattctggaataaaaggtggctcggtcttaactgttgaggtttcagttgggaggaactacgaagacacctcatcactagttcatggttgcttatacagtgctcttataatttccataaggggcatacatgttatcatcttaggctcttagccatagtatgatagcagcccacatccctgtaagaattatgtggtgtaactctttgtgaagcaagttaaagtccacatcccttggtttttacagtgctgtggatgatcatcttctctgaggagtggcaatcgactaattggatcgtaaagagagtcaagatggcctgagtttggtttactgttcgctattaagcttagtggtctggtgtcttccatactttcgctgattaacattatttctgcaccatgaatagtgtgcatagtatagaatctctggctgctggggatgctcaacataaacttttccaaacccttggaccaacgctcttgatttcgatggcatatattgaccttggaaagtggttggtagcagtggatgctggatctcggttcggctatgatcttgtgctactggtgctgttcttcaatttctcagccattttattccaatatctgtcaacgtgtatcggcatggtcactgggaagaatcttgcagagatctgctgcctggaatacagtaaggtgatatgtgttgttcttggtctccaggcatggctatccttattgacctctgaattgacaatgattgcaggcatggcagtggggttcaaccttgtgtttgaacatgacaatcttatcacagccatatgttttgcaagtgttgttgttaatctactaccatacacactctcccgactggataaggtggctgggatatgtaatgcctgtatagctggatttacacttctttgttttgtgcttggtttattaatcagtcacccacataccccagtcaatatgaatgcgatgtttcccaagttgagtggtgaaagcgcttattcactgatggcacttcttggcgcaaatataatagtacacaacttttatacgcattcggcatttgttcaggtccagagaagatcatctcatacccttggttccctgtttcatgaccaccttttctctatattatttatatttactgggatttaccttgtgaattatattctcctgagttcagccgcagatgaatccagtgagacagtggtcatgaactttcaagatgctacagagctaatgcaccagatattcacaaatcctgcaggaccaattgtgctattagtgatccttctcttttcaagccatatcatctcattgacatgcattgttagtggtgaagtaatttcagagaacttctttggtgttaaactgccgctttcggcacatcatctgctacctaagggtctggccatggttcttaatatctattttgcgaaggttgctggtcctgaagggatatatcagttacttattatgtgcccagttatccaggctatgcttcttccttcatcgattatacccattttacgtgtttcctcgtcaagattattgatgggaagatacaggatagctttatgtattgaaatctttgccttcctcgcattccttcttgtggtgttcacaaatataattttcacagcagaaattatgtttggtactagcacttggacaaacaacctgaaaggagatactggaagccctgctatacttccatattctgttgtagtcctaatttcatgtgcatcgattggatttacactgttacttgctgttactccactaaaatcagcaagtaatgaagctcagactcatttatcgtccatgcactcacaaagaggagctttaggcactactcagagagaagcaacatctctgaaaaaatttgagcatgaagaagttcagagctgttctgttggagctgttcttatgggttcatcggaaggtcataagaagtcagtccatctgcggagaactttatctggataattgtgcagatgaagaaattaaggggtcctctgttgatgctgttccaagggattcattggagggtcttcagaagtcaacttttgagattaagtatgattcggacgcctctgatggtggcgccgagcaatttgtggatagattgaagctgaaccatcaccatctataaccaatgaggagccaaaatcagttgtgtagtggatgcaaccagttccagaggtttgtgctatcatcgtaccagtaccataccatagtgtttcagaaaatttcgagatgaagccctcaaatgaaaaaggtggttaaacaagaaggtgaaggtaactcagatgaaggggaaatagatgagctcttaactagacattcaacctgttgatgcccttcctgttatagtgtgttcctatattatccatgtatgtggttgccgctccattaggattagggtttccataggtgtatatatgtaaccattctctattggattagggtttccataggtgtatatatgtaaccattctctatgcaatggaagtgtaatctcaatctgttacatggtataagagctaggtcttctctggcgcccccgcctccctgccccagatctggcgccctcgcctccttgcctctgttgtggtgcctcatgcacacacgtttgcctagccgcggcagagagcacgggcgccgtgcaagcgccgtcgctgttgcgggctagccatgcgagcgtgcgagtgtcgctgtgggccagccacacgtacaggcacgaccatcaccccttgcctggccccttcaagcttcacctgtcgtcgacgtcgctccttcgcctggctagatccggcgtagccccctgcttggatgaaccgcccagccgccctcccattctcttcatcgccgtcacaaccggattcaacgctatcgcgaccttcacggtcgggttcaccgtcttcctggttggatctggcgcggccttctcgtgtggatccatcgtcgcctcctctgttccacgtcgtcggctcccctggccagaatccgacatggcccctccagcgggagcggccaccctgatcgacgcaaacgtg

SEQ ID NO: 52615 - DNA, 2930 bp, Zea Mays
tctgcgacgcgttggcccatccctgctccccgccatggtctctcgcccaccgagagttctcgtggcaggggaattccaagcggaaaaggggggaattctggaataaaaggtggctcggtcttaactgttgaggtttcagttgggaggaactacgaagacacctcatcactagttcatgtgctgtggatgatcatcttctctgaggagtggcaatcgactaattggatcgtaaagagagtcaagatggcctgagtttggtttactgttcgctattaagcttagtggtctggtgtcttccatactttcgctgattaacattatttctgcaccatgaatagtgtgcatagtatagaatctctggctgctggggatgctcaacataaacttttccaaacccttggaccaacgctcttgatttcgatggcatatattgaccttggaaagtggttggtagcagtggatgctggatctcggttcggctatgatcttgtgctactggtgctgttcttcaatttctcagccattttattccaatatctgtcaacgtgtatcggcatggtcactgggaagaatcttgcagaggcatggctatccttattgacctctgaattgacaatgattgcaggcatggcagtggggttcaaccttgtgtttgaacatgacaatcttatcacagccatatgttttgcaagtgttgttgttaatctactaccatacacactctcccgactggataaggtggctgggatatgtaatgcctgtatagctggatttacacttctttgttttgtgcttggtttattaatcagtcacccacataccccagtcaatatgaatgcgatgtttcccaagttgagtggtgaaagcgcttattcactgatggcacttcttggcgcaaatataatagtacacaacttttatacgcattcggcatttgttcaggtccagagaagatcatctcatacccttggttccctgtttcatgaccaccttttctctatattatttatatttactgggatttaccttgtgaattatattctcctgagttcagccgcagatgaatccagtgagacagtggtcatgaactttcaagatgctacagagctaatgcaccagatattcacaaatcctgcaggaccaattgtgctattagtgatccttctcttttcaagccatatcatctcattgacatgcattgttagtggtgaagtaatttcagagaacttctttggtgttaaactgccgctttcggcacatcatctgctacctaagggtctggccatggttcttaatatctattttgcgaaggttgctggtcctgaagggatatatcagttacttattatgtgcccagttatccaggctatgcttcttccttcatcgattatacccattttacgtgtttcctcgtcaagattattgatgggaagatacaggatagctttatgtattgaaatctttgccttcctcgcattccttcttgtggtgttcacaaatataattttcacagcagaaattatgtttggtactagcacttggacaaacaacctgaaaggagatactggaagccctgctatacttccatattctgttgtagtcctaatttcatgtgcatcgattggatttacactgttacttgctgttactccactaaaatcagcaagtaatgaagctcagactcatttatcgtccatgcactcacaaagaggagctttaggcactactcagagagaagcaacatctctgaaaaaatttgagcatgaagaagttcagagctgttctgttggagctgttcttatgggttcatcggaaggtcataagaagtcagtccatctgcggagaactttatctggataattgtgcagatgaagaaattaaggggtcctctgttgatgctgttccaagggattcattggagggtcttcagaagtcaacttttgagattaagtatgattcggacgcctctgatggtggcgccgagcaatttgtggatagattgaagctgaaccatcaccatctataaccaatgaggagccaaaatcagttgtgtagtggatgcaaccagttccagaggtttgtgctatcatcgtaccagtaccataccatagtgtttcagaaaatttcgagatgaagccctcaaatgaaaaaggtggttaaacaagaaggtgaaggtaactcagatgaaggggaaatagatgagctcttaactagacattcaacctgttgatgcccttcctgttatagtgtgttcctatattatccatgtatgtggttgccgctccattaggattagggtttccataggtgtatatatgtaaccattctctattggattagggtttccataggtgtatatatgtaaccattctctatgcaatggaagtgtaatctcaatctgttacatggtataagagctaggtcttctctggcgcccccgcctccctgccccagatctggcgccctcgcctccttgcctctgttgtggtgcctcatgcacacacgtttgcctagccgcggcagagagcacgggcgccgtgcaagcgccgtcgctgttgcgggctagccatgcgagcgtgcgagtgtcgctgtgggccagccacacgtacaggcacgaccatcaccccttgcctggccccttcaagcttcacctgtcgtcgacgtcgctccttcgcctggctagatccggcgtagccccctgcttggatgaaccgcccagccgccctcccattctcttcatcgccgtcacaaccggattcaacgctatcgcgaccttcacggtcgggttcaccgtcttcctggttggatctggcgcggccttctcgtgtggatccatcgtcgcctcctctgttccacgtcgtcggctcccctggccagaatccgacatggcccctccagcgggagcggccaccctgatcgacgcaaacgtg

SEQ ID NO: 52616 - DNA, 2986 bp, Zea Mays
ctcaccgccaccaccccgccgcctctatctcggtctgcgacgcgttggcccatccctgctccccgccatggtctctcgcccaccgagagttctcgtggcaggggaattccaagcggaaaaggggggaattctggaataaaaggtggctcggtcttaactgttgaggtttcagttgggaggaactacgaagacacctcatcactagttcatgtgctgtggatgatcatcttctctgaggagtggcaatcgactaattggatcgtaaagagagtcaagatggcctgagtttggtttactgttcgctattaagcttagtggtctggtgtcttccatactttcgctgattaacattatttctgcaccatgaatagtgtgcatagtatagaatctctggctgctggggatgctcaacataaacttttccaaacccttggaccaacgctcttgatttcgatggcatatattgaccttggaaagtggttggtagcagtggatgctggatctcggttcggctatgatcttgtgctactggtgctgttcttcaatttctcagccattttattccaatatctgtcaacgtgtatcggcatggtcactgggaagaatcttgcagagtcttttggagatatcaaccttattctgtacttctacatgactgatagatctgctgcctggaatacagcatggcagtggggttcaaccttgtgtttgaacatgacaatcttatcacagccatatgttttgcaagtgttgttgttaatctactaccatacacactctcccgactggataaggtggctgggatatgtaatgcctgtatagctggatttacacttctttgttttgtgcttggtttattaatcagtcacccacataccccagtcaatatgaatgcgatgtttcccaagttgagtggtgaaagcgcttattcactgatggcacttcttggcgcaaatataatagtacacaacttttatacgcattcggcatttgttcaggtccagagaagatcatctcatacccttggttccctgtttcatgaccaccttttctctatattatttatatttactgggatttaccttgtgaattatattctcctgagttcagccgcagatgaatccagtgagacagtggtcatgaactttcaagatgctacagagctaatgcaccagatattcacaaatcctgcaggaccaattgtgctattagtgatccttctcttttcaagccatatcatctcattgacatgcattgttagtggtgaagtaatttcagagaacttctttggtgttaaactgccgctttcggcacatcatctgctacctaagggtctggccatggttcttaatatctattttgcgaaggttgctggtcctgaagggatatatcagttacttattatgtgcccagttatccaggctatgcttcttccttcatcgattatacccattttacgtgtttcctcgtcaagattattgatgggaagatacaggatagctttatgtattgaaatctttgccttcctcgcattccttcttgtggtgttcacaaatataattttcacagcagaaattatgtttggtactagcacttggacaaacaacctgaaaggagatactggaagccctgctatacttccatattctgttgtagtcctaatttcatgtgcatcgattggatttacactgttacttgctgttactccactaaaatcagcaagtaatgaagctcagactcatttatcgtccatgcactcacaaagaggagctttaggcactactcagagagaagcaacatctctgaaaaaatttgagcatgaagaagttcagagctgttctgttggagctgttcttatgggttcatcggaaggtcataagaagtcagtccatctgcggagaactttatctggataattgtgcagatgaagaaattaaggggtcctctgttgatgctgttccaagggattcattggagggtcttcagaagtcaacttttgagattaagtatgattcggacgcctctgatggtggcgccgagcaatttgtggatagattgaagctgaaccatcaccatctataaccaatgaggagccaaaatcagttgtgtagtggatgcaaccagttccagaggtttgtgctatcatcgtaccagtaccataccatagtgtttcagaaaatttcgagatgaagccctcaaatgaaaaaggtggttaaacaagaaggtgaaggtaactcagatgaaggggaaatagatgagctcttaactagacattcaacctgttgatgcccttcctgttatagtgtgttcctatattatccatgtatgtggttgccgctccattaggattagggtttccataggtgtatatatgtaaccattctctattggattagggtttccataggtgtatatatgtaaccattctctatgcaatggaagtgtaatctcaatctgttacatggtataagagctaggtcttctctggcgcccccgcctccctgccccagatctggcgccctcgcctccttgcctctgttgtggtgcctcatgcacacacgtttgcctagccgcggcagagagcacgggcgccgtgcaagcgccgtcgctgttgcgggctagccatgcgagcgtgcgagtgtcgctgtgggccagccacacgtacaggcacgaccatcaccccttgcctggccccttcaagcttcacctgtcgtcgacgtcgctccttcgcctggctagatccggcgtagccccctgcttggatgaaccgcccagccgccctcccattctcttcatcgccgtcacaaccggattcaacgctatcgcgaccttcacggtcgggttcaccgtcttcctggttggatctggcgcggccttctcgtgtggatccatcgtcgcctcctctgttccacgtcgtcggctcccctggccagaatccgacatggcccctccagcgggagcggccaccctgatcgacgcaaacgtg

SEQ ID NO: 52617 - DNA, 3041 bp, Zea Mays
cttcctagctggggtcgtacactctccacgcctcccacgtcttactgctcaccgccaccaccccgccgcctctatctcggtctgcgacgcgttggcccatccctgctccccgccatggtctctcgcccaccgagagttctcgtggcaggggaattccaagcggaaaaggggggaattctggaataaaaggtggctcggtcttaactgttgaggtttcagttgggaggaactacgaagacacctcatcactagttcatgtgctgtggatgatcatcttctctgaggagtggcaatcgactaattggatcgtaaagagagtcaagatggcctgagtttggtttactgttcgctattaagcttagtggtctggtgtcttccatactttcgctgattaacattatttctgcaccatgaatagtgtgcatagtatagaatctctggctgctggggatgctcaacataaacttttccaaacccttggaccaacgctcttgatttcgatggcatatattgaccttggaaagtggttggtagcagtggatgctggatctcggttcggctatgatcttgtgctactggtgctgttcttcaatttctcagccattttattccaatatctgtcaacgtgtatcggcatggtcactgggaagaatcttgcagagtaaggtgatatgtgttgttcttggtctccaggcatggctatccttattgacctctgaattgacaatgattgcaggcatggcagtggggttcaaccttgtgtttgaacatgacaatcttatcacagccatatgttttgcaagtgttgttgttaatctactaccatacacactctcccgactggataaggtggctgggatatgtaatgcctgtatagctggatttacacttctttgttttgtgcttggtttattaatcagtcacccacataccccagtcaatatgaatgcgatgtttcccaagttgagtggtgaaagcgcttattcactgatggcacttcttggcgcaaatataatagtacacaacttttatacgcattcggcatttgttcaggtccagagaagatcatctcatacccttggttccctgtttcatgaccaccttttctctatattatttatatttactgggatttaccttgtgaattatattctcctgagttcagccgcagatgaatccagtgagacagtggtcatgaactttcaagatgctacagagctaatgcaccagatattcacaaatcctgcaggaccaattgtgctattagtgatccttctcttttcaagccatatcatctcattgacatgcattgttagtggtgaagtaatttcagagaacttctttggtgttaaactgccgctttcggcacatcatctgctacctaagggtctggccatggttcttaatatctattttgcgaaggttgctggtcctgaagggatatatcagttacttattatgtgcccagttatccaggctatgcttcttccttcatcgattatacccattttacgtgtttcctcgtcaagattattgatgggaagatacaggatagctttatgtattgaaatctttgccttcctcgcattccttcttgtggtgttcacaaatataattttcacagcagaaattatgtttggtactagcacttggacaaacaacctgaaaggagatactggaagccctgctatacttccatattctgttgtagtcctaatttcatgtgcatcgattggatttacactgttacttgctgttactccactaaaatcagcaagtaatgaagctcagactcatttatcgtccatgcactcacaaagaggagctttaggcactactcagagagaagcaacatctctgaaaaaatttgagcatgaagaagttcagagctgttctgttggagctgttcttatgggttcatcggaaggtcataagaagtcagtccatctgcggagaactttatctggataattgtgcagatgaagaaattaaggggtcctctgttgatgctgttccaagggattcattggagggtcttcagaagtcaacttttgagattaagtatgattcggacgcctctgatggtggcgccgagcaatttgtggatagattgaagctgaaccatcaccatctataaccaatgaggagccaaaatcagttgtgtagtggatgcaaccagttccagaggtttgtgctatcatcgtaccagtaccataccatagtgtttcagaaaatttcgagatgaagccctcaaatgaaaaaggtggttaaacaagaaggtgaaggtaactcagatgaaggggaaatagatgagctcttaactagacattcaacctgttgatgcccttcctgttatagtgtgttcctatattatccatgtatgtggttgccgctccattaggattagggtttccataggtgtatatatgtaaccattctctattggattagggtttccataggtgtatatatgtaaccattctctatgcaatggaagtgtaatctcaatctgttacatggtataagagctaggtcttctctggcgcccccgcctccctgccccagatctggcgccctcgcctccttgcctctgttgtggtgcctcatgcacacacgtttgcctagccgcggcagagagcacgggcgccgtgcaagcgccgtcgctgttgcgggctagccatgcgagcgtgcgagtgtcgctgtgggccagccacacgtacaggcacgaccatcaccccttgcctggccccttcaagcttcacctgtcgtcgacgtcgctccttcgcctggctagatccggcgtagccccctgcttggatgaaccgcccagccgccctcccattctcttcatcgccgtcacaaccggattcaacgctatcgcgaccttcacggtcgggttcaccgtcttcctggttggatctggcgcggccttctcgtgtggatccatcgtcgcctcctctgttccacgtcgtcggctcccctggccagaatccgacatggcccctccagcgggagcggccaccctgatcgacgcaaacgtg

SEQ ID NO: 52618 - DNA, 3036 bp, Zea Mays
cgccgactttggcggtttgccggccctgcgaatgccaccgctcttcctagctggggtcgtacactctccacgcctcccacgtcttactgctcaccgccaccaccccgccgcctctatctcggtctgcgacgcgttggcccatccctgctccccgccatggtctctcgcccaccgagagttctcgtggcaggggaattccaagcggaaaaggggggaattctggaataaaaggtggctcggtcttaactgttgaggtttcagttgggaggaactacgaagacacctcatcactagttcatgtgctgtggatgatcatcttctctgaggagtggcaatcgactaattggatcgtaaagagagtcaagatggcctgagtttggtttactgttcgctattaagcttagtggtctggtgtcttccatactttcgctgattaacattatttctgcaccatgaatagtgtgcatagtatagaatctctggctgctggggatgctcaacataaacttttccaaacccttggaccaacgctcttgatttcgatggcatatattgaccttggaaagtggttggtagcagtggatgctggatctcggttcggctatgatcttgtgctactggtgctgttcttcaatttctcagccattttattccaatatctgtcaacgtgtatcggcatggtcactgggaagaatcttgcagagtcttttggagatatcaaccttattctgtacttctacatgactgatagatctgctgcctggaatacagtaaggtgatatgtgttgttcttggtctccaggcatggctatccttattgacctctgaattgacaatggataaggtggctgggatatgtaatgcctgtatagctggatttacacttctttgttttgtgcttggtttattaatcagtcacccacataccccagtcaatatgaatgcgatgtttcccaagttgagtggtgaaagcgcttattcactgatggcacttcttggcgcaaatataatagtacacaacttttatacgcattcggcatttgttcaggtccagagaagatcatctcatacccttggttccctgtttcatgaccaccttttctctatattatttatatttactgggatttaccttgtgaattatattctcctgagttcagccgcagatgaatccagtgagacagtggtcatgaactttcaagatgctacagagctaatgcaccagatattcacaaatcctgcaggaccaattgtgctattagtgatccttctcttttcaagccatatcatctcattgacatgcattgttagtggtgaagtaatttcagagaacttctttggtgttaaactgccgctttcggcacatcatctgctacctaagggtctggccatggttcttaatatctattttgcgaaggttgctggtcctgaagggatatatcagttacttattatgtgcccagttatccaggctatgcttcttccttcatcgattatacccattttacgtgtttcctcgtcaagattattgatgggaagatacaggatagctttatgtattgaaatctttgccttcctcgcattccttcttgtggtgttcacaaatataattttcacagcagaaattatgtttggtactagcacttggacaaacaacctgaaaggagatactggaagccctgctatacttccatattctgttgtagtcctaatttcatgtgcatcgattggatttacactgttacttgctgttactccactaaaatcagcaagtaatgaagctcagactcatttatcgtccatgcactcacaaagaggagctttaggcactactcagagagaagcaacatctctgaaaaaatttgagcatgaagaagttcagagctgttctgttggagctgttcttatgggttcatcggaaggtcataagaagtcagtccatctgcggagaactttatctggataattgtgcagatgaagaaattaaggggtcctctgttgatgctgttccaagggattcattggagggtcttcagaagtcaacttttgagattaagtatgattcggacgcctctgatggtggcgccgagcaatttgtggatagattgaagctgaaccatcaccatctataaccaatgaggagccaaaatcagttgtgtagtggatgcaaccagttccagaggtttgtgctatcatcgtaccagtaccataccatagtgtttcagaaaatttcgagatgaagccctcaaatgaaaaaggtggttaaacaagaaggtgaaggtaactcagatgaaggggaaatagatgagctcttaactagacattcaacctgttgatgcccttcctgttatagtgtgttcctatattatccatgtatgtggttgccgctccattaggattagggtttccataggtgtatatatgtaaccattctctattggattagggtttccataggtgtatatatgtaaccattctctatgcaatggaagtgtaatctcaatctgttacatggtataagagctaggtcttctctggcgcccccgcctccctgccccagatctggcgccctcgcctccttgcctctgttgtggtgcctcatgcacacacgtttgcctagccgcggcagagagcacgggcgccgtgcaagcgccgtcgctgttgcgggctagccatgcgagcgtgcgagtgtcgctgtgggccagccacacgtacaggcacgaccatcaccccttgcctggccccttcaagcttcacctgtcgtcgacgtcgctccttcgcctggctagatccggcgtagccccctgcttggatgaaccgcccagccgccctcccattctcttcatcgccgtcacaaccggattcaacgctatcgcgaccttcacggtcgggttcaccgtcttcctggttggatctggcgcggccttctcgtgtggatccatcgtcgcctcctctgttccacgtcgtcggctcccctggccagaatccgacatggcccctccagcgggagcggccaccctgatcgacgcaaacgtg

SEQ ID NO: 52619 - DNA, 3310 bp, Zea Mays
ggagtactgtactcatgtgtactgtattcctgatgccgccgcccgccgactttggcggtttgccggccctgcgaatgccaccgctcttcctagctggggtcgtacactctccacgcctcccacgtcttactgctcaccgccaccaccccgccgcctctatctcggtctgcgacgcgttggcccatccctgctccccgccatggtctctcgcccaccgaggtatgttcgaggagcaaataagatgaggagccagttttcttcttccgttcttctctcgcattagccaaggaaggcaccgtagaaagatccccaaagctttccagaaatccgctttcacgatcagtagggctcgcagtttttttttctttcctacagcgcatttctcggtcttcacctcgctcctgttgtagagttctcgtggcaggggaattccaagcggaaaaggggggaattctggaataaaaggtggctcggtcttaactgttgaggtttcagttgggaggaactacgaagacacctcatcactagttcatgtgctgtggatgatcatcttctctgaggagtggcaatcgactaattggatcgtaaagagagtcaagatggcctgagtttggtttactgttcgctattaagcttagtggtctggtgtcttccatactttcgctgattaacattatttctgcaccatgaatagtgtgcatagtatagaatctctggctgctggggatgctcaacataaacttttccaaacccttggaccaacgctcttgatttcgatggcatatattgaccttggaaagtggttggtagcagtggatgctggatctcggttcggctatgatcttgtgctactggtgctgttcttcaatttctcagccattttattccaatatctgtcaacgtgtatcggcatggtcactgggaagaatcttgcagagtcttttggagatatcaaccttattctgtacttctacatgactgatagatctgctgcctggaatacagtaaggtgatatgtgttgttcttggtctccaggcatggctatccttattgacctctgaattgacaatgattgcaggcatggcagtggggttcaaccttgtgtttgaacatgacaatcttatcacagccatatgttttgcaagtgttgttgttaatctactaccatacacactctcccgactgcagtcacccacataccccagtcaatatgaatgcgatgtttcccaagttgagtggtgaaagcgcttattcactgatggcacttcttggcgcaaatataatagtacacaacttttatacgcattcggcatttgttcaggtccagagaagatcatctcatacccttggttccctgtttcatgaccaccttttctctatattatttatatttactgggatttaccttgtgaattatattctcctgagttcagccgcagatgaatccagtgagacagtggtcatgaactttcaagatgctacagagctaatgcaccagatattcacaaatcctgcaggaccaattgtgctattagtgatccttctcttttcaagccatatcatctcattgacatgcattgttagtggtgaagtaatttcagagaacttctttggtgttaaactgccgctttcggcacatcatctgctacctaagggtctggccatggttcttaatatctattttgcgaaggttgctggtcctgaagggatatatcagttacttattatgtgcccagttatccaggctatgcttcttccttcatcgattatacccattttacgtgtttcctcgtcaagattattgatgggaagatacaggatagctttatgtattgaaatctttgccttcctcgcattccttcttgtggtgttcacaaatataattttcacagcagaaattatgtttggtactagcacttggacaaacaacctgaaaggagatactggaagccctgctatacttccatattctgttgtagtcctaatttcatgtgcatcgattggatttacactgttacttgctgttactccactaaaatcagcaagtaatgaagctcagactcatttatcgtccatgcactcacaaagaggagctttaggcactactcagagagaagcaacatctctgaaaaaatttgagcatgaagaagttcagagctgttctgttggagctgttcttatgggttcatcggaaggtcataagaagtcagtccatctgcggagaactttatctggataattgtgcagatgaagaaattaaggggtcctctgttgatgctgttccaagggattcattggagggtcttcagaagtcaacttttgagattaagtatgattcggacgcctctgatggtggcgccgagcaatttgtggatagattgaagctgaaccatcaccatctataaccaatgaggagccaaaatcagttgtgtagtggatgcaaccagttccagaggtttgtgctatcatcgtaccagtaccataccatagtgtttcagaaaatttcgagatgaagccctcaaatgaaaaaggtggttaaacaagaaggtgaaggtaactcagatgaaggggaaatagatgagctcttaactagacattcaacctgttgatgcccttcctgttatagtgtgttcctatattatccatgtatgtggttgccgctccattaggattagggtttccataggtgtatatatgtaaccattctctattggattagggtttccataggtgtatatatgtaaccattctctatgcaatggaagtgtaatctcaatctgttacatggtataagagctaggtcttctctggcgcccccgcctccctgccccagatctggcgccctcgcctccttgcctctgttgtggtgcctcatgcacacacgtttgcctagccgcggcagagagcacgggcgccgtgcaagcgccgtcgctgttgcgggctagccatgcgagcgtgcgagtgtcgctgtgggccagccacacgtacaggcacgaccatcaccccttgcctggccccttcaagcttcacctgtcgtcgacgtcgctccttcgcctggctagatccggcgtagccccctgcttggatgaaccgcccagccgccctcccattctcttcatcgccgtcacaaccggattcaacgctatcgcgaccttcacggtcgggttcaccgtcttcctggttggatctggcgcggccttctcgtgtggatccatcgtcgcctcctctgttccacgtcgtcggctcccctggccagaatccgacatggcccctccagcgggagcggccaccctgatcgacgcaaacgtg

SEQ ID NO: 52620 - DNA, 3107 bp, Zea Mays
ggagtactgtactcatgtgtactgtattcctgatgccgccgcccgccgactttggcggtttgccggccctgcgaatgccaccgctcttcctagctggggtcgtacactctccacgcctcccacgtcttactgctcaccgccaccaccccgccgcctctatctcggtctgcgacgcgttggcccatccctgctccccgccatggtctctcgcccaccgagagttctcgtggcaggggaattccaagcggaaaaggggggaattctggaataaaaggtggctcggtcttaactgttgaggtttcagttgggaggaactacgaagacacctcatcactagttcatgtgctgtggatgatcatcttctctgaggagtggcaatcgactaattggatcgtaaagagagtcaagatggcctgatgtgcatagtatagaatctctggctgctggggatgctcaacataaacttttccaaacccttggaccaacgctcttgatttcgatggcatatattgaccttggaaagtggttggtagcagtggatgctggatctcggttcggctatgatcttgtgctactggtgctgttcttcaatttctcagccattttattccaatatctgtcaacgtgtatcggcatggtcactgggaagaatcttgcagagtcttttggagatatcaaccttattctgtacttctacatgactgatagatctgctgcctggaatacagtaaggtgatatgtgttgttcttggtctccaggcatggctatccttattgacctctgaattgacaatgattgcaggcatggcagtggggttcaaccttgtgtttgaacatgacaatcttatcacagccatatgttttgcaagtgttgttgttaatctactaccatacacactctcccgactggataaggtggctgggatatgtaatgcctgtatagctggatttacacttctttgttttgtgcttggtttattaatcagtcacccacataccccagtcaatatgaatgcgatgtttcccaagttgagtggtgaaagcgcttattcactgatggcacttcttggcgcaaatataatagtacacaacttttatacgcattcggcatttgttcaggtccagagaagatcatctcatacccttggttccctgtttcatgaccaccttttctctatattatttatatttactgggatttaccttgtgaattatattctcctgagttcagccgcagatgaatccagtgagacagtggtcatgaactttcaagatgctacagagctaatgcaccagatattcacaaatcctgcaggaccaattgtgctattagtgatccttctcttttcaagccatatcatctcattgacatgcattgttagtggtgaagtaatttcagagaacttctttggtgttaaactgccgctttcggcacatcatctgctacctaagggtctggccatggttcttaatatctattttgcgaaggttgctggtcctgaagggatatatcagttacttattatgtgcccagttatccaggctatgcttcttccttcatcgattatacccattttacgtgtttcctcgtcaagattattgatgggaagatacaggatagctttatgtattgaaatctttgccttcctcgcattccttcttgtggtgttcacaaatataattttcacagcagaaattatgtttggtactagcacttggacaaacaacctgaaaggagatactggaagccctgctatacttccatattctgttgtagtcctaatttcatgtgcatcgattggatttacactgttacttgctgttactccactaaaatcagcaagtaatgaagctcagactcatttatcgtccatgcactcacaaagaggagctttaggcactactcagagagaagcaacatctctgaaaaaatttgagcatgaagaagttcagagctgttctgttggagctgttcttatgggttcatcggaaggtcataagaagtcagtccatctgcggagaactttatctggataattgtgcagatgaagaaattaaggggtcctctgttgatgctgttccaagggattcattggagggtcttcagaagtcaacttttgagattaagtatgattcggacgcctctgatggtggcgccgagcaatttgtggatagattgaagctgaaccatcaccatctataaccaatgaggagccaaaatcagttgtgtagtggatgcaaccagttccagaggtttgtgctatcatcgtaccagtaccataccatagtgtttcagaaaatttcgagatgaagccctcaaatgaaaaaggtggttaaacaagaaggtgaaggtaactcagatgaaggggaaatagatgagctcttaactagacattcaacctgttgatgcccttcctgttatagtgtgttcctatattatccatgtatgtggttgccgctccattaggattagggtttccataggtgtatatatgtaaccattctctattggattagggtttccataggtgtatatatgtaaccattctctatgcaatggaagtgtaatctcaatctgttacatggtataagagctaggtcttctctggcgcccccgcctccctgccccagatctggcgccctcgcctccttgcctctgttgtggtgcctcatgcacacacgtttgcctagccgcggcagagagcacgggcgccgtgcaagcgccgtcgctgttgcgggctagccatgcgagcgtgcgagtgtcgctgtgggccagccacacgtacaggcacgaccatcaccccttgcctggccccttcaagcttcacctgtcgtcgacgtcgctccttcgcctggctagatccggcgtagccccctgcttggatgaaccgcccagccgccctcccattctcttcatcgccgtcacaaccggattcaacgctatcgcgaccttcacggtcgggttcaccgtcttcctggttggatctggcgcggccttctcgtgtggatccatcgtcgcctcctctgttccacgtcgtcggctcccctggccagaatccgacatggcccctccagcgggagcggccaccctgatcgacgcaaacgtg

SEQ ID NO: 52621 - DNA, 3224 bp, Zea Mays
ctaatttgtataaatttttattagctcaaacgattccggacgcaatccaatacaaacgaacaagccgtcaggtgtcatggagtactgtactcatgtgtactgtattcctgatgccgccgcccgccgactttggcggtttgccggccctgcgaatgccaccgctcttcctagctggggtcgtacactctccacgcctcccacgtcttactgctcaccgccaccaccccgccgcctctatctcggtctgcgacgcgttggcccatccctgctccccgccatggtctctcgcccaccgagagttctcgtggcaggggaattccaagcggaaaaggggggaattctggaataaaaggtggctcggtcttaactgttgaggtttcagttgggaggaactacgaagacacctcatcactagttcatgtgctgtggatgatcatcttctctgaggagtggcaatcgactaattggatcgtaaagagagtcaagatggcctgagtttggtttactgttcgctattaagcttagtggtctggtgtcttccatactttcgctgattaacattatttctgcaccatgaatagtgtgcatagtatagaatctctggctgctggggatgctcaacataaacttttccaaacccttggaccaacgctcttgatttcgatggcatatattgaccttggaaagtggttggtagcagtggatgctggatctcggttcggctatgatcttgtgctactggtgctgttcttcaatttctcagccattttattccaatatctgtcaacgtgtatcggcatggtcactgggaagaatcttgcagagatctgctgcctggaatacagtaaggtgatatgtgttgttcttggtctccaggcatggctatccttattgacctctgaattgacaatgattgcaggcatggcagtggggttcaaccttgtgtttgaacatgacaatcttatcacagccatatgttttgcaagtgttgttgttaatctactaccatacacactctcccgactggataaggtggctgggatatgtaatgcctgtatagctggatttacacttctttgttttgtgcttggtttattaatcagtcacccacataccccagtcaatatgaatgcgatgtttcccaagttgagtggtgaaagcgcttattcactgatggcacttcttggcgcaaatataatagtacacaacttttatacgcattcggcatttgttcaggtccagagaagatcatctcatacccttggttccctgtttcatgaccaccttttctctatattatttatatttactgggatttaccttgtgaattatattctcctgagttcagccgcagatgaatccagtgagacagtggtcatgaactttcaagatgctacagagctaatgcaccagatattcacaaatcctgcaggaccaattgtgctattagtgatccttctcttttcaagccatatcatctcattgacatgcattgttagtggtgaagtaatttcagagaacttctttggtgttaaactgccgctttcggcacatcatctgctacctaagggtctggccatggttcttaatatctattttgcgaaggttgctggtcctgaagggatatatcagttacttattatgtgcccagttatccaggctatgcttcttccttcatcgattatacccattttacgtgtttcctcgtcaagattattgatgggaagatacaggatagctttatgtattgaaatctttgccttcctcgcattccttcttgtggtgttcacaaatataattttcacagcagaaattatgtttggtactagcacttggacaaacaacctgaaaggagatactggaagccctgctatacttccatattctgttgtagtcctaatttcatgtgcatcgattggatttacactgttacttgctgttactccactaaaatcagcaagtaatgaagctcagactcatttatcgtccatgcactcacaaagaggagctttaggcactactcagagagaagcaacatctctgaaaaaatttgagcatgaagaagttcagagctgttctgttggagctgttcttatgggttcatcggaaggtcataagaagtcagtccatctgcggagaactttatctggataattgtgcagatgaagaaattaaggggtcctctgttgatgctgttccaagggattcattggagggtcttcagaagtcaacttttgagattaagtatgattcggacgcctctgatggtggcgccgagcaatttgtggatagattgaagctgaaccatcaccatctataaccaatgaggagccaaaatcagttgtgtagtggatgcaaccagttccagaggtttgtgctatcatcgtaccagtaccataccatagtgtttcagaaaatttcgagatgaagccctcaaatgaaaaaggtggttaaacaagaaggtgaaggtaactcagatgaaggggaaatagatgagctcttaactagacattcaacctgttgatgcccttcctgttatagtgtgttcctatattatccatgtatgtggttgccgctccattaggattagggtttccataggtgtatatatgtaaccattctctattggattagggtttccataggtgtatatatgtaaccattctctatgcaatggaagtgtaatctcaatctgttacatggtataagagctaggtcttctctggcgcccccgcctccctgccccagatctggcgccctcgcctccttgcctctgttgtggtgcctcatgcacacacgtttgcctagccgcggcagagagcacgggcgccgtgcaagcgccgtcgctgttgcgggctagccatgcgagcgtgcgagtgtcgctgtgggccagccacacgtacaggcacgaccatcaccccttgcctggccccttcaagcttcacctgtcgtcgacgtcgctccttcgcctggctagatccggcgtagccccctgcttggatgaaccgcccagccgccctcccattctcttcatcgccgtcacaaccggattcaacgctatcgcgaccttcacggtcgggttcaccgtcttcctggttggatctggcgcggccttctcgtgtggatccatcgtcgcctcctctgttccacgtcgtcggctcccctggccagaatccgacatggcccctccagcgggagcggccaccctgatcgacgcaaacgtg

SEQ ID NO: 52622 - DNA, 2449 bp, Zea Mays
gctcgtttgttgacccagaaggccagaactgacctatctgccgagcaaaatgccggcggcgttggtgccttatcggcaagatgagctcaagattctccgtggcgacgataatcctggaccataccaggagcatgatcgcgtctaccgttacgactactacaatgaccttggtgatcccgacaagggcgaagagcacgctcggccgatcctcggtggcagccaagaacacccgtatccccgtcgctgcagaactggccggcacccaacaaagaaagacccaaattcggagagcaggcttttcctgctgaacctgaacatctacgtcccgcgtgacgaacgctttgggcatctcaagatgtcggacttccttgggtactcgctgaagacgatcatcgaggctgttcttccaacactggggactttcgtcgatgacacgcccaaggagttcgattcgtttgaggatatcctcgggctctacgagctgggcccagaggcacccaacaacccactgatagcagagatcaggaagaagatccccagcgagttccttcgaagcattctgccgaacggtagccatgaccacccgctaaagatgccccttccaaatgtcatcaaatcagatgtgttgaaaaaggctccggagtttaagtttggctggaggactgacgaagagttcgcgagagagacacttgcaggcgtgaacccagtaatcatcaaacgtctgacggagttccccgctaaaagcaccctggacccaaggcagtacggagaccacaccagcaagatcactgaagctcacatccggcataacatgggaggcctgtcggtgcagaacgcactgaggaacaagaggctcttcatcctagaccaccatgaccatttcatgccgtacctcgacgagatcaacgagctggaggggaacttcatctacgccagcaggaccctactgttcctgaaggacgatggcacgctgaagcccctggccatcgagctgagcctgccccaccctgacggccagcagcgcggcgcggtcagcaaggtgtacaccccggctcacaccggcgtcgagggccacgtctggcagctcgccaaggcttatgcctgcgtaaacgactctgcctggcatcagctgatcagccactggctgaacacgcacgcggtgatcgagccgttcgtaatcgcgacaaaccggcagctcagcgtggtgcatcccgtgcacaagctgctgagcccgcactaccgtgacacgctgaacatcaacgccctggcacgccagacactcatcaacgccggcggcgtcttcgagcgcaccgtgttccctgcaaagtacgcgctggggatgtcggcagacgtgtacaagagctggaatttcaacgagcaggctctcccagcagatctcgtcaagagaggtgtggctgtgccggaccagtcaagcccatatggtgtccgactgctgatcaaggactacccctatgccgttgacgggctcgtcatctggtgggcgatcgagcggtgggtcaaggagtacctggacatctactaccctaacgacggcgagctccagcgtgacgtggagctgcaggcgtggtggaaggaggtgcgtgaggaggcgcacggcgacctcaaggaccgagactggtggcccaggatggacaccgtccagcagctggctagggcgtgcacgaccatcatctgggtggcatccgcgctgcacgcggctgtcaactttgggcagtacccatacgccgggtacctcccgaaccggccgacggccagccggcgcccgatgccggagccaggcagccacgactacaagaagctgggagcggggcagaaggaggcggacatggtgttcatccgcaccatcaccagccagttccagaccatcctgggcatctcgctcatcgagatcctctccaagcactcctccgacgaggtgtacctcggccagcgtgacgagcctgatcgctggacgtcagacgccaaggcgctggatgcgttcaaaagattcgggagccggctggtgcagattgagaatcggatcaagacgatgaacgacagtccggacttgaagaaccggaaggggcctgtggaaatgccgtacatgctgctgtaccccaacacgtcggacgttaccggcgagaaggccgaggggcttactgccatgggcattcccaacagcatctccatatgagcctgggcagattgtgtctcgtagtaaattgttgtgctgcgccgtgcgatgtgtttcttcattggttttgtcagtctcagggtaggggatggagatcataccatgatctttgtagggttgagagaggagtccacgcttgaatattgttgtcatgtatgtaattcttggttaataataaagttcgtcagttcatttcttagcctatcagtctccagccaaaacttatacttcaaaaaaaagtaataggcatttgat

SEQ ID NO: 52623 - DNA, 561 bp, Zea Mays
atggcggaccgtgaccgcagcggcatctacggcggcgcccacgccacctacgggcagcagcagcagcagggaggaggcgggcgcccgatgggtgagcaggtgaagggcatgctccacgacaaggggccgacggcgtcgcaggcgctgacggtggcgacgctgttcccgctgggcgggctgctgctggtgctgtcggggctggcgctgacggcctccgtggtggggctggccgtggccacgccggtgttcctgatcttcagccccgtgctggtccccgccgcgctgctcatcgggacggccgtcatggggttcctcacgtcgggcgcgctggggctcgggggcctgtcctcgctcacgtgcctcgccaacacggcgcggcaggcgttccagcgcaccccggactacgtggaggaggcgcaccgcaggatggcggaggccgcggcgcacgcgggccacaagaccgcgcaggcaggccaggccatccagggcagggcgcaggaggccggcgccgggggaggtgcaggtgccggcgctggcggcggcggcagggcttcctcgtaa

SEQ ID NO: 52624 - DNA, 1078 bp, Zea Mays
caggaatttacttaattcagtagatgaactttcagaatattgatacacccattaagggacgaagtcgggaagaaccattagggtgtgggggcttagctatattaaattgctagcctacaacagagtgacgagactccaatggtctgggagatccttctttatatgtatgtcctttattcgccggactggcattacaggagcacaatgccaaccttccttttcctatatggtgctgcctttgctgtagttcatttctttgcccggttccaattcgtattcaagctgcattacattggcctctgcttcctctgcatcccccggatgtacaagtactacatacagaccaaagacgtggctgcgaagcggctcgcaaagctgtgggttctcacgttaacccttgggactctctgctggctagttgatcgcatcttctgcaagaagctttcgcattggtatgtcaacccgcaggggcacgcatggtggcatgtgcttatgggcctcaactcatactatgcaaacacattcctaatgttctgtcgggctcagcagcgcgggtgggaggcgcgaatcacctaccttcttggatttttgccttatgtcaaggtccagaaaccagagaagaagagggaatgatttgtctctgcttaacactgatgctactcagtccaccgccagtaagctaatgtctatcccccaccccatcccccacccaatgtgcgcagacaagttgtggcatttttgtatatgggcatccaaatgattacggactataaatgttctgatgtcacactggatttcggtaacttttgactggcacctgttttgtaccatacttaatcatcgaacggagattagttggagtggttggttggtgtcctagttttggccatctttcttttggtttctttgcaattgccttttggtggtaataggacagggttatttgtttattcgtttgtcgttgaatggagtccagttgtactagttatcatcactccgcatggggatacatccttccatatgatgaccgttaattcattgacttgtgttggtgccaatggacaactctcccgagttg

SEQ ID NO: 52625 - DNA, 1179 bp, Zea Mays
gtagaattttagttatggagttcatccattgtttcatagctttcttatataaaaaatctgttggacagtttattgctccttttattgtgtaatcttttctagtgttatatattatgattgaaaagcggaaggtatctgttataaccgggacagcagaaggggcttaggcagcgcacgacgcacggctggttccaaggctgcaggaatttacttacctacaacagagtgacgagactccaatggtctgggagatccttctttatatgtatgtcctttattcgccggactggcattacaggagcacaatgccaaccttccttttcctatatggtgctgcctttgctgtagttcatttctttgcccggttccaattcgtattcaagctgcattacattggcctctgcttcctctgcatcccccggatgtacaagtactacatacagaccaaagacgtggctgcgaagcggctcgcaaagctgtgggttctcacgttaacccttgggactctctgctggctagttgatcgcatcttctgcaagaagctttcgcattggtatgtcaacccgcaggggcacgcatggtggcatgtgcttatgggcctcaactcatactatgcaaacacattcctaatgttctgtcgggctcagcagcgcgggtgggaggcgcgaatcacctaccttcttggatttttgccttatgtcaaggtccagaaaccagagaagaagagggaatgatttgtctctgcttaacactgatgctactcagtccaccgccagtaagctaatgtctatcccccaccccatcccccacccaatgtgcgcagacaagttgtggcatttttgtatatgggcatccaaatgattacggactataaatgttctgatgtcacactggatttcggtaacttttgactggcacctgttttgtaccatacttaatcatcgaacggagattagttggagtggttggttggtgtcctagttttggccatctttcttttggtttctttgcaattgccttttggtggtaataggacagggttatttgtttattcgtttgtcgttgaatggagtccagttgtactagttatcatcactccgcatggggatacatccttccatatgatgaccgttaattcattgacttgtgttggtgccaatggacaactctcccgagttg

SEQ ID NO: 52626 - DNA, 1452 bp, Zea Mays
cttcatcttcctcgcagcgccggcgttccatcttccgctcctcccttattcgcgctcggcacgcaggcggcggcggcggcactcaggctcgggatctcagcgacggcgctcaggctcgggatctcagcgacggcgcccaggctcgggatctcagcgacggcgtcagcggcttcccttcagcctcgcgccctcgccttcgatcctccgcacaccggccggtgaccctgcgttatttctctgagggcactcatgatttagcacaagtcatactgatctctaactctggtgacataagctgttgttagggtagcaaatcaagagataaaaatggcagattcaatggtagcgagcttctgggggcctgttacatcaacaactgagttgtgcgaggagaattatgcacactcatcatatatagcagaattctacaacacaatttctaatgtcccatgtgttcttttggcgcttattggattagtgaatgctttccgccaaggttttgagaagcgattcagtgtcctgcacatatccaatatgatacttgctattgggagtatgatttttcatgccaccttgcaacttgtcctacaacagagtgacgagactccaatggtctgggagatccttctttatatgtatgtcctttattcgccggactggcattacaggagcacaatgccaaccttccttttcctatatggtgctgcctttgctgtagttcatttctttgcccggttccaattcgtattcaagctgcattacattggcctctgcttcctctgcatcccccggatgtacaagtactacatacagaccaaagacgtggctgcgaagcggctcgcaaagctgtgggttctcacgttaacccttgggactctctgctggctagttgatcgcatcttctgcaagaagctttcgcattgcgcgggtgggaggcgcgaatcacctaccttcttggatttttgccttatgtcaaggtccagaaaccagagaagaagagggaatgatttgtctctgcttaacactgatgctactcagtccaccgccagtaagctaatgtctatcccccaccccatcccccacccaatgtgcgcagacaagttgtggcatttttgtatatgggcatccaaatgattacggactataaatgttctgatgtcacactggatttcggtaacttttgactggcacctgttttgtaccatacttaatcatcgaacggagattagttggagtggttggttggtgtcctagttttggccatctttcttttggtttctttgcaattgccttttggtggtaataggacagggttatttgtttattcgtttgtcgttgaatggagtccagttgtactagttatcatcactccgcatggggatacatccttccatatgatgaccgttaattcattgacttgtgttggtgccaatggacaactctcccgagttg

SEQ ID NO: 52627 - DNA, 1616 bp, Zea Mays
attcgttccacgagacccacacgtttctttaccctagttttttttttcactgagcgaaggcacacagccgcagccccatcttcatcttcctcgcagcgccggcgttccatcttccgctcctcccttattcgcgctcggcacgcaggcggcggcggcggcactcaggctcgggatctcagcgacggcgctcaggctcgggatctcagcgacggcgcccaggctcgggatctcagcgacggcgtcagcggcttcccttcagcctcgcgccctcgccttcgatcctccgcacaccggccggttatttctctgagggcactcatgatttagcacaagtcatactgatctctaactctggtgacataagctgttgttagggtagcaaatcaagagataaaaatggcagattcaatggtagcgagcttctgggggcctgttacatcaacaactgagttgtgcgaggagaattatgcacactcatcatatatagcagaattctacaacacaatttctaatgtcccatgtgttcttttggcgcttattggattagtgaatgctttccgccaaggttttgagaagcgattcagtgtcctgcacatatccaatatgatacttgctattgggagtatgatttttcatgccaccttgcaacttcctacaacagagtgacgagactccaatggtctgggagatccttctttatatgtatgtcctttattcgccggactggcattacaggagcacaatgccaaccttccttttcctatatggtgctgcctttgctgtagttcatttctttgcccggttccaattcgtattcaagctgcattacattggcctctgcttcctctgcatcccccggatgtacaagtactacatacagaccaaagacgtggctgcgaagcggctcgcaaagctgtgggttctcacgttaacccttgggactctctgctggctagttgatcgcatcttctgcaagaagctttcgcattggtatgtcaacccgcaggggcacgcatggtggcatgtgcttatgggcctcaactcatactatgcaaacacattcctaatgttctgtcgggctcagcagcgcgggtgggaggcgcgaatcacctaccttcttggatttttgccttatgtcaaggtccagaaaccagagaagaagagggaatgatttgtctctgcttaacactgatgctactcagtccaccgccagtaagctaatgtctatcccccaccccatcccccacccaatgtgcgcagacaagttgtggcatttttgtatatgggcatccaaatgattacggactataaatgttctgatgtcacactggatttcggtaacttttgactggcacctgttttgtaccatacttaatcatcgaacggagattagttggagtggttggttggtgtcctagttttggccatctttcttttggtttctttgcaattgccttttggtggtaataggacagggttatttgtttattcgtttgtcgttgaatggagtccagttgtactagttatcatcactccgcatggggatacatccttccatatgatgaccgttaattcattgacttgtgttggtgccaatggacaactctcccgagttg

SEQ ID NO: 52628 - DNA, 1547 bp, Zea Mays
gattttaaatgacatttcaattcctagaaggattttcccactcgtgtatactttcatgccattgtttggcaaccaaagggctaaaccaccctcctgaggcaaaatacttcaaaaaaacagaaaaaaatcaaagaaaaataagaaatatttagaaaatttagaaacacaatgaaacataactaaagatccaaaaaaaatgcacgacatgatcatctaatagccaacaaagtttaattgaataacatctaatatatccaacaaagttaattcatccatcatcaaatcacataagctcatcttcattcacatgtacaaatatatggagtacaaagagtctctttgttaggaactttggcactagaatgaattatgagtttaactcctttttcacaaccttcatgtggactgtcattgcatttttcttctccatgtcaacttcatgtgttgcttccacctagcactcttcaagtaacaccaatcgacacacgatttaatttacatggttacccaaaaaactactagcacttgcaataaacccagatatagaagaaaaaatattattttgcacaaaggaatgcataggtgttagtaaaaacaatgttagtagtataggtgttattaaaacaatgttatagcatagctattagtaaaacaagtgatgcttagttggctgttatttcaccatgtttctaagtggtttagttggttggttggttggttgtacaactgatgctttcttgtacttatatcagcaacatatctagaacaattgccactagtatcataccaggttacaaccagagtctcagttgctgctgccacaacaaatatgtctaatgtgttgttttaagtgatgggatgttgtacatcaaaaagggtagctggtcttgtaacaatctaaaatcttagtcattcttgttgattttttatgttcaatttagtaatggcaatgtgatggccccctttccaccaaacagaaaacggaaacatttcacaagtccgattgtgatgacattagaacacagcaaggcttaaaaaattgtattaaaatgtagtgtatatattcagtgaactatatttgaagtgtagcacatatattcaatgaattgatatttcagtgcatatattcagtgacctgatatatttcaagtgtagtgcatatattcagtgaactggtatatatgtgtaaaatcattattaccaaattgatatgttggaaatattagcaaaaaattgatgtactcttgagaaaatcctccatggaaaaaaacaagcaggtggctaaaatttgtaggtcctatatgaataggataggaggaaaattaatacgtcaaaaagacaaagtgtgcgcttacttagactctctccagcaacgaactgtaaaacaacctgtactctaaatttagaggatattgtgctcctttatccacccaacaaggaaccctaaaagacactctaaaatttagagtctctgcttcagccgctatatgtagagaaacactgttcgtcctctatcccgcaatcaaagcgctacaacctgacacttg

SEQ ID NO: 52629 - DNA, 1656 bp, Zea Mays
cattttttcttattattatatttgttccccctaaattgcataaaaattcaagattggaatgatgatactattgtaaagaatattgattagcacaaaacttagttttaacaggggacaatcatagccattaatagacaacagttatgacatgtgagaacaaaaggttaactcattttgtaacaaacaaaaagaaaacaaaatccattactcaatcacaaagaacttatatttccaggcaagactaggaaggtaccttaggggcactttctcgaacttcatcaactaaccacctgcatggaagcagtaacttggcaataatgtaaaatgaacgcgtgaatgccgtgaaaactaaacaagtagcattgcaatcaaggattcacagtcacaatgacataacattatgttacgagtcatgcatgtgaatcaggcaatgcaacaaaaagctaggcccaactattacaacattgggggaaattggatccttaccatcaaaagaacacatttttagatatataccatcaaaagaatcggttttagatatttaccatcaaaaggtaacaacgttacagctatttatgattttctctgtttccagcaatctggctgctggtttcagattttttttggccgctccactttttaccatgtcccgatttttcccgtgcacaaaaacaaaggaacaaatctccctaacaccgactgcaggggggtgttagcgtaactatgtatttctctcctataatgggccttggcctacatactcagttatattaatatattcctaacccgcattagagttagggtttcattctcctaacacttttgatggtaagaaccaacttttgctacaaatagatatcaagattaatgtaagatcacgaaatataactgactaccttaagaatcagatgaatatgtgtatttattaggaactacataaatagtaaaacatatcatcatccaatctggaatatttactctaatttaaaaattacataacaccctttatgaagaacaacaaacatgtcctcaattgtgtgatgactggaaaacctgggagcttggagacaaaatttcaatttcaatttgataattaaagttgtaaatctacgaaaattcaggaaatttgccaccttgtttgaagttttgactaacaatgaagacaatcctctagggtgtgctttatcttttttttctcggacgcgcaggagagctgcgcatcattatattaagagaggaaaaaggtccaaagaggaccaaagtacaatgaccagtgggcaagcataaaactagaccaaattgaaaaacagcctagaccctactaatagcagcaactaggccaagacttggtagctgtttagcaccagccatatcccagcaactcagctcatctaaaaacaaacttttaacagagctcaaaggaagggtttactccatcaaaaatagccttgtttcgaagaagccataagcaccacgcccccaaaattatgaggctattgaagccttttcttttggtcttgtgcacctttttatgcacctttcgccaccactcagcaaaagatatccttatctcaatggcaaaaggatatcatgccaaaactgcctggcaaaactgcaagtgcatagaagatgttggattgttttcttgttcttggg

SEQ ID NO: 52630 - DNA, 1423 bp, Zea Mays
gacggagtggggagccgtttcggggagcttgtagtgggtcggggattctggttggatcgggcggagatgggtcctgttcatcggagctggtcgagttgtgggagaattcccgtgttcttcactcgcgtctgtgtcacatggagtttggtttcccctttttcgatcggcgttttcttattggttgcggttttctatggttttcgagtgatctggtaccgctacagctgaaactcgagtctcgcggtaaaaaaccttgctctactatccgtcgttgaattggccatgatgtgttcgtgtccagagctcttttgctccatgattcgcgcgactcgcgcgcatgtgttcagtgttctcgcgttggattcagagcgtcgcggagttttacgtgcccgccgatcaagccaacaagatcgctggcctgttttggaccgagcatatcctgctttcgttgtcgatcctcgtttgtgacgtgctataccgcccagtccgccactgttcacctcggttttacttttccatcactcgtcttctcttcttgaatgccactctgaaacagcgacggccgcggctgccagcaaggcggcgagcgtgagcgcagcatgttgtcgcggccgggcgggacgacgaacctggtggagcccagagggcaggccgccgctctgccgtccggtggcccggcggtgcagccgtggtggaatattaaatggaagcgctgctggtcaagaaaggcaccatgccacatcgcagacacctgctttggtgccagagtatttggcaccatactcgcagctggaagtgaaccaatcaattgcttctgcagcatatcaatatcatgcagcatagcagtactcagacccttactacgcaggcgttgttgctccctatggaagtcaagatgtgtgtccgaggagcctgtctatgtgaacgccaagcagtaccgcggcattctaagacggcggcagtcacgtgccaaggccgagcttgagagaaagcgctggtcaaagcaagaaagccgtatcttcacgagtccccgtcatcagcacgcgatgacgaggagggcgagagggaacggtggacgcttcctaaacacgaagaagagtgaccgtgtccctcctgatgacttgatacagctacgacgacacaacgaggcttgaagaggtagcggtctggctggcatcctagagcagcggtttctgtccacaggcacgtgcatctgagaccggatccgtagctccactccacagcatatgcgcagcccatccatctcgtgcacacttgtgtagctgctgtgttgtaacttgtaagtggaaaactgagcttgtgtccgattgctatacacaacctaagtttcctgtgacctagctctgatgtggctctgattgaactgcaccaaatcatatgaaatccctacagagttctcgtg

SEQ ID NO: 52631 - DNA, 1721 bp, Zea Mays
ccctcttttgccagcctcgggtttgatggcctcgtttccatttttgggcggctggcctggccgggcggggttcggataagtcggcctcccaatttcgacggagtggggagccgtttcggggagcttgtagtgggtcggggattctggttggatcgggcggagatgggtcctgttcatcggagctggtcgagttgtgggagaattcccgtgttcttcactcgcgtctgtgtcacatggagtttggtttcccctttttcgatcggcgttttcttattggttgcggttttctatggttttcgagtgatctggtaccgctacagctgaaactcgagtctcgcggtaaaaaaccttgctctactatccgtcgttgaattggccatgatgtgttcgtgtccagagctcttttgctccatgattcgcgcgactcgcgcgcatgtgttcagtgttctcgcgttggattcagagcgtcgcggagttttacgtgcccgccgatcaagccaacaagatcgctggcctgttttggaccgagcatatcctgctttcgttgtcgatcctcgtttgtgacgtgctataccgcccagtccgccactgttcacctcggttttacttttccatcactcgtcttctcttcttgaatgccactctgaaacagcgacggccgcggctgccagcaaggcggcgagcgtgagcgcagcatgttgtcgcggccgggcgggacgacgaacctggtggagcccagagggcaggccgccgctctgccgtccggtggcccggcggtgcagccgtggtggaatattaaatggaagcgctgctggtcaagaaaggcaccatgccacatcgcagacacctgctttggtgccagagtatttggcaccatactcgcagctggaagtgaaccaatcaattgcttctgcagcatatcaatatcatgcagcatagcagtactcagacccttactacgcaggcgttgttgctccctatggaagtcaagatgtgtgtccgaggagcctgtctatgtgaacgccaagcagtaccgcggcattctaagacggcggcagtcacgtgccaaggccgagcttgagagaaagcgctggtcaaagcaagaaaggttagtgtactagcaatattatatcactcacaccatgcctcctctgtacgtacttcccttgtgcctttcaagatcgatcgaggatcagcgactatttcagcttgttttcttggcaaactagtatgtatgtatcttgcagtggttgatggtagtttgctaagctaagaacgacatgcgtgttgattgatactcactctgccagccgtatcttcacgagtccccgtcatcagcacgcgatgacgaggagggcgagagggaacggtggacgcttcctaaacacgaagaagagtgaccgtgtccctcctgatgacttgatacagctacgacgacacaacgaggcttgaagaggtagcggtctggctggcatcctagagcagcggtttctgtccacaggcacgtgcatctgagaccggatccgtagctccactccacagcatatgcgcagcccatccatctcgtgcacacttgtgtagctgctgtgttgtaacttgtaagtggaaaactgagcttgtgtccgattgctatacacaacctaagtttcctgtgacctagctctgatgtggctctgattgaactgcaccaaatcatatgaaatccctacagagttctcgtg

SEQ ID NO: 52632 - DNA, 816 bp, Zea Mays
gcgctagggttagtacgcgtccacggcgacgacctctgcgcggagtgtgctccgattggctggcctcctcgatcctccttcccgcgaacgcacgcgcgcgcgagggagaggttgagacttgagagatagacgaaagacgaaacaagggaaggagacgccgtgctcgcctattggccgccgcctccgctccttcgcgcccaatggcttctgcagcatatcaatatcatgcagcatagcagtactcagacccttactacgcaggcgttgttgctccctatggaagtcaagatgtgtgtccgaggagcctgtctatgtgaacgccaagcagtaccgcggcattctaagacggcggcagtcacgtgccaaggccgagcttgagagaaagcgctggtcaaagcaagaaagccgtatcttcacgagtccccgtcatcagcacgcgatgacgaggagggcgagagggaacggtggacgcttcctaaacacgaagaagagtgaccgtgtccctcctgatgacttgatacagctacgacgacacaacgaggcttgaagaggtagcggtctggctggcatcctagagcagcggtttctgtccacaggcacgtgcatctgagaccggatccgtagctccactccacagcatatgcgcagcccatccatctcgtgcacacttgtgtagctgctgtgttgtaacttgtaagtggaaaactgagcttgtgtccgattgctatacacaacctaagtttcctgtgacctagctctgatgtggctctgattgaactgcaccaaatcatatgaaatccctacagagttctcgtg

SEQ ID NO: 52633 - DNA, 923 bp, Zea Mays
gcgctagggttagtacgcgtccacggcgacgacctctgcgcggagtgtgctccgattggctggcctcctcgatcctccttcccgcgaacgcacgcgcgcgcgagggagaggttgagacttgagagatagacgaaagacgaaacaagggaaggagacgccgtgctcgcctattggccgccgcctccgctccttcgcgcccaatgatggaagcgctgctggtcaagaaaggcaccatgccacatcgcagacacctgctttggtgccagagtatttggcaccatactcgcagctggaagtgaaccaatcaattgcttctgcagcatatcaatatcatgcagcatagcagtactcagacccttactacgcaggcgttgttgctccctatggaagtcaagatgtgtgtccgaggagcctgtctatgtgaacgccaagcagtaccgcggcattctaagacggcggcagtcacgtgccaaggccgagcttgagagaaagcgctggtcaaagcaagaaagccgtatcttcacgagtccccgtcatcagcacgcgatgacgaggagggcgagagggaacggtggacgcttcctaaacacgaagaagagtgaccgtgtccctcctgatgacttgatacagctacgacgacacaacgaggcttgaagaggtagcggtctggctggcatcctagagcagcggtttctgtccacaggcacgtgcatctgagaccggatccgtagctccactccacagcatatgcgcagcccatccatctcgtgcacacttgtgtagctgctgtgttgtaacttgtaagtggaaaactgagcttgtgtccgattgctatacacaacctaagtttcctgtgacctagctctgatgtggctctgattgaactgcaccaaatcatatgaaatccctacagagttctcgtg

SEQ ID NO: 52634 - DNA, 1018 bp, Zea Mays
gcgctagggttagtacgcgtccacggcgacgacctctgcgcggagtgtgctccgattggctggcctcctcgatcctccttcccgcgaacgcacgcgcgcgcgagggagaggttgagacttgagagatagacgaaagacgaaacaagggaaggagacgccgtgctcgcctattggccgccgcctccgctccttcgcgcccaatggcttctgcagcatatcaatatcatgcagcatagcagtactcagacccttactacgcaggcgttgttgctccctatggaagtcaagatgtgtgtccgaggagcctgtctatgtgaacgccaagcagtaccgcggcattctaagacggcggcagtcacgtgccaaggccgagcttgagagaaagcgctggtcaaagcaagaaaggttagtgtactagcaatattatatcactcacaccatgcctcctctgtacgtacttcccttgtgcctttcaagatcgatcgaggatcagcgactatttcagcttgttttcttggcaaactagtatgtatgtatcttgcagtggttgatggtagtttgctaagctaagaacgacatgcgtgttgattgatactcactctgccagccgtatcttcacgagtccccgtcatcagcacgcgatgacgaggagggcgagagggaacggtggacgcttcctaaacacgaagaagagtgaccgtgtccctcctgatgacttgatacagctacgacgacacaacgaggcttgaagaggtagcggtctggctggcatcctagagcagcggtttctgtccacaggcacgtgcatctgagaccggatccgtagctccactccacagcatatgcgcagcccatccatctcgtgcacacttgtgtagctgctgtgttgtaacttgtaagtggaaaactgagcttgtgtccgattgctatacacaacctaagtttcctgtgacctagctctgatgtggctctgattgaactgcaccaaatcatatgaaatccctacagagttctcgtg

SEQ ID NO: 52635 - DNA, 790 bp, Zea Mays
cgtaatgttagcaggatacatgctctaagtctctgattcttgattcactaaatgatatattatttgttatatctgtaaaagaacataacgagacatgtcgtaaatacttagcatgatcagtgacaagttacctcctgtatctagatatcatttctctataagattttgtttcaagatgtaacagtaatttagtatgttgcctctgtaagaatgcatggtaatcaaacatatcctttgtttgaaaattttctatctccatgtttattaatccttgaatgaagtgtttgatttacagtaataaattgcaatcattaagggatacctagtaagagggagagtagtgatagatctaataacacatgagaagaagaatactcgtcaacatttcacatgttccttgtgtctttaactgttatcatttctcacttcgtggtaccacttctctacggatttatggaactactggggagaatatcttgcgtggttcatgttaatccacacaaccaaactatagtacatcaggactgctaccccgagtgaaatgcttacggcgtggaaggatgtgtgctatcttgcctcgcgaatgaatcgtttggttcgtttctaagcttcgcttggagccgttgtaaaagtaagaaacaactaaactctactggataatgtgcctattgtaaagccgttaacacgtcatgttaatatcaatcagtttccctacaatgagaaaattgatatttcgcattggtgttacgtacggtgatgtttgagttcactgcagagtctgcgatatttg

SEQ ID NO: 52636 - DNA, 526 bp, Zea Mays
gttgattttctcctatggtaatgcgaattgcaaaagccccatatctctatgacgataaatttggtaggatgaggtccatacgatgtctaatgcattatagagagaaaccaatacaggacggtgcagcacaaaaattgtgaggaaagaagatctacacaatcttcttgcattgatctagataccattcatctgtcagacatggggagaatatcttgcgtggttcatgttaatccacacaaccaaactatagtacatcaggactgctaccccgagtgaaatgcttacggcgtggaaggatgtgtgctatcttgcctcgcgaatgaatcgtttggttcgtttctaagcttcgcttggagccgttgtaaaagtaagaaacaactaaactctactggataatgtgcctattgtaaagccgttaacacgtcatgttaatatcaatcagtttccctacaatgagaaaattgatatttcgcattggtgttacgtacggtgatgtttgagttcactgcagagtctgcgatatttg

SEQ ID NO: 52637 - DNA, 1120 bp, Zea Mays
gcccgccggcccgccccgccccgcctcgttacccgcccacccaccgctgcttctgcccgactgctccatggaggggaccacgcaacccaccgcgggggcgcgggaaaagctgctccccacctccgccgccgcctctctgccgccctacctcgacccgcaccccgccgactcctcctcctacgcggtcctcctcgtccccgtccgccgccgcctgcgccgcggcggccgctgcatcgccccctgcctcaccgccctcctcctcgcgctcgcgggcttcctcctctggccggccgacccggacatctccctcgcccgcttccacctggggcacgtctccgtcgtggcgcgccccgccgtcgccgtcaccatatccgccgcgctcaaggtccgcgtccgcaacccggacctcttcgcgctcgactacacccgcctcgacgtcgccatcggctaccgcggcaagccgcttggcctggtaacgtccggcggcggacgggtccaggcgcgcgctgtctcgtacgtcgacgccaacctgcagctcgacggcatacgcgtcgtcgaggacgcgatctacctgctcaaggacctcgcgcggggatccgtgccctttgacgccctcgccgaggtcgagggtcaccttcacttcttcttcctcagtatcccggtcaaggtccatacgatgtctaatgcattatagagagaaaccaatacaggacggtgcagcacaaaaattgtgaggaaagaagatctacacaatcttcttgcattgatctagataccattcatctgtcagacatggggagaatatcttgcgtggttcatgttaatccacacaaccaaactatagtacatcaggactgctaccccgagtgaaatgcttacggcgtggaaggatgtgtgctatcttgcctcgcgaatgaatcgtttggttcgtttctaagcttcgcttggagccgttgtaaaagtaagaaacaactaaactctactggataatgtgcctattgtaaagccgttaacacgtcatgttaatatcaatcagtttccctacaatgagaaaattgatatttcgcattggtgttacgtacggtgatgtttgagttcactgcagagtctgcgatatttg

SEQ ID NO: 52638 - DNA, 731 bp, Zea Mays
gcccgccggcccgccccgccccgcctcgttacccgcccacccaccgctgcttctgcccgactgctccatggaggggaccacgcaacccaccgcgggggcgcgggaaaagctgctccccacctccgccgccgcctctctgccgccctacctcgacccgcaccccgccgactcctcctcctacgcggtcctcctcgtccccgtccgccgccgcctgcgccgcggcggccgctgcatcgccccctgcctcaccgccctcctcctcgcgctcgcgggcttcctcctctggccggccgacccggacatctccctcgcccgcttccacctggggcacgtctccgtcgtggcgcgccccgccgtcgccgtcaccatatccgccgcgctcaaggtccgcgtccgcaacccggacctcttcgcgctcgactacacccgcctcgacgtcgccatcggctaccgcggcaagccgcttggcctggtaacgtccggcggcggacgggtccaggcgcgcgctgtctcgtacgtcgacgccaacctgcagctcgacggcatacgcgtcgtcgaggacgcgatctacctgctcaaggacctcgcgcggggatccgtgccctttgacgccctcgccgaggtcgagggtcaccttcacttcttcttcctcagtatcccggtcaagaatattgttggaggattaggctttagaggagcaggtcatatttataagcctatgcgtaatcctg

SEQ ID NO: 52639 - DNA, 848 bp, Zea Mays
gtaaaattgtaacttatgtgcatgcaaatgcaatgaatatatttttgctgatagagtctagatgccgattgtgattcaagaattaatagtctttaaaaacgctgctttacaaactcgtattccagaagagggggcagggggtatgatttccgtcgtgtatactgtataaccatattggttgctgctgagggagtacataaggtgccggttataaatagcagcaatgacttaaagacagctctacaaaagatgggtgccataccatcgcgcaaaatactggcagtcgaggtcctatggactccacaaaatgagaatgacactttgtcagagcgagagctccttgaagattacccgctcttaaggcctctgtagaaagaagctgctgtagattcagttttggcggttttcttattaactatagcgcagatcttgtgtttgtataaaagtgtataatttgttattgacgtcactgttagccttcatatcagaacatttagcgcatcgcagtacaagtctgcgattgtctgccggtagtcttggtcgctgttcctgacacaataacacaaaattgtaaatagattgttctgaaaagaacacgagaggctgcatctgtgcgtgtacccgttctgccatgcatatcttagataaaagatttgatgaaatattgcgtgtcagttccaactccaggacgcgcagtagaataccgttcgtgagatcactgtgtggcagactggcaggcaccttttttttgttctgtggagaacaagatcatagtactttatgttggtctgctgctagttgccagattgacacaagctactttctgacccaaatggtatattattgac

SEQ ID NO: 52640 - DNA, 1234 bp, Zea Mays
cctacctaagcctaaactctcaagattttgaggtccagccataccccaacacatcaattcatctatagaacttcgttgcaatctgcctatggaaggagctaccccatcaaagaccaccctgttacggtgaagccataagcaccaaacccccataatgatgatactgttgagtgttgagccccttttcctatctttgtgcacccgattacacacttgtctccaccactcagagaaagagaattcatcattaccagaagtgaggtgaccaaggtcaaagggggataaaatactgtgctcaaactgacgggcaaagatgcacctattcaatagagacaacattggcattacttcggcatccggactgttgtatctcagcttactcatcggtggatgtgaaacgaagcattgataatggtgagaaacgtttcaatcagctttcaattgaggagaggggcaagtttgatgaagagacacttgtgaatgtgaacagcatcaagaggaataaaggaggcagccaaagatcaagtggttttagcaacgagtacattgtgataaccatattggttgctgctgagggagtacataaggtgccggttataaatagcagcaatgacttaaagacagctctacaaaagatgggtgccataccatcgcgcaaaatactggcagtcgaggtcctatggactccacaaaatgagaatgacactttgtcagagcgagagctccttgaagattacccgctcttaaggcctctgtagaaagaagctgctgtagattcagttttggcggttttcttattaactatagcgcagatcttgtgtttgtataaaagtgtataatttgttattgacgtcactgttagccttcatatcagaacatttagcgcatcgcagtacaagtctgcgattgtctgccggtagtcttggtcgctgttcctgacacaataacacaaaattgtaaatagattgttctgaaaagaacacgagaggctgcatctgtgcgtgtacccgttctgccatgcatatcttagataaaagatttgatgaaatattgcgtgtcagttccaactccaggacgcgcagtagaataccgttcgtgagatcactgtgtggcagactggcaggcaccttttttttgttctgtggagaacaagatcatagtactttatgttggtctgctgctagttgccagattgacacaagctactttctgacccaaatggtatattattgac

SEQ ID NO: 52641 - DNA, 1736 bp, Zea Mays
atgaagaacagtaatatgagagagttcttgaagtcggtgatggtgtttttgaggtgctgtctacatcaggtgacactcaccttggtggtgatgactttgacaagagaattgttgattggctcgctggaaacttcaagaatgatgagggtattgacttgctaaaagataagcaagctctccagcgattgacagaagcggctgagaaggcaaagatggagctgtcatctttgacccaaacaaacataagcttgccttttattacagctactgcggatggccccaagcatattgagactactcttaccagggctaaatttgaagagctatgctcagatctccttgacaggttgaggacccctgtggacaatgcccttagagatgcgaagttgcagttcaaagatattgatgaggttattcttgtcggtggctcaactagaataccagccgttcaggagcttgtcaagaaaatgacaggaaaggaccccaatgtgacagtcaaccctgatgaggttgttgcacttggagcagctgtgcaggctggagttttgtctggtgatgttagcgacattgtccttctcgatgtgaccccattgtcccttggtttggagacactgggtggtgttatgaccaagattatcccacggaatacaaccctgcctacctcaaagtcggaagttttctcaacagctgctgatggccagaccagtgtggagatcaatgttctccaaggagaaagggagttcgtgagagacaacaagtctcttggtagcttccggcttgatggaatccctcctgccccacgtggtgttccgcagatcgaagtcaagtttgatattgatgctaacggtatcctttctgtcactgccgtggacaagggtacagggaagaagcaggatattacaattactggtgccagcactctgccaaaggacgaggtggagaggatggttgacgaagctgagaagtttgcaaaggaggataaggagaagagagatgccattgacaccaagaaccaagccgagtcggtcatctaccagaccgagaaacaactgaaggaactaggggacaaggtcccaggcgacgtcaaggggaaggtcgagtcgaagctgcaagagctcaaggatgctgttgctggtggctccacacagacgatgaaggacgccattagtgcattgaaccaggaagtcatgcagattgggcagtccctctacagccagcagggtgccccaggcgccggacctggtccagctgatgcttctgctggttcagcggcgggcacttctgagaagccaggtgacgatggcgatgtaatagacgcagatttcactgacagcaaatgagtggcatgctaggtttagatgaggctgttcgctggggatgttttgccgcgagggagagatttgttttgtaggatgtgggtgtactttttggtagatttgcacctttgttcccatttggagttcggatgaaggtgagttagggaaaggtcgggttttaactgtcaaatgaatgtacataggcctatttttcttttgtgccttgccttcgaccgttcgacgttcgacctagttggtgtttgtttcaacccgttttgtcagaacccggtttgtgagactcgttttgacgagttttgatgaaaatcgtttaaaatcaaattgtatgtataaaaactacagcaaaaaaacctgtaattttataaattgtctacaataaaaagaaaaatcagataactaaat

SEQ ID NO: 52642 - DNA, 2578 bp, Zea Mays
ctcaacctctagccatttcccagggttaaccgcagaagccaaaatccggccgcccgctcactccaatccacgttcttcattcctctccctccatagggttttgtgaactctcctgtttgggcaccaccgtcggcccatggcgaccacgaccttccccacctcgaccccattctttgcggcccatcacggcccccgccggagccgaccctccatctccgccgcggtctacagccgcagtcgccggtggcgcccgctgcgggtggcgtgcgagaaggtggtaggcatcgacctggggaccacaaattccgcggtggcagctatggagggcggcaagcccacgatcgttaccaacgccgagggggcgcggaccacgccctcggtggtggcgtacaccaagtccggcgaccgcctcgttggccagatcgccaagcgccaggccgtcgtcaacccggagaacaccttcttctccgtgaagcgcttcatcggccgcaagatgaacgaggtagacgaggagtccaagcaggtctcgtatcgcgtcatcagggacgacaacggcaacgtcaagctcgattgcccggcgattggcaagcagttcgcagctgaggagatttccgtgctgagaaagctggtggatgatgcatcaaagtttttgaatgacaaagtcacaaaggcagtgatcacagtccctgcttacttcaacgattcacaaaggacagcaaccaaagatgctggccgcattgctgggctggaggttctgcgtattataaatgagcccaccgcagcatcactagcatatggttttgagaaaaagaacaatgaaacaattctggtttttgacctcggaggtggcacatttgacgtttcagttcttgaagtcggtgatggtgtttttgaggtgctgtctacatcaggtgacactcaccttggtggtgatgactttgacaagagaattgttgattggctcgctggaaacttcaagaatgatgagggtattgacttgctaaaagataagcaagctctccagcgattgacagaagcggctgagaaggcaaagatggagctgtcatctttgacccaaacaaacataagcttgccttttattacagctactgcggatggccccaagcatattgagactactcttaccagggctaaatttgaagagctatgctcagatctccttgacaggttgaggacccctgtggacaatgcccttagagatgcgaagttgcagttcaaagatattgatgaggttattcttgtcggtggctcaactagaataccagccgttcaggagcttgtcaagaaaatgacaggaaaggaccccaatgtgacagtcaaccctgatgaggttgttgcacttggagcagctgtgcaggctggagttttgtctggtgatgttagcgacattgtccttctcgatgtgaccccattgtcccttggtttggagacactgggtggtgttatgaccaagattatcccacggaatacaaccctgcctacctcaaagtcggaagttttctcaacagctgctgatggccagaccagtgtggagatcaatgttctccaaggagaaagggagttcgtgagagacaacaagtctcttggtagcttccggcttgatggaatccctcctgccccacgtggtgttccgcagatcgaagtcaagtttgatattgatgctaacggtatcctttctgtcactgccgtggacaagggtacagggaagaagcaggatattacaattactggtgccagcactctgccaaaggacgaggtggagaggatggttgacgaagctgagaagtttgcaaaggaggataaggagaagagagatgccattgacaccaagaaccaagccgagtcggtcatctaccagaccgagaaacaactgaaggaactaggggacaaggtcccaggcgacgtcaaggggaaggtcgagtcgaagctgcaagagctcaaggatgctgttgctggtggctccacacagacgatgaaggacgccattagtgcattgaaccaggaagtcatgcagattgggcagtccctctacagccagcagggtgccccaggcgccggacctggtccagctgatgcttctgctggttcagcggcgggcacttctgagaagccaggtgacgatggcgatgtaatagacgcagatttcactgacagcaaatgagtggcatgctaggtttagatgaggctgttcgctggggatgttttgccgcgagggagagatttgttttgtaggatgtgggtgtactttttggtagatttgcacctttgttcccatttggagttcggatgaaggtgagttagggaaaggtcgggttttaactgtcaaatgaatgtacataggcctatttttcttttgtgccttgccttcgaccgttcgacgttcgacctagttggtgtttgtttcaacccgttttgtcagaacccggtttgtgagactcgttttgacgagttttgatgaaaatcgtttaaaatcaaattgtatgtataaaaactacagcaaaaaaacctgtaattttataaattgtctacaataaaaagaaaaatcagataactaaat

SEQ ID NO: 52643 - DNA, 552 bp, Zea Mays
cgagtgttcgagtagcgaatcgaaattcgtctaaatttaacataatcatatacagattaaaaataccaagccgaactcgtttccatctggtccgtttacatcgtggccggaatggtcacgaaaattatctaaacgagattcggaccgaaccatctaaactgttattcttctgacttcttgtttcatgattcggaaaaaaataaaatgtatccgtattgcggattgactcactatacatcactaaaaatcgagattcaaaaatatctctcattctcggtaaaaaaaatagaaaagtgggaaaataaaaaaaaaaactcgcagccgatctcatcctatccctaaccgccgtggctcttgattttcttcccctgcgcgcttatcctcagccgccgctcaactcaagcataaaaatcaagcacgcgcgctcatccatcttccctatcccctccgcgcgatcctcccttgctcgcccagccagcggaggttctcccatggtggcgtccccagccgcgccctcgagctccttttccctggtgcgtggagcgtcctcct

SEQ ID NO: 52644 - DNA, 1982 bp, Zea Mays
gtaaaataagctttctttgtggatcgtcaatgataacatcactagaaaatggcctgcaacatttaataatgcataatattgaagtttcatccagttgatcctaaaagagaaggtagtaaatatattaaaagatgtacctcaagttttcaagacaaaagacaataaatcttccatctacaaattttccaacagagcgaccaagtccatgaatgccactagtcttatcaatgatgtcatccttgtcatatttctcaagacccttaacaccatcataagtcttgcaaacaagagcaagcatattatccattcccaagtactctgtgagaagcctacaataaaatcaaaacaagataaaaaaaaggcgaaataagaacaaacatatcgtttcaattaacttggtgccaattaaggcactaaaaatctcatatggaacaaagaagaaaatttgacctgctgaggttatcattatttacttttcctattgtagttgttgtcttgccctgatcaagtatacttcgaatagtgtgttgttcatcctcttgagcagaagtatcattatttacaacagcggccacggatgaatggtaattcccaagtttaactgagaaaaaatacagtttcagtacacttatagaggcattgtgaaataatgtatggaaatgtggagtctggacttctttcatcattgaagcacaatccatgagagtgctaaaaataggaagcaaaaggaaaggtagtcaacaaggctaatatgaatataatctgacttccaaaattattttacactctttgtgtaatgttgtgcaagcttaaaatgatctattgtcaaagacaaattcttataaaatatatgaaatgttgtattactcctctaaatgctcaggcacagaagatactaaggaatttttgtcaccacacaccggtgcacttagcacttgcatttcactaattaatcaatacacacaaacacctagcagcatctcatgcttagccagcacccccacgacacttgcattactactggacccttcaaataaagaaataaccacatgcttaagcgctaagcctacaaccactacgcactagcccactacaccaacactcgcactttgctgataataataataataaaataagtacaaaaaatagattgtatacaagattaaaagagaaaaaaaggaacacaatagacacaccggagatagcaaacatggcagcagaaatcgatcaaataaagtactaccatggcagcagaaacaaacaaacaaggtgagagggagcacgctgatagcatcgtcggcactggtcgagaaaagattcggatccctgtggtctatcttctcggccgagggccggtttgggctttgccatatccacgcacgtagtcacacagtagcagcagagttgcaggagcaagcagatggtcgtatcccacacgcatgcactcgactgctgctagcagcagagcacgcgagcggcgatgggcgagctggtgagcaagcacggctgagcgcgcgggcggcgaggcaagcatgcaccggcacgggcagcacggcgcgcgtgagcagggagcgccggcagtggtgctggtgatggggcagagagctcacagcctggcgatggaggagcaacggtccggagaccggcgaactggcggcgtctagggaggtgcggctatggacgccagcgagcctggcgagcaccgtggtagggagttgagggcgagctcgccatgggggaggattgcgcgcaggggcgagcggatgctagggcacgcgaccataagcagagaggggagggatgggagtggcagcgggcgtggggaggtcgccctggttcggcggcggctgaagacgaagctgagggagggggtggcctcgggagagggcgccggccagggagaggggcagcagcttgctcccagccgtgcacgaagaagaaaggtgtggggaggatagagaagagcccagaacaaggatggt

SEQ ID NO: 52645 - DNA, 1340 bp, Zea Mays
gtaaaataagctttctttgtggatcgtcaatgataacatcactagaaaatggcctgcaacatttaataatgcataatattgaagtttcatccagttgatcctaaaagagaaggtagtaaatatattaaaagatgtacctcaagttttcaagacaaaagacaataaatcttccatctacaaattttccaacagagcgaccaagtccatgaatgccactagtcttatcaatgatgtcatccttgtcatatttctcaagacccttaacaccatcataagtcttgcaaacaagagcaagcatattatccattcccaagtactctgtgagaagcctacaataaaatcaaaacaagataaaaaaaaggcgaaataagaacaaacatatcgtttcaattaacttggtgccaattaaggcactaaaaatctcatatggaacaaagaagaaaatttgacctgctgaggttatcattatttacttttcctattgtagttgttgtcttgccctgatcaagtatacttcgaatagtgtgttgttcatcctcttgagcagaagtatcattatttacaacagcggccacggatgaatggtaattcccaagtttaacatggcagcagaaacaaacaaacaaggtgagagggagcacgctgatagcatcgtcggcactggtcgagaaaagattcggatccctgtggtctatcttctcggccgagggccggtttgggctttgccatatccacgcacgtagtcacacagtagcagcagagttgcaggagcaagcagatggtcgtatcccacacgcatgcactcgactgctgctagcagcagagcacgcgagcggcgatgggcgagctggtgagcaagcacggctgagcgcgcgggcggcgaggcaagcatgcaccggcacgggcagcacggcgcgcgtgagcagggagcgccggcagtggtgctggtgatggggcagagagctcacagcctggcgatggaggagcaacggtccggagaccggcgaactggcggcgtctagggaggtgcggctatggacgccagcgagcctggcgagcaccgtggtagggagttgagggcgagctcgccatgggggaggattgcgcgcaggggcgagcggatgctagggcacgcgaccataagcagagaggggagggatgggagtggcagcgggcgtggggaggtcgccctggttcggcggcggctgaagacgaagctgagggagggggtggcctcgggagagggcgccggccagggagaggggcagcagcttgctcccagccgtgcacgaagaagaaaggtgtggggaggatagagaagagcccagaacaaggatggt

SEQ ID NO: 52646 - DNA, 1787 bp, Zea Mays
  misc_feature (1786)..(1787): n is a, c, g, or t
cttatttctattctaccgaaatcctacggtaatgttttaattttggcgaaacctattctacggctttccatgatagcaaaaaatctcatgccaaataattggcaccaaatttcaaatccatctcgttccgctccactcaacgtctccacgctagggtttcgctatccccattcccaccgcgccagtccccgaaccgacccttggatcggcgccgcgcttgctcgctccgtccatgccgagctcctgacccccatgtcacgttcattcttcccgacctgctcctcccagaaagcggaaattgaagagatgggcaaggagctggacgacctccgggccaaggtggaggcgctcaccgcccagctccgcgccaactccgacctcgccgatggtctcaagcgcgccggcgcggaccaggccgcgtggctgcgggatgcccgggcggaggcggagcggaatgcggtggaggccgcggccagctcggaggaggccgccgccaccggggatcggtgcggggtgctggagtccaggctggccaagaatgggcaggcgctgaggcacctctacgcggcgcacgaggcgctcaagggcacgctccgggagaagatcgagggcctcgagggcgacaagaggggcctcctcacggcgctcgaggacgctgaggggaggcgcgtggagcacgaggctgcccttcgtgcgtgtgacaacgagatcgcgcggcttagggggctcctgtcagagaaggactggaggggaagcgaggctgagaagagggtgttgacaccgagggaggtggtgatgagggacgacatgctggtgaagccggaggaggagaaggccaccgtcgagggtaagctcaactggaaggctgagcagttcaggcacctcgaggaggctctcaataagctccacgatggcttcagggctgtcaagaaggagtggggcttagatagatcaacttccgttgatcgaattggcactcttgaggatgatttggattccaagaccagggtcacggaggatttcccgtcgaggttggatatgtgcagccaggcgttggcccatgaggaaggctgcaggaagcgagtcgaagcagagttgtctgagttgcgcctcatgtatggctatgtggtctctgaatatgaaggggccaaatcaatgatggagtcgttgagctccaagacggatggggggattgcatatttgagaagagcactggctgagaaggttacattgctcaaggaaataggatacagtaaggcacatcttgaacaagaaaatgaggatttgcgctcaagtctcaaggagtatcaggaggcacagattggtggcacatatgctgttgtgtcattgaaaagtttatgggagaagttccgagccctggagcagacacatagaagttgcactaagaagctaagagataaggaagaagaatggagaatacagatgacaaagcttgtgaatgacttggttgaatgcatatcagatttagaatccaaagatattcttatcgggcaactgcagaatgagttacgcggtagttataggtcccttgagctacaaacagtggagagttgggaagctttgatatttcttactgttgtactaggaaaatttcatgagtcctgctcatttgttgatactgctaaactgaatatgcagcatcattgtcaagaaattgaaaaggaaattggttttgccaagagacagttagaagaacaatcttgcattattgtccagtctcaagctgaacagaaacaacaatctaaggttatagcaaaattgcatnn

SEQ ID NO: 52647 - DNA, 900 bp, Zea Mays
agcactgattacctatgaaggtttcttaaggttgaggttgagcgtattgacattggtgaaccagaaaatccaggcccgaaatacaacagcaggagtacatatcaacctgttagcatagacccatttgccctttcacctgatccaaatgagcaagagaaccttgacatatttggtgatgatgatggcaatgcttcaccgaataacttggcctccggagaaggggcacctgctcgtggttttgacatcaacttaccaaatcaagacaatatggatgatgaaattgctgatgtagatgtaaatgatgaggcagatgaggggctcaatgcagccgatgcgctgcgagctcaagtgaacgcagaggggcagcaggggcaggacagctcaagctctagtggaaccagcagtagcagcagcagcggaagtgggagcggcagtggaagtgggagcagcagcagtgacagcgatggtagtgatgccgattcggcaagctccggaggtgatgttgatatatgagcttgataatgcaagcttttgttttgacagatgccttgcttcacaatttttggttcacaagggaggtgtagggtatgtatatgttcagctaatattgctccggtcagtgagtgcattaaatttccgcaattcatggcgggcttggtctgttttatgtttgttaaaacctgggctggaagaatagaaatctgtaaacatatctgtacaactatgtctatgtgcttatgtggcattgctgttaccttggatgatggatgttacaacattgttcagttgaaatgacaaaaggtataaagagtagtgcaagcaggccttaatgcaagcctgaaagtgagtcttctggtccgttagatgatacgatggcgagctgcttctgcaaggcgttca

SEQ ID NO: 52648 - DNA, 1255 bp, Zea Mays
atcccctccatgggtcctctgcaatgaatttaagccagcatcaattgacaagacacaagctgggtctctgcaaagcaccaaagataaccgggttactgtggaattccataataatcagcctggcaagccaaaggtgacatttgagggaagccaagaagagtacaaggataatgatggtgtcttattttttgatggtgagacctttcgcttagagaggttgcatagggctgtcaagaggttaaggcatgtccgagttccaggagagtctgcagcacttaatttggctggtacaactactggagtgggtgcagaatcacagtctcctccattacctaaagtcagcaagtcacagaccatgagcaaacctgctgttcactcagttccagttgaggttgagcgtattgacattggtgaaccagaaaatccaggcccgaaatacaacagcaggagtacatatcaacctgttagcatagacccatttgccctttcacctgatccaaatgagcaagagaaccttgacatatttggtgatgatgatggcaatgcttcaccgaataacttggcctccggagaaggggcacctgctcgtggttttgacatcaacttaccaaatcaagacaatatggatgatgaaattgctgatgtagatgtaaatgatgaggcagatgaggggctcaatgcagccgatgcgctgcgagctcaagtgaacgcagaggggcagcaggggcaggacagctcaagctctagtggaaccagcagtagcagcagcagcggaagtgggagcggcagtggaagtgggagcagcagcagtgacagcgatggtagtgatgccgattcggcaagctccggaggtgatgttgatatatgagcttgataatgcaagcttttgttttgacagatgccttgcttcacaatttttggttcacaagggaggtgtagggtatgtatatgttcagctaatattgctccggtcagtgagtgcattaaatttccgcaattcatggcgggcttggtctgttttatgtttgttaaaacctgggctggaagaatagaaatctgtaaacatatctgtacaactatgtctatgtgcttatgtggcattgctgttaccttggatgatggatgttacaacattgttcagttgaaatgacaaaaggtataaagagtagtgcaagcaggccttaatgcaagcctgaaagtgagtcttctggtccgttagatgatacgatggcgagctgcttctgcaaggcgttca

SEQ ID NO: 52649 - DNA, 1278 bp, Zea Mays
caggatttcactactccacagcatcgaaattaccagaagcatctagatgaatttaagccagcatcaattgacaagacacaagctgggtctctgcaaagcaccaaagataaccgggttactgtggaattccataataatcagcctggcaagccaaaggtgacatttgagggaagccaagaagagtacaaggataatgatggtgtcttattttttgatggtgagacctttcgcttagagaggttgcatagggctgtcaagaggttaaggcatgtccgagttccaggagagtctgcagcacttaatttggctggtacaactactggagtgggtgcagaatcacagtctcctccattacctaaagtcagcaagtcacagaccatgagcaaacctgctgttcactcagttccagttgaggttgagcgtattgacattggtgaaccagaaaatccaggcccgaaatacaacagcaggagtacatatcaacctgttagcatagacccatttgccctttcacctgatccaaatgagcaagagaaccttgacatatttggtgatgatgatggcaatgcttcaccgaataacttggcctccggagaaggggcacctgctcgtggttttgacatcaacttaccaaatcaagacaatatggatgatgaaattgctgatgtagatgtaaatgatgaggcagatgaggggctcaatgcagccgatgcgctgcgagctcaagtgaacgcagaggggcagcaggggcaggacagctcaagctctagtggaaccagcagtagcagcagcagcggaagtgggagcggcagtggaagtgggagcagcagcagtgacagcgatggtagtgatgccgattcggcaagctccggaggtgatgttgatatatgagcttgataatgcaagcttttgttttgacagatgccttgcttcacaatttttggttcacaagggaggtgtagggtatgtatatgttcagctaatattgctccggtcagtgagtgcattaaatttccgcaattcatggcgggcttggtctgttttatgtttgttaaaacctgggctggaagaatagaaatctgtaaacatatctgtacaactatgtctatgtgcttatgtggcattgctgttaccttggatgatggatgttacaacattgttcagttgaaatgacaaaaggtataaagagtagtgcaagcaggccttaatgcaagcctgaaagtgagtcttctggtccgttagatgatacgatggcgagctgcttctgcaaggcgttca

SEQ ID NO: 52650 - DNA, 694 bp, Zea Mays
atgcaaacaacctctcggcctcatcaggcccgctgccctccacctccgcctccgccgatcccctccgctgaatcgaatagaagaatcgagcgccgctactggcgaggggctagcggtcggcgcacagcgcggtatggcgagcggcagcagcaacggggagccaagcacggcaccgcaggcgaaccggtggtacgacctccggctgggctcttcctgccgtgacccctcccccaccgccaagttctgcaccctccgttatgaatttaagccagcatcaattgacaagacacaagctgggtctctgcaaagcaccaaagataaccgggttactgtggaattccataataatcagcctggcaagccaaaggtgacatttgagggaagccaagaagagtacaaggataatgatggtgtcttattttttgatggtgagacctttcgcttagagaggttgcatagggctgtcaagaggttaaggcatgtccgagttccaggagagtctgcagcacttaatttggctggtacaactactggagtgggtgcagaatcacagtctcctccattacctaaagtcagcaagtcacagaccatgagcaaacctgctgttcactcagttccagttgaggttgagcgtattgacattggtgaaccagaaaatccagtggttacagtgttgtctaaattctcattgcag

SEQ ID NO: 52651 - DNA, 2617 bp, Zea Mays
caccgacattccgacaataaggtgtggattgaccttgtcagtcacagaagggcggagcagtgccagtgtactggccgccaccactcgccactcgtccccctccccccgaaagccggcacgagccctcccttcccttcctccaacctgttccgatccgccccgagccggctggccatggcgatcagggctggccgctcggccctccacctccacgctctcgctttcctcatcctcgccgcctccccctgcctccaagtccaagctctagtggaccatcgcaaacagatatctgactggggtaggcaacccaactttgaactgcagaatatgtcctcgagtcaaagggatggctctcatctcttgggcagatcaaaggaaataacacacaggaaactaagggggagaattggtgtaaggaacaaaatggaagtagtgcagcaggatgatgaagcattagttaaacttgagaacacaggtattgaacgctcaaaagctgttgattctgcagtgctgggaaaatatagcatctggagacgtgaaaatgaaaatgagaaggcagattcaagggttcgtctgatgcgagatcaaatgatcatggccagaatatattctgttcttgccaaatctaggggcaaacttgatctctatcaggagctgctagcaagactcaaggaaagccagcgctcccttggggaagctactgctgatgccgaacttccgaagagtgcttcagatagaatcaaagcaatgggccaagttttatcaaaagcaagggatctgttgtatgattgcaaggaaattacccagcgtttgagagcaatgcttcagtcagcagatgagcaggtccggagcttgaagaagcagagcaccttccttagccagcttgcagctaagacaatcccaaatggcatccattgtctttctatgcgcttaacaattgattattaccttctctctccagagaaaagaaagttccccaatagcgagaacttggaaaatcctgatctttaccattatgctcttttctcagataatgttttggcagcatcagttgtggtcaactcaaccatcatgaatgcgaaggagcctgaaaaacatgtgtttcaccttgttactgacaaactgaactttggggccatgaacatgtggtttttgctgaatccacctggggatgcaacaatgcatgtggaaaatgttgatgacttcaaatggttgaactcttcttactgccctgttctgaaacagctcgagtctgcagccatgaaagaatactatttcaaggctgatcgtccgaaaacactctctgctggctcttctaatctgaagtatcgaaacccaaaatatctgtctatgctcaaccatctaagattttacctcccccaagtctatcccaagctgaataaaattcttttcctggatgatgacatagttgtccagagggacctaactggactctgggaggtagatcttaatgggaatgtaaatggagcggtggaaacatgtggagagagttttcaccgatttgacaagtacctcaacttctcaaacccaaatattgctcagaattttgatcctaatgcatgtggttgggcttatggaatgaacatgtttgatctggaagaatggaagaagaaagacattactggaatctaccacaaatggcagaacatggtgaattggaagattttacattacttgcatcttgacaccttttcttttaatattgcatttaattttcctatacgtacacagccatcttgctgatttatattctgttgctttggcttttcagatatcgtgattttggtcatttttatgcatatatgactactgtgtacagtatagatgaagcaaatgctaaatagttattttttagtatgattgcattggagtccttaattaattttcataataccaacaactctattaattagttaattagctgatgtttaatcattacaaagaattaagagcaagtcgaaacataaatgtactgcctgagatgtacatatcagtgcatacatttattgactccattttcacactgttttatgttatctttatacagaacgagaacaggctgctctggaaattggggacattgccgccagggcttctaactttttacaagctgacacaccctctggacaaatcatggcatgtgcttggtttagggtacaatccaaccgttgagcgctcagaaatagacaatgccgcagtcatccactacaatggtaacatgaagccatggctggaaatcgcaatgacaaagtatcggccttactggacaaagtacatcaattatgagcatccttacattcatggatgcaagttcagccaataggaactacctaaacattcttctgtgatgaacactgaagttagagggcactcaaaatatagtcctctcttagtagtataactatcacatgttctttcttcgttttatattaagcttatcatgtgtatgtagtagtttcatcgcctttagtccgttgtcggttcttgtctttttttttgtcatgaaaaggacgatgagttcaaagattctcatcagctgataaatgcaatatatgaatttctgttggtagcaaattaatgatgtcactcaaactgt

SEQ ID NO: 52652 - DNA, 1856 bp, Zea Mays
acgacaccgacattccgacaataagctctagtggaccatcgcaaacagatatctgactggggtaggcaacccaactttgaactgcagaatatgtcctcgagtcaaagggatggctctcatctcttgggcagatcaaaggaaataacacacaggaaactaagggggagaattggtgtaaggaacaaaatggaagtagtgcagcaggatgatgaagcattagttaaacttgagaacacagaatatattctgttcttgccaaatctaggggcaaacttgatctctatcaggagctgctagcaagactcaaggaaagccagcgctcccttggggaagctactgctgatgccgaacttccgaagagtgcttcagatagaatcaaagcaatgggccaagttttatcaaaagcaagggatctgttgtatgattgcaaggaaattacccagcgtttgagagcaatgcttcagtcagcagatgagcaggtccggagcttgaagaagcagagcaccttccttagccagcttgcagctaagacaatcccaaatggcatccattgtctttctatgcgcttaacaattgattattaccttctctctccagagaaaagaaagttccccaatagcgagaacttggaaaatcctgatctttaccattatgctcttttctcagataatgttttggcagcatcagttgtggtcaactcaaccatcatgaatgcgaaggagcctgaaaaacatgtgtttcaccttgttactgacaaactgaactttggggccatgaacatgtggtttttgctgaatccacctggggatgcaacaatgcatgtggaaaatgttgatgacttcaaatggttgaactcttcttactgccctgttctgaaacagctcgagtctgcagccatgaaagaatactatttcaaggctgatcgtccgaaaacactctctgctggctcttctaatctgaagtatcgaaacccaaaatatctgtctatgctcaaccatctaagattttacctcccccaagtctatcccaagctgaataaaattcttttcctggatgatgacatagttgtccagagggacctaactggactctgggaggtagatcttaatgggaatgtaaatggagcggtggaaacatgtggagagagttttcaccgatttgacaagtacctcaacttctcaaacccaaatattgctcagaattttgatcctaatgcatgtggttgggcttatggaatgaacatgtttgatctggaagaatggaagaagaaagacattactggaatctaccacaaatggcagaacatgaacgagaacaggctgctctggaaattggggacattgccgccagggcttctaactttttacaagctgacacaccctctggacaaatcatggcatgtgcttggtttagggtacaatccaaccgttgagcgctcagaaatagacaatgccgcagtcatccactacaatggtaacatgaagccatggctggaaatcgcaatgacaaagtatcggccttactggacaaagtacatcaattatgagcatccttacattcatggatgcaagttcagccaataggaactacctaaacattcttctgtgatgaacactgaagttagagggcactcaaaatatagtcctctcttagtagtataactatcacatgttctttcttcgttttatattaagcttatcatgtgtatgtagtagtttcatcgcctttagtccgttgtcggttcttgtctttttttttgtcatgaaaaggacgatgagttcaaagattctcatcagctgataaatgcaatatatgaatttctgttggtagcaaattaatgatgtcactcaaactgt

SEQ ID NO: 52653 - DNA, 811 bp, Zea Mays
atgcctgcactagatctgcaaaacatccgccgcaggcacactcctcaggtgcggcggctgcacctgcacagccggttcgtcaccaagctcgggggagtggctcgtggcagtcgcctcaacgtcgtcctccgtgccgtccgacgaggtgtcgtcaccccagatccggatcccaccccccccaaatcgcatatccgcatggaaggtccgcgcgtccgcagcccctacgccacctcctcctcatcctctccccctcactgcgccgccacctcctcctcggatgcgcggatggaaggtccgcggccctgcacccccaaatcgcagaacgtgtgcaccatccggccgctggtgacggtgatgtgcttccaccagctctccgagggcatgggactcggcggctgcatcctgcaggcgaagtacgtcgcgaggatgaaggcggggctggtgttcttcttctccacgacgacgccgttcgggatcgcgctggagctggcgctcaccaagatgtacagggagaacagccccacgacgctcatcgtgctttggtgcagggatgcttcttgaggtttggataaacaaaagatcaaaggtatattcctgcatttcatagcaggagaaagatcaaaaagcctacttgattttcgtaccttaggactgtatctgggaaacttaaggttatgaggtgttctcttctattattggattatgagttgtactgcagaaagcatagattaggattgcatacctgctgatgtacttgtactaatgatattctatgcatcttctaactcttgttcattgcttcatcctgaaa

SEQ ID NO: 52654 - DNA, 1036 bp, Zea Mays
ttggagagaaggtggatgagaataagggacatggttttgagagaggatggaagggaataaaggacatcgtgcgttgttgcacaccgcatttgcgtgctcaggtggcaacaatcctatctcatggaaactgagacggttctacagttcaaatgaaaaacacttgcccgcaatatctgatccagaaatagaatctgcatttaaggatttgttggctgctagttggaatgaacttccagattctcttgtagcggaagcaaagaaagcagcatctaaagccaccgatgatagtgctggtcaagaggctttgaaaaatgtatttcgtgcagctgaggcatgtgaagaatttagtggaactttggttaccctaagaatggctcttgatgatctttgtggcctgactggcgaaaatgtgggtcccttacctggttatattgaagatgctgttaaagctgcatataatcgctacatgacatatctggagtcctttggtcctgaggaaaactatctaagaaagaaggtggagactgagttggggacaaaaatgatacacctcaaaatgcgatgcagtggcataggttctgagtggggaaagatctccctgattggcacctcagggatctcaggttcctatgttgagctaagggcatgatgggacgtctgcaggtaaccatggaaatcatcgatgagctgaggaagtctgtagatcagaatatgccagtactgcattttcctttcccctttctagctagcatggcaataacaatgagatcatcaaacagcggcgcggtttaaggaacttcagatactcccggcccttgtgtctgtgtctttgtctgtaataagaacgtgtatatgcgtgaaacctatcagttctgttattttttggcatgcgcctgacttcttgttcaactggtgtgagttgtatgctttgttcatgaagcactgatcaatgatcatatgccttcgcccgcaacagaacttccttcagcactgcaaaaatacagtgacctgccatttttttatgaaagggtttaac

SEQ ID NO: 52655 - DNA, 1683 bp, Zea Mays
gtgagcgtagaaggggagctaggtgtggcagcaacattggggcaacacagaagggggatggcgacaaagttaagacgagtacaacaaggggatgacgacgacggagtcgagcgcttctaccttgtgtcgatcggatacaacaataacagaacataagcggaattgggctgttttagagagttgtggagttcgattgttggcatgatggtggatgtgtgctgtatttttgccttcatgtacttactattttttttccaaatcacatcatattcaacatatatataagaagacaaattttttgaggtggggccacggccccctttgcccaccccgtggctccgcccctgactgatgctaaactgctcagacgtgaattgtggggtcctagagtgtttctttctaggttaatatctaatcaacttttgatggactcactttcgtatttatagaacatgagtgatgttgcttgaaagctagaacatcagttgcttgacagcaaagcctttgcttctgaagcaactagaaaaaaggttgtctagcctttgtttgagtacacatgcttcaggaaaaccgaagcaataaatcattatttatgttttttcacacatgggctcaggggcagcatgagtttgttcctgcaaggagagctggtttggagagaaggtggatgagaataagggacatggttttgagagaggatggaagggaataaaggacatcgtgcgttgttgcacaccgcatttgcgtggtggcaacaatcctatctcatggaaactgagacggttctacagttcaaatgaaaaacacttgcccgcaatatctgatccagaaatagaatctgcatttaaggatttgttggctgctagttggaatgaacttccagattctcttgtagcggaagcaaagaaagcagcatctaaagccaccgatgatagtgctggtcaagaggctttgaaaaatgtatttcgtgcagctgaggcatgtgaagaatttagtggaactttggttaccctaagaatggctcttgatgatctttgtggcctgactggcgaaaatgtgggtcccttacctggttatattgaagatgctgttaaagctgcatataatcgctacatgacatatctggagtcctttggtcctgaggaaaactatctaagaaagaaggtggagactgagttggggacaaaaatgatacacctcaaaatgcgatgcagtggcataggttctgagtggggaaagatctccctgattggcacctcagggatctcaggttcctatgttgagctaagggcatgatgggacgtctgcaggtaaccatggaaatcatcgatgagctgaggaagtctgtagatcagaatatgccagtactgcattttcctttcccctttctagctagcatggcaataacaatgagatcatcaaacagcggcgcggtttaaggaacttcagatactcccggcccttgtgtctgtgtctttgtctgtaataagaacgtgtatatgcgtgaaacctatcagttctgttattttttggcatgcgcctgacttcttgttcaactggtgtgagttgtatgctttgttcatgaagcactgatcaatgatcatatgccttcgcccgcaacagaacttccttcagcactgcaaaaatacagtgacctgccatttttttatgaaagggtttaac

SEQ ID NO: 52656 - DNA, 2750 bp, Zea Mays
agcaattccaggcggtaatcaccatctaccgacagggcggcctacacgatgtggcggcagtcaggctgcccccggcccagaccaattcattggatcgcccccaggcacggtgatggtgtccgcgcccagagccccaggcgaccgccgcagcagccagcagcatcggaaagccgccgcgcccccttcactgctccgccggtcgctgtgcctccacgccgacgacatcatacccgctcaggcccagctgctctcactgccgaattgaaaccttttaattccctatgacccgtcagtctcctccaaagaacgtaagcgtgaagcaaagcttccccgttccggatcgatcgatcgatcatccatctgaatattctattggcatttttttagtggttgaaagctgcatctgcacctgcatatgctgctgctgctgcggcttcccctttctcgtccctgtcgtcgttgcgtactttggatagctggacctcttccctctcgtcccgctggccgcgaccagttctccatcccgagcttaggtagctacgtactcatatgtagacaggcagaggcagtcgcatgcagagctcggaagctcgagagagaacagcctgcagagcaacagtaacagccgttggtcgttagtatcttcagaacgagacgtacacgaggcacagagagagcaggtccggggtagctagctgccatgggcaacgtatgcttctgcggcaccacctccacctcccctgatcagcctgaaccggccacggccggcaaagcgccgccacaaggcgccaccaacaggaggccggcgacgcctccgagcagccagcagggcagcagccaagagccgagcccggccccgggggccaataagcccggaccgaaggcgaggcccaaggctactactaaggcgaacccgtacgactgggctccgccggcggcggcgcacgcgtcccgggcgtcggcgtcggtgtcggcgtcgcgcgtgctggacggcgtggtgccgcaccacccgcggctgcgcgtgacggacaagtaccacctcgggcgggagctggggcggggcgagttcggcgtcacgcggctcgccacggaccgcgccacgcgggagcgcctggcgtgcaagtccatccccaagcggcgcctgcgcacggcggtggacgtcgcggacgtgcgccgggaggtggccatcatggcgtcgctgcccgaccacccggcgctcgtgcgcctgcgggccgcctacgaggacgccgacgccgtgcacctggtcatggagctctgcgacggcggcgagctgttcgaccggatcgtcgcgcgcggcaggtacacggagcgcgccgcggccgccgcggccaggaccgtggcggaggtggtgcgggcgtgccacgctcacggggtcatgcaccgggacctcaagcccgagaacttcctgtacgcgggcaagagcgacgacgcgcagctcaaggccatcgatttcggcctctccgtctttttcagaccaggcgagcggttcacggagatcgtgggcagcccgtactacatggcgccggaggtgctgcggcggagctacgggccggaggtggacatctggagcgccggcgtgatcctctacatcctcctctgcggcgtgccgccgttctgggccgagacggagcagggcgtggcgcgcgccatcctccgcggcaacctggacctgcagcgggagccgtggccgcggatctccgagggcgccaagagcctcgtccgccagatgctccagatggaccccaagaagcgccccaccgcgcagcaagtgctcgagcacccgtggctgcagaacgcgcggaaggcgcccaacgtgccgctgggcgacgtcgtccgggcgcgcctgcagcagttctccgctatgaacaagttcaagaagaaggcgatgcgggtgatcgcggagcacctgtccgtggaggaggtggaggtgatccgggacatgttcgcgctcatggacaccgacaaggacggcagggtgacgctggaggagctcaaggccgggctcaggaaggtggggtccaagctcgccgagcccgagatggagctgctcatggaggccgctgacgtgaacggcaacggttacctggactacggcgagttcgtggccatcaccatccacctgcagcggctctccaacgacgcccacctccgcaaggcgtttctcttcttcgacaaggacagcagcggctacatcgagcgcgccgagctggccgacgcgctcgccgacgaggccgggcacgccgacgaggccgcgctcgacaacgtcctgcgagaggtcgacaccgacaaggatgggcggatcagcttcgaggagttcgtggcgatgatgaaggccgggacggactggaggaaggcgtcccggcagtactcgagggagcgcttcaagaccctgagcaacagcctcctcaaggacgggtcgctccgcatggcgcgatgaccagagaagagaacgatgcttgtgcggggcttcagagacgatccatgcgatgcgatgcttggtttcttatgcatacacccttcatcaatggatggatagaatgatagattcctttcttcagcttgcttgtatattcgttccagaaagtccgaactttggaatttgggtaggaatatttgtcgttaacaaaagctgatgggggttcaggtcagtgtctatggctacgaagtgaacatgtgttgcttgtaattatgcgtcctaggaaggaactaaattttgaaaatgtccttaa

SEQ ID NO: 52657 - DNA, 1668 bp, Zea Mays
ccccaagccgagccccccacacctgacagaaaagcgccactaaaaccctagccatccgccatgtccacctccccagccgcctcatcctccgctccgaccgccttcgccgcctctgcggttacgatggctgccgaggccgccgacgggccggtgctcagcgtagtatcgaagcgtctccgcgcgctgcggaagaagtacaatcgcatcacgcagatggaggagtcgctcgccgccggcaagtcgctcaaccgagagcaggaggagctctcctcccgctctgcccccgcccccgccgccaccgcttcctcctccgactcagattcgtcagtccaggacctcctcgcgctcgtctactttggctccctcttcgatgtcaagcaacaaagcgacttcgtctctttggtatacacgcgcgagctcgagcggagcagctgcctcacttatgactacgtcggggatgatccggaagacagtctcgtggagaccgatctgaacgccgtttctgcccttgccaccctcgcggcgtcgcgccctcctgctgcagctggagtctctcaccgtgatgccctccaggcttgtgcccatcacgcccgcctctggctcagccgtgcggatgaacccatccaccctgactccaccatcacatatgctggggtgagggcaaagctggatagaatcatggcatcgggctactacacagctcagctagaaatgaggacaccaatggatctggctgctgcagtggcaaactttggagccggaggtgtgcaggtgcaagagagcatggttgtgtcgcctcaggcactggaagcagtcgaggagagccaggatgttgaagaacacaaggacgagaaggaagattctgaggctacagaaatctacagtgagcatcaggctcctgttgttgacgctgaacatgtggatgatgaaggcctggtgaacccagctgatgaagttccttcagctgaggcagagcaggagacacttgacgattatgtggacgatcaggaacaaaaagaccaacaattcacccagcggcgctcttaccagaaccagcgtagtggcggtggtcgtggtggtggcaggaggggctatcctaatggtcgtggagtgcgtgggtaccagaatggccgaggtggcgggtaccagaatggccgaggtggcggtggataccagaatggccgtggcggaggcggtgggtactacgaatctggatactaccagccgaggaactacaacaacagaggccggggtggtcgcaactcttattacaacaaccatggtggaggtgcacaggcaggcggccatggccatcctgggagggttgagctgggtgcaaacgcctagctcgagctgactgttttgtttgaggagcagaggtcggggggagccattttgttattatagaactaactgagcctgttatttcttttttgctactcgcatatggaaatgctttggggaagtagtttcaggtcgactttgttcttctaagttacgtctattaatcgtgttaatatgcccttatttcttaattattatactctgctggaggcgtcgatgtcgtcaccagattgtcgttatctgctatgttctatcggaccttcgcagcatttaacggtgactgttggcccgttgcttgtcctcgaagttttctgttgcgacgtt

SEQ ID NO: 52658 - DNA, 1376 bp, Zea Mays
cgaggagctcgtcgcggcgggccgctccgacctcgcggatgccgtcgcgtccagcgggggctggctctccctcggctggtcctccaccgccgcggaggggcccgcgacgatggctgcgccgcgctcatcgggcgggggccaccctgactacccgcccgagacgggcgtgtattaccgtggtgacctagcgccgggctcagtggatgactccgagtgggaggaggaggaggaggacgacgacgaagaggaggcgtcatcatctgggcgggagccggaaacagaggagaccaggttcaaatcaggaatcgaggggatgctcaccaggctgcagaaggatagggagcaagcgcggccacctccacggagtagtacccacgacacacgggaacaaagtgatgatgatgctttagctggcaacagtggcgctcctagtcatatagcggctggcggcagacatattcgaagggtacctgagaatggaagtgtccgtggatctcattatcaaaatggaataatagagggcaacaacaccttagagagttcgagcaatgatgcatggaaaacatggacccttggcaagggtggtttatctcattttgaagtggctgaggtcctacctactgaaagaagaaaattatcccaacatggtgacattgcatctgtgcaaaatgatgttcaaaggtcatctaatggtgtggctgtaagtgattatcctagtgatggtgttggcactgaaagagatgagatacattcacgtcttcaaagtctggaattggacctttcttctgctctgaagacattaagatcaagatttgataaagtcttatcacatatgtcaaatagtaatggagcaactgtgctagatgacatctctgatgattgggaacttgaggagacaaaggtaatgcaagctcaggaggagcttagatcaatccgggccaaaatagctgtgttagaagggaagatcgcacttgagataattgaaaggaacaaaataattgaagataaacaaaggaggcttgatgaagttgagaaagcactgaatgagctccgtactgtttgtattatgtgggccaaccctgctacagatgttttgctggttgggtcctttgatggctggacaagccaaagaaagttggaaagatcagaaaacggcatgttttccttaaatctgagactgtaccctggtagatatgaggagttacattatcgtcgttctaacccccacatagaatgcagctaagaatcgccggggggattttgtttacggtgggaagggatttcttccagtgaaggtacggcattcgtttatccaggtctgcgtcactgaagtgctgaaggcatgtcatcggagtaaatgcttgtaatcataagct

SEQ ID NO: 52659 - DNA, 1789 bp, Zea Mays
ccttccccacccgcgaggagctcgtcgcggcgggccgctccgacctcgcggatgccgtcgcgtccagcgggggctggctctccctcggctggtcctccaccgccgcggaggggcccgcgacgatggctgcgccgcgctcatcgggcgggggccaccctgactacccgcccgagacgggcgtgtattaccgtggtgacctagcgccgggctcagtggatgactccgagtgggaggaggaggaggaggacgacgacgaagaggaggcgtcatcatctgggcgggagccggaaacagaggagaccaggttcaaatcaggaatcgaggggatgctcaccaggctgcagaaggatagggagcaagcgcggccacctccacggagtagtacccacgacacacgggaacaaagtgatgatgatgctttagctggcaacagtggcgctcctagtcatatagcggctggcggcagacatattcgaagggtacctgagaatggaagtgtccgtggatctcattatcaaaatggaataatagagggcaacaacaccttagagagttcgagcaatgatgcatggaaaacatggacccttggcaagggtggtttatctcattttgaagtggctgaggtcctacctactgaaagaagaaaattatcccaacatggtgacattgcatctgtgcaaaatgatgttcaaaggtcatctaatggtgtggctgtaagtgattatcctagtgatggtgttggcactgaaagagatgagatacattcacgtcttcaaagtctggaattggacctttcttctgctctgaagacattaagatcaagatttgataaagtcttatcacatatgtcaaatagtaatggagcaactgtgctagatgacatctctgatgattgggaacttgaggagacaaaggtaatgcaagctcaggaggagcttagatcaatccgggccaaaatagctgtgttagaagggaagatcgcacttgagataattgaaaggaacaaaataattgaagataaacaaaggaggcttgatgaagttgagaaagcactgaatgagctccgtactgtttgtattatgtgggccaaccctgctacagatgttttgctggttgggtcctttgatggctggacaagccaaagaaagttggaaagatcagaaaacggcatgttttccttaaatctgagactgtaccctggtagatatgagattaagtttatcgttgacggtgtttggaagaatgatccgctgcgacccaccgtgcataacaatgggcatgaaaacaaccttctgcttgtcacttgacttgaagtttgcacccggtagcatttttgtagatcatttgcctagcaccttgtcggtcccccatgtaactaatcaactttcccttcaattttttctttcttttctagataggtgtgtgcaacataaacagtgtagggtgttattgaaacctgttgagataggagaaggaagtagatgcatattcttttgttcccatcgttctccccggtgttggtccagcttcatgattttgtttaacaatgttgtgatgtacatatgcagtgaggtggtctattatcgaaattatttcaaaatttgtttgcaggagttacattatcgtcgttctaacccccacatagaatgcagctaagaatcgccggggggattttgtttacggtgggaagggatttcttccagtgaaggtacggcattcgtttatccaggtctgcgtcactgaagtgctgaaggcatgtcatcggagtaaatgcttgtaatcataagct

SEQ ID NO: 52660 - DNA, 1555 bp, Zea Mays
cgattcgcacgaggcgcagagcgcgggggattggtattggctggccaccgcctgtagccctctcctgatcttcctctcgcctccctcctctgcctctgcgcttcacttcaattctcctcctcgccgagcgggagcgccgagagagatgcgaccgcgatgcccccactcgtcccctcccagctcctaccaccaatcccaaccctgatcctacccgcgccacctcgcctctcctgccgccgccgccgccacccgcccgcaccgctcgccgcgtcgtcgtcctcctccgcgtccccgcactccaggcaaccataccgccgccgccgccttgaagcccagcggcagacaccgacgcctgcgccgcgcccgccctcccagccaaagccgcctccgcgccacgcaaatgccaccgcgtcccgcgctcggggccaggaggagctggaggcggcgatttacgacttcatgtgccgctccgccaagccgggagccggaaacagaggagaccaggttcaaatcaggaatcgaggggatgctcaccaggctgcagaaggatagggagcaagcgcggccacctccacggagtagtacccacgacacacgggaacaaagtgatgatgatgctttagctggcaacagtggcgctcctagtcatatagcggctggcggcagacatattcgaagggtacctgagaatggaagtgtccgtggatctcattatcaaaatggaataatagagggcaacaacaccttagagagttcgagcaatgatgcatggaaaacatggacccttggcaagggtggtttatctcattttgaagtggctgaggtcctacctactgaaagaagaaaattatcccaacatggtgacattgcatctgtgcaaaatgatgttcaaaggtcatctaatggtgtggctgtaagtgattatcctagtgatggtgttggcactgaaagagatgagatacattcacgtcttcaaagtctggaattggacctttcttctgctctgaagacattaagatcaagatttgataaagtcttatcacatatgtcaaatagtaatggagcaactgtgctagatgacatctctgatgattgggaacttgaggagacaaaggtaatgcaagctcaggaggagcttagatcaatccgggccaaaatagctgtgttagaagggaagatcgcacttgagataattgaaaggaacaaaataattgaagataaacaaaggaggcttgatgaagttgagaaagcactgaatgagctccgtactgtttgtattatgtgggccaaccctgctacagatgttttgctggttgggtcctttgatggctggacaagccaaagaaagttggaaagatcagaaaacggcatgttttccttaaatctgagactgtaccctggtagatatgagaatgcagctaagaatcgccggggggattttgtttacggtgggaagggatttcttccagtgaaggtacggcattcgtttatccaggtctgcgtcactgaagtgctgaaggcatgtcatcggagtaaatgcttgtaatcataagct

SEQ ID NO: 52661 - DNA, 1423 bp, Zea Mays
ccttccccacccgcgaggagctcgtcgcggcgggccgctccgacctcgcggatgccgtcgcgtccagcgggggctggctctccctcggctggtcctccaccgccgcggaggggcccgcgacgatggctgcgccgcgctcatcgggcgggggccaccctgactacccgcccgagacgggcgtgtattaccgtggtgacctagcgccgggctcagtggatgactccgagtgggaggaggaggaggaggacgacgacgaagaggaggcgtcatcatctgggcgggagccggaaacagaggagaccaggttcaaatcaggaatcgaggggatgctcaccaggctgcagaaggatagggagcaagcgcggccacctccacggagtagtacccacgacacacgggaacaaagtgatgatgatgctttagctggcaacagtggcgctcctagtcatatagcggctggcggcagacatattcgaagggtacctgagaatggaagtgtccgtggatctcattatcaaaatggaataatagagggcaacaacaccttagagagttcgagcaatgatgcatggaaaacatggacccttggcaagggtggtttatctcattttgaagtggctgaggtcctacctactgaaagaagaaaattatcccaacatggtgacattgcatctgtgcaaaatgatgttcaaaggtcatctaatggtgtggctgtaagtgattatcctagtgatggtgttggcactgaaagagatgagatacattcacgtcttcaaagtctggaattggacctttcttctgctctgaagacattaagatcaagatttgataaagtcttatcacatatgtcaaatagtaatggagcaactgtgctagatgacatctctgatgattgggaacttgaggagacaaaggtaatgcaagctcaggaggagcttagatcaatccgggccaaaatagctgtgttagaagggaagatcgcacttgagataattgaaaggaacaaaataattgaagataaacaaaggaggcttgatgaagttgagaaagcactgaatgagctccgtactgtttgtattatgtgggccaaccctgctacagatgttttgctggttgggtcctttgatggctggacaagccaaagaaagttggaaagatcagaaaacggcatgttttccttaaatctgagactgtaccctggtagatatgagattaagtttatcgttgacggtgtttggaagaatgatccgctgcgacccaccgtgcataacaatgggcatgaaaacaaccttctgcttgtcacttgacttgaagtttgcacccggtagcatttttgtagatcatttgcctagcaccttgtcggtcccccatgagttacattatcgtcgttctaacccccacatagaatgcagctaagaatcgc

SEQ ID NO: 52662 - DNA, 1588 bp, Zea Mays
attggctggccaccgcctgtagccctctcctgatcttcctctcgcctccctcctctgcctctgcgcttcacttcaattctcctcctcgccgagcgggagcgccgagagagatgcgaccgcgatgcccccactcgtcccctcccagctcctaccaccaatcccaaccctgatcctacccgcgccacctcgcctctcctgccgccgccgccgccacccgcccgcaccgctcgccgcgtcgtcgtcctcctccgcgtccccgcactccaggcaaccataccgccgccgccgccttgaagcccagcggcagacaccgacgcctgcgccgcgcccgccctcccagccaaagccgcctccgcgccacgcaaatgccaccgcgtcccgcgctcggggccaggaggagctggaggcggcgatttacgacttcatgtgccgctccgccaagccgggagccggaaacagaggagaccaggttcaaatcaggaatcgaggggatgctcaccaggctgcagaaggatagggagcaagcgcggccacctccacggagtagtacccacgacacacgggaacaaagtgatgatgatgctttagctggcaacagtggcgctcctagtcatatagcggctggcggcagacatattcgaagggtacctgagaatggaagtgtccgtggatctcattatcaaaatggaataatagagggcaacaacaccttagagagttcgagcaatgatgcatggaaaacatggacccttggcaagggtggtttatctcattttgaagtggctgaggtcctacctactgaaagaagaaaattatcccaacatggtgacattgcatctgtgcaaaatgatgttcaaaggtcatctaatggtgtggctgtaagtgattatcctagtgatggtgttggcactgaaagagatgagatacattcacgtcttcaaagtctggaattggacctttcttctgctctgaagacattaagatcaagatttgataaagtcttatcacatatgtcaaatagtaatggagcaactgtgctagatgacatctctgatgattgggaacttgaggagacaaaggtaatgcaagctcaggaggagcttagatcaatccgggccaaaatagctgtgttagaagggaagatcgcacttgagataattgaaaggaacaaaataattgaagataaacaaaggaggcttgatgaagttgagaaagcactgaatgagctccgtactgtttgtattatgtgggccaaccctgctacagatgttttgctggttgggtcctttgatggctggacaagccaaagaaagttggaaagatcagaaaacggcatgttttccttaaatctgagactgtaccctggtagatatgagattaagtttatcgttgacggtgtttggaagaatgatccgctgcgacccaccgtgcataacaatgggcatgaaaacaaccttctgcttgtcacttgacttgaagtttgcacccggtagcatttttgtagatcatttgcctagcaccttgtcggtcccccatgagttacattatcgtcgttctaacccccacatagaatgcagctaagaatcgc

SEQ ID NO: 52663 - DNA, 1848 bp, Zea Mays
attggctggccaccgcctgtagccctctcctgatcttcctctcgcctccctcctctgcctctgcgcttcacttcaattctcctcctcgccgagcgggagcgccgagagagatgcgaccgcgatgcccccactcgtcccctcccagctcctaccaccaatcccaaccctgatcctacccgcgccacctcgcctctcctgccgccgccgccgccacccgcccgcaccgctcgccgcgtcgtcgtcctcctccgcgtccccgcactccaggcaaccataccgccgccgccgccttgaagcccagcggcagacaccgacgcctgcgccgcgcccgccctcccagccaaagccgcctccgcgccacgcaaatgccaccgcgtcccgcgctcggggccaggaggagctggaggcggcgatttacgacttcatgtgccgctccgccaagccgggagccggaaacagaggagaccaggttcaaatcaggaatcgaggggatgctcaccaggctgcagaaggatagggagcaagcgcggccacctccacggagtagtacccacgacacacgggaacaaagtgatgatgatgctttagctggcaacagtggcgctcctagtcatatagcggctggcggcagacatattcgaagggtacctgagaatggaagtgtccgtggatctcattatcaaaatggaataatagagggcaacaacaccttagagagttcgagcaatgatgcatggaaaacatggacccttggcaagggtggtttatctcattttgaagtggctgaggtcctacctactgaaagaagaaaattatcccaacatggtgacattgcatctgtgcaaaatgatgttcaaaggtcatctaatggtgtggctgtaagtgattatcctagtgatggtgttggcactgaaagagatgagatacattcacgtcttcaaagtctggaattggacctttcttctgctctgaagacattaagatcaagatttgataaagtcttatcacatatgtctgttgtttactttttcagtcaaatagtaatggagcaactgtgctagatgacatctctgatgattgggaacttgaggagacaaaggtaatgcaagctcaggaggagcttagatcaatccgggccaaaatagctgtgttagaagggaagatcgcacttgagataattgaaaggaacaaaataattgaagataaacaaaggaggcttgatgaagttgagaaagcactgaatgagctccgtactgtttgtattatgtgggccaaccctgctacagatgttttgctggttgggtcctttgatggctggacaagccaaagaaagttggaaagatcagaaaacggcatgttttccttaaatctgagactgtaccctggtagatatgagattaagtttatcgttgacggtgtttggaagaatgatccgctgcgacccaccgtgcataacaatgggcatgaaaacaaccttctgcttgtcacttgacttgaagtttgcacccggtagcatttttgtagatcatttgcctagcaccttgtcggtcccccatgtaactaatcaactttcccttcaattttttctttcttttctagataggtgtgtgcaacataaacagtgtagggtgttattgaaacctgttgagataggagaaggaagtagatgcatattcttttgttcccatcgttctccccggtgttggtccagcttcatgattttgtttaacaatgttgtgatgtacatatgcagtgaggtggtctattatcgaaattatttcaaaatttgtttgcaggagttacattatcgtcgttctaacccccacatagaatgcagctaagaatcgc

SEQ ID NO: 52664 - DNA, 824 bp, Zea Mays
gggccgctccgacctcgcggatgccgtcgcgtccagcgggggctggctctccctcggctggtcctccaccgccgcggaggggcccgcgacgatggctgcgccgcgctcatcgggcgggggccaccctgactacccgcccgagacgggcgtgtattaccgtggtgacctagcgccgggctcagtggatgactccgagtgggaggaggaggaggaggacgacgacgaagaggaggcgtcatcatctgggcgggagccggaaacagaggagaccaggttcaaatcaggaatcgaggggatgctcaccaggctgcagaaggatagggagcaagcgcggccacctccacggagtagtacccacgacacacgggaacaaagtgatgatgatgctttagctggcaacagtggcgctcctagtcatatagcggctggcggcagacatattcgaagggtacctgagaatggaagtgtccgtggatctcattatcaaaatggaataatagagggcaacaacaccttagagagttcgagcaatgatgcatggaaaacatggacccttggcaagggtggtttatctcattttgaagtggctgaggtcctacctactgaaagaagaaaattatcccaacatggtgacattgcatctgtgcaaaatgatgttcaaaggtcatctaatggtgtggctgtaagtgattatcctagtgatggtgttggcactgaaagagatgagatacattcacgtcttcaaagtctggaattggacctttcttctgctctgaagacattaagatcaagatttgataaagtcttatcacatatgtctgttg

SEQ ID NO: 52665 - DNA, 1600 bp, Zea Mays
gcctgcaaattttaaaatcaaatcccccgggaaggaggaggaggacgaagaacgcaaatggcgtgacgcatctcgcctgccgagcgagattgcttttgggatgacgatgctactagcgtaccaacccagcagctcaggggatcagatcacgcccaagggcgtgcgggtagcgcccaagcccaagcgcacgcaatcgcccgcgcgaaccacgcttttgtcagagacgtgcctcgacgcgtgaggacgtactgacctcttctcctaattattacttggttctatgttaataacactcgcaacttcaaagagctcttacactgtcgctgtccctgtggtccgagagccagagccttggatttggattgctcttgtggccgcgaagtcttccgtcgtcgtactcgtacgcaggaacaggagacaccaattgtttagcagtggaatcctaggaggttcccaatatcgtactacaaacagaagggggacagtctgtgtgcacatgaatcaattacttggcgtgttcccgaagaaaacgttttagttgcgtccatcggccctgtcggtggtggggcgccgatgccaggcagacttgcacgcgtccacgttacgcacacgtacctctaaactcctgtggctactacacttccgtcttaactcctgaagctgtttgattgcggcacgcagatcctgtgccgggcgctgggcgggcgcacggggcggtcggccaagggctgggacatcggggtgagctgcatccacccgacggcggcggcggcgcggctgttcgcgccgctgaagctgcccgtgcacatgccggtgatcgagttccaccaggacgaggtgtgggagctgccccccggcgccgaggcgctggcgcggtccgacaagacccgcgtcgagatgttccgcctcggcggccgcgccatgggcgtccagggccacccggagtacagcaaggacgtcctcatgagcatcgccgaccgcctcctccgccacaaccacatactggactgccaggtggaagtggccaagacgagcttcgacgtgcggcagccggacaaggagctgtggagcaaggtgtgcaggggcttcctcaagggaaggctccagtcgtcgcagcagcaaggactgccaggtggaagtggccaagacgagcttcgacgtgcggcagccggacaaggagctgtggagcaaggtgtgcaggggcttcctcaagggaaggctccagtcgtcgcagcagcaaggtgtggcgctatagcaggaggaaattgggggggcattggatgcctaggttaatccgtcatattgtttgttttttatatatcaagagttgtacagaaactgctatcgtcgtccgaagcattaataaaaaaaaggagggaaaaaatagttcgttggtttggttccatctttccgtggcaccagttcattctcgtagtgcctttgcatccacttcttttctttgtaacacacgttgcatatgctgcttgcatcttcggctcatttgtggactcaaacaaaacgactacgacagcgctgtccgcttaccgtcggggtatctgtcgttggaactgatttttacggaggacaaaaaaaaatacaa

SEQ ID NO: 52666 - DNA, 1424 bp, Zea Mays
ctccccccatcctccccgccacctctcaccccccgcaagcgagtcagccaagccaagcgacgcccaacccccgcctccattcccgggccggagacgcgcctgcctggccgcgacgccgccagccatgggaatggggccgctcgacaacgccgcgtcggccgcgctggaggccgccgccgccgccgccgccgccccctcgcgggcgggctcgtacgcggtgctgcagtgcggcgaggactcggagtacgtgcggcagaagtacggcggctacttcgccgtcttccgcgcgctgctggaggaggacggcgagaggtggcgggtgtacagcgccgtccgcggggagctccccgccgacgccgaggcagccgggttcgacgggttcgtcatctccgggagctgcgccgacgcgcacggcgacgagccctggatcctcgcgctcgtcgacctcacccgccgcgtccacgccgccggcaagcgcgtcctcggcgtctgcttcggccaccagatcctgtgccgggcgctgggcgggcgcacggggcggtcggccaagggctgggacatcggggtgagctgcatccacccgacggcggcggcggcgcggctgttcgcgccgctgaagctgcccgtgcacatgccggtgatcgagttccaccaggacgaggtgtgggagctgccccccggcgccgaggcgctggcgcggtccgacaagacccgcgtcgagatgttccgcctcggcggccgcgccatgggcgtccagggccacccggagtacagcaaggacgtcctcatgagcatcgccgaccgcctcctccgccacaaccacatactggactgccaggtggaagtggccaagacgagcttcgacgtgcggcagccggacaaggagctgtggagcaaggtgtgcaggggcttcctcaagggaaggctccagtcgtcgcagcagcaaggactgccaggtggaagtggccaagacgagcttcgacgtgcggcagccggacaaggagctgtggagcaaggtgtgcaggggcttcctcaagggaaggctccagtcgtcgcagcagcaaggtgtggcgctatagcaggaggaaattgggggggcattggatgcctaggttaatccgtcatattgtttgttttttatatatcaagagttgtacagaaactgctatcgtcgtccgaagcattaataaaaaaaaggagggaaaaaatagttcgttggtttggttccatctttccgtggcaccagttcattctcgtagtgcctttgcatccacttcttttctttgtaacacacgttgcatatgctgcttgcatcttcggctcatttgtggactcaaacaaaacgactacgacagcgctgtccgcttaccgtcggggtatctgtcgttggaactgatttttacggaggacaaaaaaaaatacaa

SEQ ID NO: 52667 - DNA, 1415 bp, Zea Mays
ctccccccatcctccccgccacctctcaccccccgcaagcgagtcagccaagccaagcgacgcccaacccccgcctccattcccgggccggagacgcgcctgcctggccgcgacgccgccagccatgggaatggggccgctcgacaacgccgcgtcggccgcgctggaggccgccgccgccgccgccgccgccccctcgcgggcgggctcgtacgcggtgctgcagtgcggcgaggactcggagtacgtgcggcagaagtacggcggctacttcgccgtcttccgcgcgctgctggaggaggacggcgagaggtggcgggtgtacagcgccgtccgcggggagctccccgccgacgccgaggcagccgggttcgacgggttcgtcatctccgggagctgcgccgacgcgcacggcgacgagccctggatcctcgcgctcgtcgacctcacccgccgcgtccacgccgccggcaagcgcgtcctcggcgtctgcttcggccaccagatcctgtgccgggcgctgggcgggcgcacggggcggtcggccaagggctgggacatcggggtgagctgcatccacccgacggcggcggcggcgcggctgttcgcgccgctgaagctgcccgtgcacatgccggtgatcgagttccaccaggacgaggtgtgggagctgccccccggcgccgaggcgctggcgcggtccgacaagacccgcgtcgagatgttccgcctcggcggccgcgccatgggcgtccagggccacccggagtacagcaaggacgtcctcatgagcatcgccgaccgcctcctccgccacaaccacatactggtggaagtggccaagacgagcttcgacgtgcggcagccggacaaggagctgtggagcaaggtgtgcaggggcttcctcaagggaaggctccagtcgtcgcagcagcaaggactgccaggtggaagtggccaagacgagcttcgacgtgcggcagccggacaaggagctgtggagcaaggtgtgcaggggcttcctcaagggaaggctccagtcgtcgcagcagcaaggtgtggcgctatagcaggaggaaattgggggggcattggatgcctaggttaatccgtcatattgtttgttttttatatatcaagagttgtacagaaactgctatcgtcgtccgaagcattaataaaaaaaaggagggaaaaaatagttcgttggtttggttccatctttccgtggcaccagttcattctcgtagtgcctttgcatccacttcttttctttgtaacacacgttgcatatgctgcttgcatcttcggctcatttgtggactcaaacaaaacgactacgacagcgctgtccgcttaccgtcggggtatctgtcgttggaactgatttttacggaggacaaaaaaaaatacaa

SEQ ID NO: 52668 - DNA, 1823 bp, Zea Mays
ctccccccatcctccccgccacctctcaccccccgcaagcgagtcagccaagccaagcgacgcccaacccccgcctccattcccgggccggagacgcgcctgcctggccgcgacgccgccagccatgggaatggggccgctcgacaacgccgcgtcggccgcgctggaggccgccgccgccgccgccgccgccccctcgcgggcgggctcgtacgcggtgctgcagtgcggcgaggactcggagtacgtgcggcagaagtacggcggctacttcgccgtcttccgcgcgctgctggaggaggacggcgagaggtggcgggtgtacagcgccgtccgcggggagctccccgccgacgccgaggcagccgggttcgacgggttcgtcatctccgggagctgcgccgacgcgcacggcgacgagccctggatcctcgcgctcgtcgacctcacccgccgcgtccacgccgccggcaagcgcgtcctcggcgtctgcttcggccaccagatcctgtgccgggcgctgggcgggcgcacggggcggtcggccaagggctgggacatcggggtgagctgcatccacccgacggcggcggcggcgcggctgttcgcgccgctgaagctgcccgtgcacatgccggtgatcgagttccaccaggacgaggtgtgggagctgccccccggcgccgaggcgctggcgcggtccgacaagacccgcgtcgagatgttccgcctcggcggccgcgccatgggcgtccagggccacccggagtacagcaaggacgtcctcatgagcatcgccgaccgcctcctccgccacaaccacatactggactgccaggtggaagtggccaagacgagcttcgacgtgcggcagccggacaaggagctgtggagcaaggtgtgcaggggcttcctcaagggaaggctccagtcgtcgcagcagcaaggtgtggcgctatagcaggaggaaattggggggcattggatgcctaggttaatccgtcatattgtttgttttttattatatgtgcttcagaactcaagagttgtacagaaactgctatcttcgtccgaagcattaataaaaaaaaaggagggaaaaaattgttcgttggtttggttccatctttccgtggcaccagttcattctcgtagtgcctttgcatccacttcttttctttttaacacaccttgcatatgctgctttcatcttcggctcatttgtggactcaaactaaacgactacgacagcgctgtccgcttaccgtcggggtatctgtcgttggagctgatttttacggaggacaaaaaaaaatatctgtccttgttttgtttgttgttggcaggactgccaggtggaagtggccaagacgagcttcgacgtgcggcagccggacaaggagctgtggagcaaggtgtgcaggggcttcctcaagggaaggctccagtcgtcgcagcagcaaggtgtggcgctatagcaggaggaaattgggggggcattggatgcctaggttaatccgtcatattgtttgttttttatatatcaagagttgtacagaaactgctatcgtcgtccgaagcattaataaaaaaaaggagggaaaaaatagttcgttggtttggttccatctttccgtggcaccagttcattctcgtagtgcctttgcatccacttcttttctttgtaacacacgttgcatatgctgcttgcatcttcggctcatttgtggactcaaacaaaacgactacgacagcgctgtccgcttaccgtcggggtatctgtcgttggaactgatttttacggaggacaaaaaaaaatacaa

SEQ ID NO: 52669 - DNA, 857 bp, Zea Mays
ttgcaaaaacaaaacatgtggtgcaagcgtggtccaaaataatatataagaaagaaacaatccctgcatatcttgttgctgcacaagctgtgcagtccgaataaaatcaggacagataaggcagcctgaagcacttgggatatctgcagaactaaaagataagggctatgctttgttgtgtgttggtttcccatctggcgatgttgaagtcgagactcaagatgaagatgaggtatattggctccaattcgggagatactttgcacgagggccagtggaaagagatgattacgcgctagaacttgcaatgggagacgaatgagctgtgcctaagagaccttgccatctaaaatttgaataccatctcaaatttggacccatgtagttctgagtatgccggttatctttttgtggctccaaatctcactctcagccttctttccttcggctgttagcgtttagagtgacaaggacacttcctgagaggaggaataaagttctgctctgctctctattttccaggttgcccccttcccgcctttccttgttcggttgtcacttattagcctggtgcgttgctgcgtgcagttctcgtttctcctctaatagatggcacacgttatgaagtgtgtaaaggtgtcaaaatccaaaaacatccagcattcacaatctttgtcgtgatgaagtgtgtaaacttgtaaaaaattatccaaaatctttaccatgaagctacgagtggctaactagggctggttgaagttgttccaagctgttgtgtcgctagggtatatttagttcgccatcttatcatactttatctaacttttttttactaaccttagataaattgtaaattg

SEQ ID NO: 52670 - DNA, 815 bp, Zea Mays
ctccaataaaggaccttgtctttggggagagagttgctgcacaagctgtgcagtccgaataaaatcaggacagataaggcagcctgaagcacttgggatatctgcagaactaaaagataagggctatgctttgttgtgtgttggtttcccatctggcgatgttgaagtcgagactcaagatgaagatgaggtatattggctccaattcgggagatactttgcacgagggccagtggaaagagatgattacgcgctagaacttgcaatgggagacgaatgagctgtgcctaagagaccttgccatctaaaatttgaataccatctcaaatttggacccatgtagttctgagtatgccggttatctttttgtggctccaaatctcactctcagccttctttccttcggctgttagcgtttagagtgacaaggacacttcctgagaggaggaataaagttctgctctgctctctattttccaggttgcccccttcccgcctttccttgttcggttgtcacttattagcctggtgcgttgctgcgtgcagttctcgtttctcctctaatagatggcacacgttatgaagtgtgtaaaggtgtcaaaatccaaaaacatccagcattcacaatctttgtcgtgatgaagtgtgtaaacttgtaaaaaattatccaaaatctttaccatgaagctacgagtggctaactagggctggttgaagttgttccaagctgttgtgtcgctagggtatatttagttcgccatcttatcatactttatctaacttttttttactaaccttagataaattgtaaattg

SEQ ID NO: 52671 - DNA, 794 bp, Zea Mays
cgaggaatgaggttgctgcacaagctgtgcagtccgaataaaatcaggacagataaggcagcctgaagcacttgggatatctgcagaactaaaagataagggctatgctttgttgtgtgttggtttcccatctggcgatgttgaagtcgagactcaagatgaagatgaggtatattggctccaattcgggagatactttgcacgagggccagtggaaagagatgattacgcgctagaacttgcaatgggagacgaatgagctgtgcctaagagaccttgccatctaaaatttgaataccatctcaaatttggacccatgtagttctgagtatgccggttatctttttgtggctccaaatctcactctcagccttctttccttcggctgttagcgtttagagtgacaaggacacttcctgagaggaggaataaagttctgctctgctctctattttccaggttgcccccttcccgcctttccttgttcggttgtcacttattagcctggtgcgttgctgcgtgcagttctcgtttctcctctaatagatggcacacgttatgaagtgtgtaaaggtgtcaaaatccaaaaacatccagcattcacaatctttgtcgtgatgaagtgtgtaaacttgtaaaaaattatccaaaatctttaccatgaagctacgagtggctaactagggctggttgaagttgttccaagctgttgtgtcgctagggtatatttagttcgccatcttatcatactttatctaacttttttttactaaccttagataaattgtaaattg

SEQ ID NO: 52672 - DNA, 656 bp, Zea Mays
gtaggttgctgcacaagctgtgcagtccgaataaaatcaggacagataaggcagcctgaagcacttgggatatctgcagaactaaaagataagggctatgctttgttgtgtgttggtttcccatctggcgatgttgaagtcgagactcaagatgaagatgaggtatattggctccaattcgggagatactttgcacgagggccagtggaaagagatgattacgcgctagaacttgcaatgggagacgaatgagctgtgcctaagagaccttgccatctaaaatttgaataccatctcaaatttggacccatgtagttctgagttgcccccttcccgcctttccttgttcggttgtcacttattagcctggtgcgttgctgcgtgcagttctcgtttctcctctaatagatggcacacgttatgaagtgtgtaaaggtgtcaaaatccaaaaacatccagcattcacaatctttgtcgtgatgaagtgtgtaaacttgtaaaaaattatccaaaatctttaccatgaagctacgagtggctaactagggctggttgaagttgttccaagctgttgtgtcgctagggtatatttagttcgccatcttatcatactttatctaacttttttttactaaccttagataaattgtaaattg

SEQ ID NO: 52673 - DNA, 1334 bp, Zea Mays
gtcgcgctagaattcagtctcgtcttgctcgctcacgcagttggcactcgtcgcggcagtcggcgctgtcccctcccctcccctcccgccggtcgctgcagtcggcgcccaacccgtccctccgtccgccagagcacatctcacgctgcgggtcgaacagcccgaacgtcaatcaggtttcaggccgacggcggcacgatgacctgccccgccgccaccgccaccgccaccacggctcgcatcggggcgcggagaggaccgtgcctgtggaggagcgagaggagggccagcttcctcgtccgttccacgtccctgctcccggaccgcccggcccgggacacgagggcgcgcgccgcctcggagctgcagcaagcgcctcgaccagcctccgctaccgtccccgctcacaaggtcaccgtccacgaccgccagcgcggggtcatccacgaattcgtcgtgcccgaggaccagtacattctgcacacggcggaggcgcaggacatcaggctgccgttcgcgtgccgccacggttgctgcacaagctgtgcagtccgaataaaatcaggacagataaggcagcctgaagcacttgggatatctgcagaactaaaagataagggctatgctttgttgtgtgttggtttcccatctggcgatgttgaagtcgagactcaagatgaagatgagcatgttgtttgtcaatttgcaggtatattggctccaattcgggagatactttgcacgagggccagtggaaagagatgattacgcgctagaacttgcaatgggagacgaatgagctgtgcctaagagaccttgccatctaaaatttgaataccatctcaaatttggacccatgtagttctgagtatgccggttatctttttgtggctccaaatctcactctcagccttctttccttcggctgttagcgtttagagtgacaaggacacttcctgagaggaggaataaagttctgctctgctctctattttccaggttgcccccttcccgcctttccttgttcggttgtcacttattagcctggtgcgttgctgcgtgcagttctcgtttctcctctaatagatggcacacgttatgaagtgtgtaaaggtgtcaaaatccaaaaacatccagcattcacaatctttgtcgtgatgaagtgtgtaaacttgtaaaaaattatccaaaatctttaccatgaagctacgagtggctaactagggctggttgaagttgttccaagctgttgtgtcgctagggtatatttagttcgccatcttatcatactttatctaacttttttttactaaccttagataaattgtaaattg

SEQ ID NO: 52674 - DNA, 1308 bp, Zea Mays
gcgtcgcgctagaattcagtctcgtcttgctcgctcacgcagttggcactcgtcgcggcagtcggcgctgtcccctcccctcccctcccgccggtcgctgcagtcggcgcccaacccgtccctccgtccgccagagcacatctcacgctgcgggtcgaacagcccgaacgtcaatcaggtttcaggccgacggcggcacgatgacctgccccgccgccaccgccaccgccaccacggctcgcatcggggcgcggagaggaccgtgcctgtggaggagcgagaggagggccagcttcctcgtccgttccacgtccctgctcccggaccgcccggcccgggacacgagggcgcgcgccgcctcggagctgcagcaagcgcctcgaccagcctccgctaccgtccccgctcacaaggtcaccgtccacgaccgccagcgcggggtcatccacgaattcgtcgtgcccgagtacattctgcacacggcggaggcgcaggacatcaggctgccgttcgcgtgccgccacggttgctgcacaagctgtgcagtccgaataaaatcaggacagataaggcagcctgaagcacttgggatatctgcagaactaaaagataagggctatgctttgttgtgtgttggtttcccatctggcgatgttgaagtcgagactcaagatgaagatgaggtatattggctccaattcgggagatactttgcacgagggccagtggaaagagatgattacgcgctagaacttgcaatgggagacgaatgagctgtgcctaagagaccttgccatctaaaatttgaataccatctcaaatttggacccatgtagttctgagtatgccggttatctttttgtggctccaaatctcactctcagccttctttccttcggctgttagcgtttagagtgacaaggacacttcctgagaggaggaataaagttctgctctgctctctattttccaggttgcccccttcccgcctttccttgttcggttgtcacttattagcctggtgcgttgctgcgtgcagttctcgtttctcctctaatagatggcacacgttatgaagtgtgtaaaggtgtcaaaatccaaaaacatccagcattcacaatctttgtcgtgatgaagtgtgtaaacttgtaaaaaattatccaaaatctttaccatgaagctacgagtggctaactagggctggttgaagttgttccaagctgttgtgtcgctagggtatatttagttcgccatcttatcatactttatctaacttttttttactaaccttagataaattgtaaattg

SEQ ID NO: 52675 - DNA, 1189 bp, Zea Mays
gtcgcggcgtcgcgctagaattcagtctcgtcttgctcgctcacgcagttggcactcgtcgcggcagtcggcgctgtcccctcccctcccctcccgccggtcgctgcagtcggcgcccaacccgtccctccgtccgccagagcacatctcacgctgcgggtcgaacagcccgaacgtcaatcaggtttcaggccgacggcggcacgatgacctgccccgccgccaccgccaccgccaccacggctcgcatcggggcgcggagaggaccgtgcctgtggaggagcgagaggagggccagcttcctcgtccgttccacgtccctgctcccggaccgcccggcccgggacacgagggcgcgcgccgcctcggagctgcagcaagcgcctcgaccagcctccgctaccgtccccgctcacaaggtcaccgtccacgaccgccagcgcggggtcatccacgaattcgtcgtgcccgaggaccagtacattctgcacacggcggaggcgcaggacatcaggctgccgttcgcgtgccgccacggttgctgcacaagctgtgcagtccgaataaaatcaggacagataaggcagcctgaagcacttgggatatctgcagaactaaaagataagggctatgctttgttgtgtgttggtttcccatctggcgatgttgaagtcgagactcaagatgaagatgaggtatattggctccaattcgggagatactttgcacgagggccagtggaaagagatgattacgcgctagaacttgcaatgggagacgaatgagctgtgcctaagagaccttgccatctaaaatttgaataccatctcaaatttggacccatgtagttctgagttgcccccttcccgcctttccttgttcggttgtcacttattagcctggtgcgttgctgcgtgcagttctcgtttctcctctaatagatggcacacgttatgaagtgtgtaaaggtgtcaaaatccaaaaacatccagcattcacaatctttgtcgtgatgaagtgtgtaaacttgtaaaaaattatccaaaatctttaccatgaagctacgagtggctaactagggctggttgaagttgttccaagctgttgtgtcgctagggtatatttagttcgccatcttatcatactttatctaacttttttttactaaccttagataaattgtaaattg

SEQ ID NO: 52676 - DNA, 2205 bp, Zea Mays
gcagatatgcccactggcatattcttgcataccagaccatctaagccaatgcacaaatttaaaggcaaacaactagcttttcaatggtaacaacatttaagtctgagctgctggttagctgatctcctaggtcaaaccagtttgtcttcccaaaattgcaatgcaaagcatggagggggctgaaagcaatatcacacagacaatggatcaaagggtccacactggtgaggctagcaacaaatttctgttccagcatttgtccttcaagtgcccataaatgataactgaatactgtataaattaccagtatgcaaattttaaccctaaacaaaagtcagcttccattaccggagcacggaaacagttactgccctcaaggctcaaacaataacagcactggtaaaaaaaatgtattacacaagaaagaaattcaaaaaggagagcttaagaaaaggacttgcttgagtttgaaatacaaaaaaagtaaataccaaattttgctgcagctgttaagaaataagcatttgtgtaaaagagttgcagccataaatcattgcaagctctacctagtttaaaaaatataaaacataaaaaagatcaaatttgtcatcaattcactaaatgctgatggaggtagcgggacaaggagctatgtaggcaggtcatatcaacaaaaacaaaacaagccaactgcagtcatgattctatctgcagcaaggatgccaatgaacccaactgaaaacatggccagggcagtgaacacaaccaaacactaataatgaaatgatgatttctgttgcatcttataagccaatcaaatcagttcaacccactacagcagtaacatatgcagatctggcaatgacctccaacttcatctatcaatctgtgtcatgagcattgtccctgttgttgttctctacaggtgcacacaactcttgtgctggctgagcagaatgcccacagatcagaaactaaggaggcatgacaggtgttgttcatccaattctaccaaagaaatcattagtaacatctcctctctttcatcagaccacagaattgaactaagaaatagcagaacaccagaaacagtagaaccaatggctgttctccatttatttaatccaatttcacagacaaagtgctcaaatcaggcatctaactgtggtgaacctcatcagcaattcagctcgggaaagcaacaagtgtcgcgttgtgttccatatctggaaatttgccgctcattcagcctcggcaaacaaagaatggccaagagaacagagaccagttgcaaagaaaaatgcaaaaacaagagcagtgagtattcatgaatttcagagagcaagctatcaacataggaaaataactatgaatcatactagacaaatgacactagacttagttctttagtctttgagaagctaggatacatacaggatagtatgttcttttagtccatcatgacaagaagcaccgtttcatcattataatttcgataatgaagccaaagaattcgaccttgctacttccaactaagggcatgtttggttccttagtccaagaactaaagtttagttgctgcatgtttggttccatgactaaaagtgttcacaactcatcaaatgacttgtaagaagaataaaataccctttaccattctcgcgccactaccctcctcccgcagcaacagaaaaaaagggggcaaccggtggaatcaatatggtttagagtgaagcagtttagtccttccttcagtcccacgggagatcccacggcaatctagagacaaatacagggactgtaaccaaacagaacctaaagaagaaaagtatttttcgctcaccaagttacgcctctttctgaacaacggaaggaataaaggtgaacagaaatcgcaatcctcttcatatgcaaaacaaacatcccccttcgactgtaaacataaggaatctacagatccgtctttccacctcacccaccgcacgccaaccatcatacccaagtacccaacaattttgcgccgcgggcaacatgaaactgatagatctagcaaaattacccgggggcgggcatgagcactaacggagacggacggggaggaacgggtacctgaacatcgacgaccttgccgaagcgaccaaaggcgtcctgaagcttgcgctcgtccgtttgccacgacaggccgcccacgaagatccgaccttc

SEQ ID NO: 52677 - DNA, 1044 bp, Zea Mays
atggccggcgtcaccggcaccctctggtgcgcggccagggtcgccggccccgtcgcggcggcggcggcggcgggcgtgccggcgcccgtgagcctctgcaccagctcccggaagtccctgggctccacgcggattgtttgtgtgccgggagctgttaagacactctggctgcccgtattccttccctcgcaagcaagtgcaagtgcaaatcccttccatcccatccggatcgagaaagacactcgtttcctggttcgactctaccgtcggatcgcgcccaacccactgcgtgaacgggcccaggcggccatggccaccgccgaagcaggcccgcctacccgttcagctatttcgcacgaggcactccgcgctgacgatgcttcttcgagtccaagcgcgtcgcctctcgtcaacgtttcaggccctgtgctgcactcacaacccctcatgaagatgtcaatgcagtcccaccagcacgcacaaggttccacgcttcgcttcgtaagtagattgagataaacgcggcagatggccctactacttgttccttgtccgctaatattgttgcagctatacacttcgtcccttgtacatcttgatttttgttttaaccgtgtatctagatataatataaacctaagagctaagggggtgtttggtaacaaagtttttctgcagtattgaagcaatattgtagtattgagtaatactgtgatattatatactttgaggtgtttgttaactcatttgaaatctttgtatactaaactgtagtattgtaaatactgcacttgttttgcagttttggaaactttggcctcaaccaaagtttttctctgtaaagagagcgccagctgggttccgctctggctgattggtctcaaccaaagtttttctcaaacaccttgatgtattggatactgttgtattcgaaaactgaagcattgtaaactatagtaatatcatgactaaagtatacttcagtatttaaaaaactgtagttcggaaaaactgtgttcccaaacaaggcctaagatgttgttt

SEQ ID NO: 52678 - DNA, 2162 bp, Zea Mays
atttgataaagcatcactgaattcatcctagaagttgtctgggagttctacaaaacactcccttgctctaagcacaactgatggaccactacaaaacactcccttgctcgaatccgctaagcacaggcccaaaccgtccacttggaaactcgaagcccatcctgtctttcctttgcgtcagtcgtcttcgacgcaaggagaattgggaattcaggaatcaggatgcggctctccttcccccttgtcgccggcgccgtcgtgatcggagtgatttctgggaatgttatatttgggccaccgcttcagaagtactgggcagagaagcagcagcaagaggcagcaaaagaaggccaagctggttcaacctgacaaaatgtcctccccttctgcagttacacggagaaatgtgtactcctcggtcctgaactagcatcggcttttgttagcattggttacatttagttgcccaagttttcggcgctggaagaagacaccgtgcaatgcacagaaagatttgaaaaacgtttaaatgctggttgatctcattctgaaatacagtacctttgatgaatgcaccgtgcaagacacggtggagacaccttcgaatgatttcaagcctcctttgaaatacctttgaagaagacaccgtgcaagacacggtattgtagtttgcatatctccgagtgcaggttgatttctgaaatagctagaagtcaggatcacagcgctgtatatcctactatcctagcctctttttcgtggcttccggatcttgctgggccgaccgttcgtctgagttctggcccaaattggcttttccggaatacggctcggccctctccagtacaacctccaccgctttctgaacacgaattagaaaaggacgcgatattgcagaagctcccgcccatttttcaccaatcaccagccctagccgcccattttccccatttttcaccaatcacaagaacctttgcgtcctccggcgaggcggcaaccgccggatccctgaacgtctgaatcctggagtgaaccccgcacaggatggcgaggaaagcgaaacccgccgcccaaggcaccgcggtcgtggctgccgccaccggcgtccagtactggctcttgaagacggagccgggcgagtggtcgtggtccgaccaggcgcgcgccccgggcggcgtcgcgccgtgggacggcgtccggaaccggcaggccatgagcagcctgcgcgccatgcggccgggcgaccgctgcctgttctaccactccggcgccggcgccgcctcccgccgcgtcgtcggcgtcgtcgaggtcgccaggccctggtacgagggcgagggcgaggaggcggtggccggtggcgccgtggacgtgcgggcggtcggggagttccggaaccccgtccctctgggtgtcatcaagaaggcggcgggcgaggtggaggggatgaaggacttcgcgctgctccggcaggcgcggctgtcggtgatgcccgtgccggcgaagatctgggactgggtttgcgacgcgggaggcggcctcgtgcaagacggcgagggtgaggacgaggaagaggaagaagaggcttgattccgcagaccagcaaatgtgaagaagaaccaagttgctcctgctggtgacatgagcagttgcaacttgcaaggcggcgttgtgtgggagtccttttggcctgcaagtgttttgctagctttgacaaggcactcctgtttcttcagtgttcgccgtctcggcgccgaagtgcccaagaaaaaaatgtatttactatttgatctactcctatgtaagttcagtggttcatgtagccaagtagcttggatatctatgaaggtactcgagctgttgcatgctgcggcagttttgcacacacacacgtcggctatacagccatccagattcagataggataggacccaatgaatgtgacccggaccctgacgcagagggctgggctgggctgtgctgggacttggagcagcggcagccggtagtgagctgtggcgcaagctctgcgttttatctgtttcgtcttcaattcgtcccatgttgcctgtcggcgacttgcttggggtcgtgactactttttctttctgccactgccacgacacgagccaatcccaccagatctgggcggagcattgaagtgc

SEQ ID NO: 52679 - DNA, 5659 bp, Zea Mays
ctcactgctacaccatcggtggtactcgctgacaactcactggcataaaccaaatattgtacagcattgtattgagctaaaaaaactctcggaactcatgcaaagacaaaagaatggatgaaaggaccggagatatttaagccgcccagcgcccacccacacccctgcctcccaggctcccactagaaaagcacacccaccttctctctcttcaccagcctgtccccaacaatgcacaccaacatccactctctcgtcaggctcctctcccccaaaaatgagcgctgagttctgcgctgctgccggtgtcgtggccatggagctcggagtcggagatgtgctggggctgcagcaaggcatcgcaatcaccgcgccatcgcccagggacagcgacctgggtcttctcaagcgagcaggcctcacccaggctgcggctgctgccccctacccctcccccttccttgacgaggagaagatgctcaggttctccaaggcggctcacacattgcactcaggtttggatgcctcctcagtcctcatcaacacatcttccctcatgcatcttcattcttccttcccagttcccatccatacggagatatcacgccgcatgtgcatgttcttggatggatatgttctctgcaaaacatgttagacaggggtagtaagacggtctctagcggtagtgtaaaatagggacgcgaaatttaaaataggggatgagacagagtatcctctctcctaatcaccattctcatctcctatgccaaacttcaatctacaaatattgtttaacagtgtcacgcacagttctacgtttaaacgattcaccgcggccagtctctgtacactgagaatggcctaataatattcaaaaagaaaagcaaaagtcaaaaggagaacagcggtgcagcgttcattgaacttgatgagcgctcatgagtgctaccttatatggaggggcctagcctagcagcaatagggatttgcaaagcactagagctctccctgggtcctggggtctgggccctgggcccctccctcaccgccaaggctgcctgtaaacatttcatctgcttttttttttaccttcacacttttgtctctggagataaggttgctgtttgcttcagcatttcagatttggtcagactaaaatattctccttgtttcaccgtcatctaggcttggattttggaggcccaggtgagcaggctttcctgctgtccaggaccaagatgccatttactccctcgcagtggatggagctggagcaccaggctctgatatacaagtacctcaatgcaaaggcccccccataccttccagcctgctcatttcaatcagcaagagcttcagatcatccaatagagatgccagagcttgacagacttctctaacgcagtgagctggaggcctctgtatcaaggctacacaaatgcagactctgacccagaacctgggagatgccgacgaacggatggaaagaagtggcggtgctccaaggaagcaatggctgatcacaagtactgtgagcggcacatcaacagaaaccgtcaccgttcaagaaagcctgtggaaaatcaacctaagaagaccaccaaggaggtgcctgctgctgctggctcattgccatgtgctgggccacaaggtagcttgaagaaggcaaaagttaatgactccaagccaggcactgtcagctattgggcagatagtttaaacaggacaatgttgagcagagagaaagcaaacaaaccgacggaagatagctctttgctgcttacttctacgaacagccaacccaccttgtccctgctctctcagctgaagcagcaaaacaaaccagataagttaggccccacactggaaaatgagtcaaacccagacacaatattgaaagcctggggtggcaaccagcctagccacaagagcatttcctctacagagcgccatgatgctgaatccctccaatcagtccttcaaaatttcagcctagcccagaatgagaagatggagtcagaaaagaacaaatattctgattccgtgctagtttcgtcgactttctattctgcagacggtccaagagctacctgccttacacctaacatgacacaggtgaagcaggattgcatatcaagctcttgggagatgcctcaaggtggacctctaggcgaaatcttaacgaactccaagaatagcaaggacttaagcaagtgtaaaccaaggtcatatggttggttgttgaatcttgaccatgcaccatgattcctcaatccatgaagagcttgacatagatatcccatcatgtaggcaaacaatggtcagaaaaaggttatgaccacattgcttgccccatgcatgcttgctatctacatttgtatttctgttacgtagcatttagctagttgaattatcagttcttctggatacggctgtatcttaaacaagttctagtttgtgtcagatgatatcttgcttgctagatgtttcatgttccactttcaacaggaacttcagacaaccactttgattgacagaaaactgtttgaagaaccagctctagtaaacaaggttccaagaaactacatgcacgcttttctgactcttgtttttttttcaaacatacaggagagctgtgtcatcattatattaaatacgagtacatgttaaacagatgaccatgtagctcccgttgcaaacattgaggtcatttgaccttcaaaatggctgcgacgtaaaacagcagagtacccacttgtaggaatccctttgacaagccacaaaactaactactgccatcacacagtttgagtgcttttccaaaaacaatcctaccagggttccaaacatagtttctggtcaatgatatatgcaattcatgtattataattggaacatggcctggatagaaagagcagccaggtggccacaaaagaacccaggttcatgtatacgacaatatgatggccacaaagaatccaagttcatgtatgacaattcgatgcaagaaaaggatccgtggccgctctgacatcatcatccagaacagctatgattacatctgagaatgcaaaagactgatgaagcagtgcacaaatatctatcgaactttagaactcgccaaaaatcacaacagacaagtaaccagcagcataattttggagattattgtcaccaaaatttaataaaaaagcaaaactgagctaaacaaaactcaaataagacatgaacaacagaaaaggtcatacttttcgtgcaaagaataaagataggtaatagtgatatctcatccaaaaaagtgattattatctctatcaccacaacacagtcagtgtcatgatttggaccagagcaacccgttccgatctgcaaactctccaaatatcacagtagacaagcagctaataacattcacttcaggcaaacagaactcaagtataccatgggcaacaaaagaggttcatagtttacaagcaaagaattaaggtgctggctcagacacgcacagagctcataaccttgaataaatcaagttcttctgacacaactaatatcatcgagaaacgaacatttgtgtcaccatagccaccctggataacccagatgcacagaaggccataaccttgtaacaataaataaggaaaacatactcatttgcaacggctcagatacgcacaaaggtcatcaaagtttggtccttgataaaaccaagtatcaggatcgagaaacgtatgtttttgtcatcccagccatgccagatgttccaaagatgccagaaatccaatcgacaaacataaattcaagattggtccctttgccattcatcctgccagctacagataaaaggatacttgcaccccgaattgattaccatcccacgaccaaaatcagataaacaatagtgcaaaatccttagcagaaagatcagcagaacggtcagcaaaaatggactcttcattgcatcggctcagacacgcacaaataggtcatcacaatttgatccttaaatggcattaagaatcataatcaaccaaataacctttttgtcatcacagccacgcagcagcagagactgtactcgtcaccaggtttcagcaaacaattattgaagagaaaaaaatggctacaacatagagctgcaccaatcgaattgatgtgcgaggctgcgtaaccagaaatccatcgtttacttgggctgcggctattagaaccccggggtgatctgggagcagctggaagaagaacgccatggccatcgtatctagaaaccacagctccacagaaatgagcaacctcccattaataaataggtggagcaaacattccagcaagaaaagaaagtgtgatcgaacaaagaggagggcgttgggaaagatttggtcgtgcattttttttggggtcgaattgagagcaactcaaagagcatccaaaaaacatggataaaaaacaactttccaaaaagttgttagtcaagtacatgccaaaattactacattaggctagaattttgtgaagtgaagcagtccccaacaacccctatctgacaaagggaaactgaaaataacataaacctactagccactggaagtcggagaaagttgggtcagggaaaatgccagatttcctcgtaaccttgagttctcttaaacaactcaatttgcaccgccacaatgagcacgagaagaatagagcatgttaagatgtagaaatatagtaaaggcagcagaaatattgcaagatcactacacccatgaaccctgacatatttagttttgctagaaccaattgttcagtactgatcatgatgcttgctcaacgcttgccctgccctttccgattacataaaaaaaatttgcattgccctgacctaccctatcctgtaagagatagtgacaccgcctcctaagaatgctaattactagtacgtaacacaaacgtggaagtactctgggctgttgtaagtgcagaagtactggccagtacatactaaactgcatggaagccatttgcagctcaaatgcgccgtcgtcgtctacaatgatgtagctgaatgtcaaatacgcaaaacacaggaaactcacccgaggagaccaacgcggaagggtggctcccgtagcagagcacgtaggtgcggggaaggggaaactcgtcgtcaccgccttcttggcacatcgcatccggggcaacttgtgcagtagccggccgttggcgctactaggaaggacctgctgtctgcaacagaacggatacgccgccgcctgagcgcctggggatagcgggcagccatagccggatagggatcgacttggcttgccgacgctgcggttgggttctcccagcccaggcagggtcatggcccatgggcggcgtaatcgcttcacgggtccgacatgacagtgacacccgtgcagaaaatacggcaagccgacgcggggaacgggaacgcaccaaacggcgtgagacgcgagaagacgacggtcttcgggctacggtgcacgccgggaagggaaggagagccgtggtcctcgcgctcgcaggaaggcaaggcaaggcaagggcgcaaggctttcacgccgccggattcagagcgaggggagtgtgtgtcgagcctatttggagtcgagtgccagcgacaggggttctggaaggaactaggaac

SEQ ID NO: 52680 - DNA, 5812 bp, Zea Mays
ctcactgctacaccatcggtggtactcgctgacaactcactggcataaaccaaatattgtacagcattgtattgagctaaaaaaactctcggaactcatgcaaagacaaaagaatggatgaaaggaccggagatatttaagccgcccagcgcccacccacacccctgcctcccaggctcccactagaaaagcacacccaccttctctctcttcaccagcctgtccccaacaatgcacaccaacatccactctctcgtcaggctcctctcccccaaaaatgagcgctgagttctgcgctgctgccggtgtcgtggccatggagctcggagtcggagatgtgctggggctgcagcaaggcatcgcaatcaccgcgccatcgcccagggacagcgacctgggtcttctcaagcgagcaggcctcacccaggctgcggctgctgccccctacccctcccccttccttgacgaggagaagatgctcaggttctccaaggcggctcacacattgcactcaggtttggatgcctcctcagtcctcatcaacacatcttccctcatgcatcttcattcttccttcccagttcccatccatacggagatatcacgccgcatgtgcatgttcttggatggatatgttctctgcaaaacatgttagacaggggtagtaagacggtctctagcggtagtgtaaaatagggacgcgaaatttaaaataggggatgagacagagtatcctctctcctaatcaccattctcatctcctatgccaaacttcaatctacaaatattgtttaacagtgtcacgcacagttctacgtttaaacgattcaccgcggccagtctctgtacactgagaatggcctaataatattcaaaaagaaaagcaaaagtcaaaaggagaacagcggtgcagcgttcattgaacttgatgagcgctcatgagtgctaccttatatggaggggcctagcctagcagcaatagggatttgcaaagcactagagctctccctgggtcctggggtctgggccctgggcccctccctcaccgccaaggctgcctgcttggattttggaggcccaggtgagcaggctttcctgctgtccaggaccaagatgccatttactccctcgcagtggatggagctggagcaccaggctctgatatacaagtacctcaatgcaaaggcccccccataccttccagcctgctcatttcaatcagcaagagcttcagatcatccaatagaggtactgaaccagaaaactaaggttttctacttcaaaactactggcacttgcaaccaaccaagatagaagagaaatattactttgcaaaggtgcagcgttacatggtaaacaaaaaatgctggcagtggcagctctgtagtatttgaaactgcaactcattaggttcaatgtatgaatgccatggaatttcaaagatattacaccaaaaaggaaccaccattttgtacctaaacactcgtatgccataaaggataaccacagtaatgctttgaatatagatgccagagcttgacagacttctctaacgcagtgagctggaggcctctgtatcaaggctacacaaatgcagactctgacccagaacctgggagatgccgacgaacggatggaaagaagtggcggtgctccaaggaagcaatggctgatcacaagtactgtgagcggcacatcaacagaaaccgtcaccgttcaagaaagcctgtggaaaatcaacctaagaagaccaccaaggaggtgcctgctgctgctggctcattgccatgtgctgggccacaaggtagcttgaagaaggcaaaagttaatgactccaagccaggcactgtcagctattgggcagatagtttaaacaggacaatgttgagcagagagaaagcaaacaaaccgacggaagatagctctttgctgcttacttctacgaacagccaacccaccttgtccctgctctctcagctgaagcagcaaaacaaaccagataagttaggccccacactggaaaatgagtcaaacccagacacaatattgaaagcctggggtggcaaccagcctagccacaagagcatttcctctacagagcgccatgatgctgaatccctccaatcagtccttcaaaatttcagcctagcccagaatgagaagatggagtcagaaaagaacaaatattctgattccgtgctagtttcgtcgactttctattctgcagacggtccaagagctacctgccttacacctaacatgacacaggtgaagcaggattgcatatcaagctcttgggagatgcctcaaggtggacctctaggcgaaatcttaacgaactccaagaatagcaaggacttaagcaagtgtaaaccaaggtcatatggttggttgttgaatcttgaccatgcaccatgattcctcaatccatgaagagcttgacatagatatcccatcatgtaggcaaacaatggtcagaaaaaggttatgaccacattgcttgccccatgcatgcttgctatctacatttgtatttctgttacgtagcatttagctagttgaattatcagttcttctggatacggctgtatcttaaacaagttctagtttgtgtcagatgatatcttgcttgctagatgtttcatgttccactttcaacaggaacttcagacaaccactttgattgacagaaaactgtttgaagaaccagctctagtaaacaaggttccaagaaactacatgcacgcttttctgactcttgtttttttttcaaacatacaggagagctgtgtcatcattatattaaatacgagtacatgttaaacagatgaccatgtagctcccgttgcaaacattgaggtcatttgaccttcaaaatggctgcgacgtaaaacagcagagtacccacttgtaggaatccctttgacaagccacaaaactaactactgccatcacacagtttgagtgcttttccaaaaacaatcctaccagggttccaaacatagtttctggtcaatgatatatgcaattcatgtattataattggaacatggcctggatagaaagagcagccaggtggccacaaaagaacccaggttcatgtatacgacaatatgatggccacaaagaatccaagttcatgtatgacaattcgatgcaagaaaaggatccgtggccgctctgacatcatcatccagaacagctatgattacatctgagaatgcaaaagactgatgaagcagtgcacaaatatctatcgaactttagaactcgccaaaaatcacaacagacaagtaaccagcagcataattttggagattattgtcaccaaaatttaataaaaaagcaaaactgagctaaacaaaactcaaataagacatgaacaacagaaaaggtcatacttttcgtgcaaagaataaagataggtaatagtgatatctcatccaaaaaagtgattattatctctatcaccacaacacagtcagtgtcatgatttggaccagagcaacccgttccgatctgcaaactctccaaatatcacagtagacaagcagctaataacattcacttcaggcaaacagaactcaagtataccatgggcaacaaaagaggttcatagtttacaagcaaagaattaaggtgctggctcagacacgcacagagctcataaccttgaataaatcaagttcttctgacacaactaatatcatcgagaaacgaacatttgtgtcaccatagccaccctggataacccagatgcacagaaggccataaccttgtaacaataaataaggaaaacatactcatttgcaacggctcagatacgcacaaaggtcatcaaagtttggtccttgataaaaccaagtatcaggatcgagaaacgtatgtttttgtcatcccagccatgccagatgttccaaagatgccagaaatccaatcgacaaacataaattcaagattggtccctttgccattcatcctgccagctacagataaaaggatacttgcaccccgaattgattaccatcccacgaccaaaatcagataaacaatagtgcaaaatccttagcagaaagatcagcagaacggtcagcaaaaatggactcttcattgcatcggctcagacacgcacaaataggtcatcacaatttgatccttaaatggcattaagaatcataatcaaccaaataacctttttgtcatcacagccacgcagcagcagagactgtactcgtcaccaggtttcagcaaacaattattgaagagaaaaaaatggctacaacatagagctgcaccaatcgaattgatgtgcgaggctgcgtaaccagaaatccatcgtttacttgggctgcggctattagaaccccggggtgatctgggagcagctggaagaagaacgccatggccatcgtatctagaaaccacagctccacagaaatgagcaacctcccattaataaataggtggagcaaacattccagcaagaaaagaaagtgtgatcgaacaaagaggagggcgttgggaaagatttggtcgtgcattttttttggggtcgaattgagagcaactcaaagagcatccaaaaaacatggataaaaaacaactttccaaaaagttgttagtcaagtacatgccaaaattactacattaggctagaattttgtgaagtgaagcagtccccaacaacccctatctgacaaagggaaactgaaaataacataaacctactagccactggaagtcggagaaagttgggtcagggaaaatgccagatttcctcgtaaccttgagttctcttaaacaactcaatttgcaccgccacaatgagcacgagaagaatagagcatgttaagatgtagaaatatagtaaaggcagcagaaatattgcaagatcactacacccatgaaccctgacatatttagttttgctagaaccaattgttcagtactgatcatgatgcttgctcaacgcttgccctgccctttccgattacataaaaaaaatttgcattgccctgacctaccctatcctgtaagagatagtgacaccgcctcctaagaatgctaattactagtacgtaacacaaacgtggaagtactctgggctgttgtaagtgcagaagtactggccagtacatactaaactgcatggaagccatttgcagctcaaatgcgccgtcgtcgtctacaatgatgtagctgaatgtcaaatacgcaaaacacaggaaactcacccgaggagaccaacgcggaagggtggctcccgtagcagagcacgtaggtgcggggaaggggaaactcgtcgtcaccgccttcttggcacatcgcatccggggcaacttgtgcagtagccggccgttggcgctactaggaaggacctgctgtctgcaacagaacggatacgccgccgcctgagcgcctggggatagcgggcagccatagccggatagggatcgacttggcttgccgacgctgcggttgggttctcccagcccaggcagggtcatggcccatgggcggcgtaatcgcttcacgggtccgacatgacagtgacacccgtgcagaaaatacggcaagccgacgcggggaacgggaacgcaccaaacggcgtgagacgcgagaagacgacggtcttcgggctacggtgcacgccgggaagggaaggagagccgtggtcctcgcgctcgcaggaaggcaaggcaaggcaagggcgcaaggctttcacgccgccggattcagagcgaggggagtgtgtgtcgagcctatttggagtcgagtgccagcgacaggggttctggaaggaactaggaac

SEQ ID NO: 52681 - DNA, 5729 bp, Zea Mays
ctcactgctacaccatcggtggtactcgctgacaactcactggcataaaccaaatattgtacagcattgtattgagctaaaaaaactctcggaactcatgcaaagacaaaagaatggatgaaaggaccggagatatttaagccgcccagcgcccacccacacccctgcctcccaggctcccactagaaaagcacacccaccttctctctcttcaccagcctgtccccaacaatgcacaccaacatccactctctcgtcaggctcctctcccccaaaaatgagcgctgagttctgcgctgctgccggtgtcgtggccatggagctcggagtcggagatgtgctggggctgcagcaaggcatcgcaatcaccgcgccatcgcccagggacagcgacctgggtcttctcaagcgagcaggcctcacccaggctgcggctgctgccccctacccctcccccttccttgacgaggagaagatgctcaggttctccaaggcggctcacacattgcactcaggtttggatgcctcctcagtcctcatcaacacatcttccctcatgcatcttcattcttccttcccagttcccatccatacggagatatcacgccgcatgtgcatgttcttggatggatatgttctctgcaaaacatgttagacaggggtagtaagacggtctctagcggtagtgtaaaatagggacgcgaaatttaaaataggggatgagacagagtatcctctctcctaatcaccattctcatctcctatgccaaacttcaatctacaaatattgtttaacagtgtcacgcacagttctacgtttaaacgattcaccgcggccagtctctgtacactgagaatggcctaataatattcaaaaagaaaagcaaaagtcaaaaggagaacagcggtgcagcgttcattgaacttgatgagcgctcatgagtgctaccttatatggaggggcctagcctagcagcaatagggatttgcaaagcactagagctctccctgggtcctggggtctgggccctgggcccctccctcaccgccaaggctgcctgcttggattttggaggcccaggtgagcaggctttcctgctgtccaggaccaagatgccatttactccctcgcagtggatggagctggagcaccaggctctgatatacaagtacctcaatgcaaaggcccccccataccttccagcctgctcatttcaatcagcaagagcttcagatcatccaatagagtgagctggaggcctctgtatcaaggctacacaaatgcagactctgacccagaacctgggagatgccgacgaacggatggaaagaagtggcggtgctccaaggaagcaatggctgatcacaagtactgtgagcggcacatcaacagaaaccgtcaccgttcaagaaagcctgtggaaaatcaacctaagaagaccaccaaggaggtgcctgctgctgctggctcattgccatgtgctgggccacaaggtagcttgaagaaggcaaaagttaatgactccaagccaggcactgtcagctattgggcagatagtttaaacaggtaaatactatattcttacaccagagtcatctccttatataaggcaccctattttagcatgatatctgaataataaaatcccaatttaatacttgtgcatcctattaagagcatgcatcctggaataatgttagtatgttgaggttctagttaatattaatttttattttagttgccacttagcagtcataataattcccattccacaaccttgtactcattttcaggacaatgttgagcagagagaaagcaaacaaaccgacggaagatagctctttgctgcttacttctacgaacagccaacccaccttgtccctgctctctcagctgaagcagcaaaacaaaccagataagttaggccccacactggaaaatgagtcaaacccagacacaatattgaaagcctggggtggcaaccagcctagccacaagagcatttcctctacagagcgccatgatgctgaatccctccaatcagtccttcaaaatttcagcctagcccagaatgagaagatggagtcagaaaagaacaaatattctgattccgtgctagtttcgtcgactttctattctgcagacggtccaagagctacctgccttacacctaacatgacacaggtgaagcaggattgcatatcaagctcttgggagatgcctcaaggtggacctctaggcgaaatcttaacgaactccaagaatagcaaggacttaagcaagtgtaaaccaaggtcatatggttggttgttgaatcttgaccatgcaccatgattcctcaatccatgaagagcttgacatagatatcccatcatgtaggcaaacaatggtcagaaaaaggttatgaccacattgcttgccccatgcatgcttgctatctacatttgtatttctgttacgtagcatttagctagttgaattatcagttcttctggatacggctgtatcttaaacaagttctagtttgtgtcagatgatatcttgcttgctagatgtttcatgttccactttcaacaggaacttcagacaaccactttgattgacagaaaactgtttgaagaaccagctctagtaaacaaggttccaagaaactacatgcacgcttttctgactcttgtttttttttcaaacatacaggagagctgtgtcatcattatattaaatacgagtacatgttaaacagatgaccatgtagctcccgttgcaaacattgaggtcatttgaccttcaaaatggctgcgacgtaaaacagcagagtacccacttgtaggaatccctttgacaagccacaaaactaactactgccatcacacagtttgagtgcttttccaaaaacaatcctaccagggttccaaacatagtttctggtcaatgatatatgcaattcatgtattataattggaacatggcctggatagaaagagcagccaggtggccacaaaagaacccaggttcatgtatacgacaatatgatggccacaaagaatccaagttcatgtatgacaattcgatgcaagaaaaggatccgtggccgctctgacatcatcatccagaacagctatgattacatctgagaatgcaaaagactgatgaagcagtgcacaaatatctatcgaactttagaactcgccaaaaatcacaacagacaagtaaccagcagcataattttggagattattgtcaccaaaatttaataaaaaagcaaaactgagctaaacaaaactcaaataagacatgaacaacagaaaaggtcatacttttcgtgcaaagaataaagataggtaatagtgatatctcatccaaaaaagtgattattatctctatcaccacaacacagtcagtgtcatgatttggaccagagcaacccgttccgatctgcaaactctccaaatatcacagtagacaagcagctaataacattcacttcaggcaaacagaactcaagtataccatgggcaacaaaagaggttcatagtttacaagcaaagaattaaggtgctggctcagacacgcacagagctcataaccttgaataaatcaagttcttctgacacaactaatatcatcgagaaacgaacatttgtgtcaccatagccaccctggataacccagatgcacagaaggccataaccttgtaacaataaataaggaaaacatactcatttgcaacggctcagatacgcacaaaggtcatcaaagtttggtccttgataaaaccaagtatcaggatcgagaaacgtatgtttttgtcatcccagccatgccagatgttccaaagatgccagaaatccaatcgacaaacataaattcaagattggtccctttgccattcatcctgccagctacagataaaaggatacttgcaccccgaattgattaccatcccacgaccaaaatcagataaacaatagtgcaaaatccttagcagaaagatcagcagaacggtcagcaaaaatggactcttcattgcatcggctcagacacgcacaaataggtcatcacaatttgatccttaaatggcattaagaatcataatcaaccaaataacctttttgtcatcacagccacgcagcagcagagactgtactcgtcaccaggtttcagcaaacaattattgaagagaaaaaaatggctacaacatagagctgcaccaatcgaattgatgtgcgaggctgcgtaaccagaaatccatcgtttacttgggctgcggctattagaaccccggggtgatctgggagcagctggaagaagaacgccatggccatcgtatctagaaaccacagctccacagaaatgagcaacctcccattaataaataggtggagcaaacattccagcaagaaaagaaagtgtgatcgaacaaagaggagggcgttgggaaagatttggtcgtgcattttttttggggtcgaattgagagcaactcaaagagcatccaaaaaacatggataaaaaacaactttccaaaaagttgttagtcaagtacatgccaaaattactacattaggctagaattttgtgaagtgaagcagtccccaacaacccctatctgacaaagggaaactgaaaataacataaacctactagccactggaagtcggagaaagttgggtcagggaaaatgccagatttcctcgtaaccttgagttctcttaaacaactcaatttgcaccgccacaatgagcacgagaagaatagagcatgttaagatgtagaaatatagtaaaggcagcagaaatattgcaagatcactacacccatgaaccctgacatatttagttttgctagaaccaattgttcagtactgatcatgatgcttgctcaacgcttgccctgccctttccgattacataaaaaaaatttgcattgccctgacctaccctatcctgtaagagatagtgacaccgcctcctaagaatgctaattactagtacgtaacacaaacgtggaagtactctgggctgttgtaagtgcagaagtactggccagtacatactaaactgcatggaagccatttgcagctcaaatgcgccgtcgtcgtctacaatgatgtagctgaatgtcaaatacgcaaaacacaggaaactcacccgaggagaccaacgcggaagggtggctcccgtagcagagcacgtaggtgcggggaaggggaaactcgtcgtcaccgccttcttggcacatcgcatccggggcaacttgtgcagtagccggccgttggcgctactaggaaggacctgctgtctgcaacagaacggatacgccgccgcctgagcgcctggggatagcgggcagccatagccggatagggatcgacttggcttgccgacgctgcggttgggttctcccagcccaggcagggtcatggcccatgggcggcgtaatcgcttcacgggtccgacatgacagtgacacccgtgcagaaaatacggcaagccgacgcggggaacgggaacgcaccaaacggcgtgagacgcgagaagacgacggtcttcgggctacggtgcacgccgggaagggaaggagagccgtggtcctcgcgctcgcaggaaggcaaggcaaggcaagggcgcaaggctttcacgccgccggattcagagcgaggggagtgtgtgtcgagcctatttggagtcgagtgccagcgacaggggttctggaaggaactaggaac

SEQ ID NO: 52682 - DNA, 5627 bp, Zea Mays
ctcactgctacaccatcggtggtactcgctgacaactcactggcataaaccaaatattgtacagcattgtattgagctaaaaaaactctcggaactcatgcaaagacaaaagaatggatgaaaggaccggagatatttaagccgcccagcgcccacccacacccctgcctcccaggctcccactagaaaagcacacccaccttctctctcttcaccagcctgtccccaacaatgcacaccaacatccactctctcgtcaggctcctctcccccaaaaatgagcgctgagttctgcgctgctgccggtgtcgtggccatggagctcggagtcggagatgtgctggggctgcagcaaggcatcgcaatcaccgcgccatcgcccagggacagcgacctgggtcttctcaagcgagcaggcctcacccaggctgcggctgctgccccctacccctcccccttccttgacgaggagaagatgctcaggttctccaaggcggctcacacattgcactcaggtttggatgcctcctcagtcctcatcaacacatcttccctcatgcatcttcattcttccttcccagttcccatccatacggagatatcacgccgcatgtgcatgttcttggatggatatgttctctgcaaaacatgttagacaggggtagtaagacggtctctagcggtagtgtaaaatagggacgcgaaatttaaaataggggatgagacagagtatcctctctcctaatcaccattctcatctcctatgccaaacttcaatctacaaatattgtttaacagtgtcacgcacagttctacgtttaaacgattcaccgcggccagtctctgtacactgagaatggcctaataatattcaaaaagaaaagcaaaagtcaaaaggagaacagcggtgcagcgttcattgaacttgatgagcgctcatgagtgctaccttatatggaggggcctagcctagcagcaatagggatttgcaaagcactagagctctccctgggtcctggggtctgggccctgggcccctccctcaccgccaaggctgcctgtaaacatttcatctgcttttttttttaccttcacacttttgtctctggagataaggttgctgtttgcttcagcatttcagatttggtcagactaaaatattctccttgtttcaccgtcatctaggcttggattttggaggcccaggtgagcaggctttcctgctgtccaggaccaagatgccatttactccctcgcagtggatggagctggagcaccaggctctgatatacaagtacctcaatgcaaaggcccccccataccttccagcctgctcatttcaatcagcaagagcttcagatcatccaatagagtgagctggaggcctctgtatcaaggctacacaaatgcagactctgacccagaacctgggagatgccgacgaacggatggaaagaagtggcggtgctccaaggaagcaatggctgatcacaagtactgtgagcggcacatcaacagaaaccgtcaccgttcaagaaagcctgtggaaaatcaacctaagaagaccaccaaggaggtgcctgctgctgctggctcattgccatgtgctgggccacaaggtagcttgaagaaggcaaaagttaatgactccaagccaggcactgtcagctattgggcagatagtttaaacaggacaatgttgagcagagagaaagcaaacaaaccgacggaagatagctctttgctgcttacttctacgaacagccaacccaccttgtccctgctctctcagctgaagcagcaaaacaaaccagataagttaggccccacactggaaaatgagtcaaacccagacacaatattgaaagcctggggtggcaaccagcctagccacaagagcatttcctctacagagcgccatgatgctgaatccctccaatcagtccttcaaaatttcagcctagcccagaatgagaagatggagtcagaaaagaacaaatattctgattccgtgctagtttcgtcgactttctattctgcagacggtccaagagctacctgccttacacctaacatgacacaggtgaagcaggattgcatatcaagctcttgggagatgcctcaaggtggacctctaggcgaaatcttaacgaactccaagaatagcaaggacttaagcaagtgtaaaccaaggtcatatggttggttgttgaatcttgaccatgcaccatgattcctcaatccatgaagagcttgacatagatatcccatcatgtaggcaaacaatggtcagaaaaaggttatgaccacattgcttgccccatgcatgcttgctatctacatttgtatttctgttacgtagcatttagctagttgaattatcagttcttctggatacggctgtatcttaaacaagttctagtttgtgtcagatgatatcttgcttgctagatgtttcatgttccactttcaacaggaacttcagacaaccactttgattgacagaaaactgtttgaagaaccagctctagtaaacaaggttccaagaaactacatgcacgcttttctgactcttgtttttttttcaaacatacaggagagctgtgtcatcattatattaaatacgagtacatgttaaacagatgaccatgtagctcccgttgcaaacattgaggtcatttgaccttcaaaatggctgcgacgtaaaacagcagagtacccacttgtaggaatccctttgacaagccacaaaactaactactgccatcacacagtttgagtgcttttccaaaaacaatcctaccagggttccaaacatagtttctggtcaatgatatatgcaattcatgtattataattggaacatggcctggatagaaagagcagccaggtggccacaaaagaacccaggttcatgtatacgacaatatgatggccacaaagaatccaagttcatgtatgacaattcgatgcaagaaaaggatccgtggccgctctgacatcatcatccagaacagctatgattacatctgagaatgcaaaagactgatgaagcagtgcacaaatatctatcgaactttagaactcgccaaaaatcacaacagacaagtaaccagcagcataattttggagattattgtcaccaaaatttaataaaaaagcaaaactgagctaaacaaaactcaaataagacatgaacaacagaaaaggtcatacttttcgtgcaaagaataaagataggtaatagtgatatctcatccaaaaaagtgattattatctctatcaccacaacacagtcagtgtcatgatttggaccagagcaacccgttccgatctgcaaactctccaaatatcacagtagacaagcagctaataacattcacttcaggcaaacagaactcaagtataccatgggcaacaaaagaggttcatagtttacaagcaaagaattaaggtgctggctcagacacgcacagagctcataaccttgaataaatcaagttcttctgacacaactaatatcatcgagaaacgaacatttgtgtcaccatagccaccctggataacccagatgcacagaaggccataaccttgtaacaataaataaggaaaacatactcatttgcaacggctcagatacgcacaaaggtcatcaaagtttggtccttgataaaaccaagtatcaggatcgagaaacgtatgtttttgtcatcccagccatgccagatgttccaaagatgccagaaatccaatcgacaaacataaattcaagattggtccctttgccattcatcctgccagctacagataaaaggatacttgcaccccgaattgattaccatcccacgaccaaaatcagataaacaatagtgcaaaatccttagcagaaagatcagcagaacggtcagcaaaaatggactcttcattgcatcggctcagacacgcacaaataggtcatcacaatttgatccttaaatggcattaagaatcataatcaaccaaataacctttttgtcatcacagccacgcagcagcagagactgtactcgtcaccaggtttcagcaaacaattattgaagagaaaaaaatggctacaacatagagctgcaccaatcgaattgatgtgcgaggctgcgtaaccagaaatccatcgtttacttgggctgcggctattagaaccccggggtgatctgggagcagctggaagaagaacgccatggccatcgtatctagaaaccacagctccacagaaatgagcaacctcccattaataaataggtggagcaaacattccagcaagaaaagaaagtgtgatcgaacaaagaggagggcgttgggaaagatttggtcgtgcattttttttggggtcgaattgagagcaactcaaagagcatccaaaaaacatggataaaaaacaactttccaaaaagttgttagtcaagtacatgccaaaattactacattaggctagaattttgtgaagtgaagcagtccccaacaacccctatctgacaaagggaaactgaaaataacataaacctactagccactggaagtcggagaaagttgggtcagggaaaatgccagatttcctcgtaaccttgagttctcttaaacaactcaatttgcaccgccacaatgagcacgagaagaatagagcatgttaagatgtagaaatatagtaaaggcagcagaaatattgcaagatcactacacccatgaaccctgacatatttagttttgctagaaccaattgttcagtactgatcatgatgcttgctcaacgcttgccctgccctttccgattacataaaaaaaatttgcattgccctgacctaccctatcctgtaagagatagtgacaccgcctcctaagaatgctaattactagtacgtaacacaaacgtggaagtactctgggctgttgtaagtgcagaagtactggccagtacatactaaactgcatggaagccatttgcagctcaaatgcgccgtcgtcgtctacaatgatgtagctgaatgtcaaatacgcaaaacacaggaaactcacccgaggagaccaacgcggaagggtggctcccgtagcagagcacgtaggtgcggggaaggggaaactcgtcgtcaccgccttcttggcacatcgcatccggggcaacttgtgcagtagccggccgttggcgctactaggaaggacctgctgtctgcaacagaacggatacgccgccgcctgagcgcctggggatagcgggcagccatagccggatagggatcgacttggcttgccgacgctgcggttgggttctcccagcccaggcagggtcatggcccatgggcggcgtaatcgcttcacgggtccgacatgacagtgacacccgtgcagaaaatacggcaagccgacgcggggaacgggaacgcaccaaacggcgtgagacgcgagaagacgacggtcttcgggctacggtgcacgccgggaagggaaggagagccgtggtcctcgcgctcgcaggaaggcaaggcaaggcaagggcgcaaggctttcacgccgccggattcagagcgaggggagtgtgtgtcgagcctatttggagtcgagtgccagcgacaggggttctggaaggaactaggaac

SEQ ID NO: 52683 - DNA, 1368 bp, Zea Mays
aagcgtctctggtagtgaatgctggagtcagtgaagtagatgttgccctcgtcgtcgaggtcgaggtcgttggtgaagttgaagcgcacgccctcggcctccgttgcgagcagcgtggccagcccgccctcggggcggactttgagcaagccgaagtaggcgtcggcgatgtacaggtccccagtcttatcgaaacagagcccgagcgggctgttgcagatgtgctcgctgggagatactccagcggcgaggccttcggcccgccgcggagcttctgcgtccagcgcggggaggccatcgtgaatgggacccaccgctcactgtcccagaagacgacccggccgtcggcgacgcccgtgtatggccctgctggtcgaaggcgatgctctcgggcccctgcacctcgccgcagaaccgcacatcggctccacagagtcgctcccattcatccgcgtgcgtcggcatctcggcgggatcagggaggtcgacgaggtgggactcaaaccccgggaagtccaccatgttgtccgttcggagcgggtccgtgccgcagaatgccgccagtgctaccaccagcagcgtcgcggccactacaaccggcgacgccatcccgctagcccgctacctcgtctctcgcccgcggctcacccactcgcctccgtctgccgtcgcctcgctctcgcggggtttcgcttggatttctctacacactccccctgatctgcctcaccttccatgtagagcgcgaatcgagagccgatgcatcgtctctcctcgccttccacggatagcgagccccggacttgcatctggagaccgcaaattccatcgatctgggcaagcacggcgcggacgccgtcaatctgggcgaatctggagagagcggatcgaggccgcaatcccgtccgagcagtgatcccgtcgatttgggcgccggcctcgccttccatgtagagcgcgggagcaggggagagcgcagagcagagattccgtcgatttgggcgtcgacctcaccttccatgtagagcgcgagagcaggagagagcgtggagcaaggaatcagagcgcatcagtgcgaaccttccatggagtttatcgagaggcgttgatgaggagagaacagggattgcggtgagagagcatgtacgcgaatcggggtcaatggagttgtttgtgtctggattgcaccgcgggagggactggatgcggggattaagcgcgaatcgggagggactggctgcgacgccgttgatgcgggagggactagatgcggctgttgcgccattgatggtgcggccgcgggatgcgggagggatgcggccgcgggcggggcgggttgcaggaggcagaacgtgcaccgcgccgcgg

SEQ ID NO: 52684 - DNA, 292 bp, Zea Mays
caagcttccatggagtttatcgagaggcgttgatgaggagagaacagggattgcggtgagagagcatgtacgcgaatcggggtcaatggagttgtttgtgtctggattgcaccgcgggagggactggatgcggggattaagcgcgaatcgggagggactggctgcgacgccgttgatgcgggagggactagatgcggctgttgcgccattgatggtgcggccgcgggatgcgggagggatgcggccgcgggcggggcgggttgcaggaggcagaacgtgcaccgcgccgcgg

SEQ ID NO: 52685 - DNA, 224 bp, Zea Mays
gcgggcctgaaggggctggaatcagcgctcctcctgaggccgcagcacggcctcggcgacgggcccggggacgaggatctgaccgccgcaatcgacatccggctggcggctgcgttcgatttgtgaaggaagcgtgatgagctgtgtggactcgcaaccggaactgcagacggcggagattttgggcgaggagagctgagtgaggagaggggatgggatgggcg

SEQ ID NO: 52686 - DNA, 249 bp, Zea Mays
atgacggtaaatctcgaggcggcggttgggctggtagcggaggtaccgaggcctcggggagaggtagttcgtcttgggatcgtacggggctgccacgacctccgcgtccgccaaagccacgtcgtggtggctctcggagacggcgggattctcaaccatcacggcggcctcgtcacctccgaacgacggggcgccgcgcgaaacgacaggcccagccgcggaaggaagggcagaggcgccgtccagtga

SEQ ID NO: 52687 - DNA, 575 bp, Zea Mays
tgcttcgtcctcgctaggtttcatttcgcggtcatcaccgaccgggagacggggaggtcccgcggcttcggcttcgttaccttctcctccgagaactccatgctcgacgctatcgagaacatgaacggcaaggagctcgacggccgtaacatcaccgttaaccaggcccagtcccgtggcggtggcggcggcggctggagggactgatgtgtgggcccatcctggcttcggccgagttatcttatctatctatagtatcgtgttaccgttcgcttctgtcaccgtgttagtgtccgttctacctttggattaggtgttggtaccctgttgttcgctttggttgctcccgctatgaaacgagacgagagaagaatgagcaaggtttttgttcgcagctatttttgtccaatgatattgatatattgttcccctgtctgttgctggattgttgtgtggctatacaaatatcatcaaactgttactccgagagccctataaatatcaaacttccagaacacaatacagtaaagtacacgataacagatccaaagaattcgccgcttcgatgcaccata

SEQ ID NO: 52688 - DNA, 1107 bp, Zea Mays
cctaaggtgaggcgagtacagccccggcacacaaccaatcacggtgacgctctaggattgggccatttggtgtggcactgtagcgaggcccagctcggtccatgagcagcattctggtcggcttgacagatccatcacgccatcggcaaaaatatctggctctcgagaaccctcccggtcccagcgcggtaggcccacctcgggatccttatcctccggtcggaccgttgtttgcgcggtcgccgcccgatccgatcatgacggcgcccgtcacgtccgtcgcgctataaatctgcgggggttttgtggaggggcgatggcggcggctgatgtggagtaccgttgcttcgtcggcgggcttgcctgggccaccagcaacgagtcgctggagaatgccttcgcctcctacggcgagatcctcgactccaaggtcatcaccgaccgggagacggggaggtcccgcggcttcggcttcgttaccttctcctccgagaactccatgctcgacgctatcgagaacatgaacggcaaggagctcgacggccgtaacatcaccgttaaccaggcccagtcccgtggcggtggcggtggcggcggtggctacggcggcggtcgcggcggcggcggtcggcgcgaaggtggcggcggcggctacggaggcggtggcggctacggcggtcggcgcgagggtggcggtggcggctacggcggcggtggcggcggcggctggagggactgatgtgtgggcccatcctggcttcggccgagttatcttatctatctatagtatcgtgttaccgttcgcttctgtcaccgtgttagtgtccgttctacctttggattaggtgttggtaccctgttgttcgctttggttgctcccgctatgaaacgagacgagagaagaatgagcaaggtttttgttcgcagctatttttgtccaatgatattgatatattgttcccctgtctgttgctggattgttgtgtggctatacaaatatcatcaaactgttactccgagagccctataaatatcaaacttccagaacacaatacagtaaagtacacgataacagatccaaagaattcgccgcttcgatgcaccata

SEQ ID NO: 52689 - DNA, 249 bp, Zea Mays
cggggctcgcacaagtagaagtaggcaacgagtaccgcgcggccgcactcctgcggccctggcggttggcctctggcaccctgccaacgccaacgacgctcgtcgttcaccagccacggccaggcggacagccgcccagccaatcgcgcccggcgcctccgatcgcggagaggaataacggacggagcctacagggccctgagaggaactggcagccaaacggggactccgggcgtggagggagtgata

SEQ ID NO: 52690 - DNA, 3428 bp, Zea Mays
ctgaaataaaaaacgtgaactatagataccgaggaaggtacgtgtgatcgattgaaaaaaaagatccaaacctgtgcctattggtagctagttgtggggttgggatgaccactgctaaaggctaaagctttctcccacatttagaatctgatcccagatcaacggcacttattgcctgacccccattaattattccgctggtcattattcaccaaagcaacaactaatgtaacccccacaagcatccagagagaggagatcagggtggcatcagtctgccaccagcactaaactaaaccaggaagtttctttatttgataactgctgggcgtatcaaacacaaagcctcgccagaaaaagaaacaatagcacagcgtgcctgccatggaatagcctgacagttggtagaatcaacatatggtaaccaaaatcttgattattggatcgctaggttccatggacaaccatgtggtgataaagttcacttttcaagaatgactgctatggtacgagttctagaaaaaataaaaataacatcgaaacaatcacatggtcgcatacctgtttcattctgatggatatggatcacacgcaataactcattgcccagcatttctcgtatcgtatctgacccctacttcgagttccctgtgcccggctgttactggtgcatcacgaagaagttgggctaatcatcccaggtgcacaagtcttggtcaacagaaacaggaacaatctgcaacatgaatctgatgattgtataggatgcagatggtgcaggacaaaattctacagaaacaatctagcacagaaagtatcagaacaccaggaatgcaaaaggacacatgagctagactggcaacagacacataatcaggtgcaaatgataatccaggagcacacagacacaggaatcaaatggaccttccataactggaccagatggaatgttgagccacggcagtggggtctataaatcatgaacgatctgaataaaatgataacatagacatgtgatgggtctggtacgtaggtagttgaaagttaagttacgtttgcagctatctaaaatgataaatgccctaccacatctgtctaaaattatagttaacatgtggactttaaagttttttggcagccattaacatatgtgtccatatggctgtcgatatttgaaaaatgcatgtctaacatttgagcataagcataaacactcttacccatcatctatgcttaattcaacaacaaggaagtagacaactcagtattcaaaacatgtggcactgcaatacattagacagatcctagtaatgcaaaaataggtgaacgggtgtgatcatccaacgaacatgactgaagtaagtcaagtaacaaagtaacgtaagaatgaagaaacaattaaaaatcatgagcatagaaagcttggcgctgtcaacaaattcagaagctagggtaccattggatgtgttagatggaagaaaaaacttcagccactggcatttggtgcatctatgggtgctttctgtaaggtagtattggatacattagcgctcaacagttatgataccagagatacagttcaccgctgccaaagtagccaccaatatcatcgctggaaaaccagacgtcgctatctatgcctaagcaagtctcaaacgttgtctttcttccctagtgccatccctcctaaaaaccagcacacctccaacacccacacacacatgccagtcttctaaaagggcttgccccgattacagattgactcatgtgccccccaccccaccaccgcgcacacacacacacttcggactgcgcctgcagacacgctgacgcggtccatctcattgtcctcgttctggtctgcatcttcagttggactgggcatcgagccttggcctgccacactttgcttctgtgtgccgcctggaggcctgcggcaggttgctgacatcccaccgtccttggccaccagcttgtccccaagctagagcgtggggaaattactcctccagtggctgttcatcctcccaagtggccatagacggaggccacgttgatcaatgcgcaaggatttgagggggtcagtttgcgagcaagttgacaaaggcaatgatccaaaatggacaacagaatttgccaatttagatcaaggtcaggaatggtgacgttgacctggtgtgtttgtccctacccaatttcagttgggacacatgaaacaccaggtaaacttgattgaggaagccaaaccttatatgccattccattgattttgctggtgacaggaaaatgcccaaaataacgaaatgagagatcatagttggattggacactgcagaattctgagcatatgactgaagcttgacaaacaccagttcaccaaaattgagctacattcagatcgtcttttatctgtctaatgtttgaagtgctgatgtgcgcattcaagatgttgcctgaccagcactcctctaaccattcttgaaggaacatcactaaacagggacaagagtaatgcaaacaatgtcgaggagagtgtcaatatactacctcaaaagaagacttcctcaaagaatggaaacatgcagtataccaatactcagcaagatagagccactttccctactgttttggacaaagcatgtacaaagcacctgagatatgtctcaacacaccggtttactctttgaatctgccaatcagagtgaggatgattggaactgctcacactcagttgtgtgcctgcaaaatggaagaacgcttgccaagggctactagtgaaaatacagcccctgtctgagataatggtttggggcatcccttgaagcttaagaccttcaacatgtttgagcaagagtcataactataaatagatgtcagtgataaaaacttggcaactttagaaaatttgttgactaccaccaagatccattgtaactacttgccaagaatgttcaggtattggcaacggtaacagaaaccctggatacttcacatgctttggtttagcttgttgacagacctggcaccatgtgatgaagtcatggactgactgcttcatttgtagcgaagcaaacattgcctttaaattggaagtttttcctgtcaaatacttgggcttacctcttgtaacaccctgaattttgggtataaaaatttctttgctctatactcaaaatttaggtattaccctcttttccttacttttcttttccttttttctaaatagtggagagaatttgaattatatgtaggtgttaaccttaataaaataaaactctaaggaatgccatgattgttgcatacttgcatcatgctggagcatattttattttgtttgatgggtgattttgatacatattcataaaatttgtgagtgcacttgaggttggaaataaataggaagaaaggaaaataaaaaaggaaaaaac

SEQ ID NO: 52691 - DNA, 725 bp, Zea Mays
atgagcgtcgtggggctgttctccctgtacatcttggtgagcgccagctccagcgcgatcccgaacgccgtcgtcgtggagaagaagaacaccagccccgccttcatcctcgcgacgtacttcgcctgcaggatgcagccgccgagtcccatgccctcggagagctggtggaagcacatcgccgtcaccagcggccggatggtgcacacgttctgcgatttgggggcgcagggccgcggaccttccatccgcgcatccgaggaggaggtggcggcgcagtgagggggagaggaggaggaggaggtggcgtaggggctgcggacgcgcggaccttccatgcggatatgcgatttggggggcgggatccggatctggggtgacgacacctcgccggacggcacggaggacgacgttgaggcgactgccacgagccactccccccgagcttggtgacgaaccggctgtgcaggtgcagccgccgcacctgaggagtgtgccagcggcggatgttttgcagatctagtgcaggcatggcgggggcaaggggagcgcgaaagctgttgcacgccaggggagcgcgaaagctagttgagcggcgttgccggcgtgggcgtgggctgcggggagaggggaacgtcaggcggggggcgctcggtcgggggcacgacctcgcaggcgggggcgcgggtgagaagaaactggtagaggtcgcgaatgggagggcg

SEQ ID NO: 52692 - DNA, 4056 bp, Zea Mays
aggagtaacaatgtagactatggtaaattaatattttttaggaccacaaaacatatctgaaacaaaaaacaattaagaaaattatgttttttggggtccacaactatataaggcctaaagatctatacggagcaaaatgtttctcccgaaatactaagagttttgagctaataaattttaacaagaatctagatcatggcacttgacttaaaatattcaaacaaatgattatatatagttgtcttcatcagaattgaaaggattattttctaccaaaaaaaaggaaccaataataggtaaataagaatggtatggttagcattggttgttcttaggttgacctataggcaatttctaataaactggagaaataaaatttagaaaatatagtcagtgttcatctatttttacctagcatgaatcacatgctagtcttaatgacaacttctagacaatatcgacaacatttacaaaaagaaacagataaaataatggctcaccatccccttgtagttgtgaacacaaatgaagttgagcaagtggtacatgctctccttgtcatgtaagaggctttgatgacaggtgcctgctgagggactgcacaccattgccaatggactttgacagagaagaaaggggaaggaggcattggatagctcaagtccagctcaagaacaaacgccaaccttttcatcaacttgatcctgataatgttcgtagaatggtttaaccaacagagaaagcattatatctagaaaaaaatggtaagtttagtatggactatgcatattgagctatcataaaagaacagtacatccaaacaagggcctctagaatgctgagaaagatgacttcttgttcaagacaatgctactcacatgatacttcaactgcaaggattatgattcaaattatgctcaaataagtttacataaataacattgcagtgtcaaggcaaggtagtaatccaacgtcatgttataagtccaagaatacgactgtgcaaggacacatcaaaattgcatagggctattcactggtccatgtttggctttcagctaaaaaaaggaacatcctaaagattgatgcttgctgcttaactgaacaaaaacaaagcagaggtcacatattatcataccatataaatcccaaagagctcaagcaaataaattagctcggtgaagtagtataagtaaattgttgcagggtagctatgagtatcctcaaacaatatggatctgtcgagtggaaagtgggcagatcagatcaccttgtataggttgatcttcgtgatctgacaggagacgtcacaccaggtggtattggcaaccttgtatcctatgccccactctggtaggatctgcaccacgtcaaacaaattcttcctcctcttgtataccagagtagttcaaattttagttagattgcatatatgggcatacatagagtcaaaatgaagccgcataaaaaaattttccttccggcctgctagcaacagtttggaagaaacctctgagtgggacattaatcggcaaaacacaaattagtcagagccctggtaggaatgtaagaaaccagagcattcaaacggttatgtatacacagtaaaacaaacatatagctccactatgtcaaaaatgtgtgtaggtgttttctttcattttcatgatgaataaactgcacaaggatattacctgcacagcaacatgccataatagaaaaagagctaattttaggtgacctgggcagtggattaaattaaacagtccccatgtctacccataatgctttatttatgccagtggaagcatgtcctcacacacgcatgaaaaataacgacattatatctcctaccacataccaggttctcgggtttgactttaaaaacgtcggtttaccaattcatctgcattaccacctaaatgcaaaaaaagagaacctagagtttttttacacgcaatgcatgagtacataaacattttcagatggtcctattacagtttttatgcataagataagggaatatgggacggtttttcttttatatgcattagtaggaacagttgttgtgacactctttatgagtctaacatgacctgttttgaacagaaacatctatttgtgcatatagaggtctcattttctgaagaataactaaccattatcttaaatatgggataataatcaattccaagagagctcaatcactgtgatagctatttaacattgcacaccggcggatacaatcccccttcatacaacaaaccacagcaaagagatgtcaaatgatacttagattgcgagaaagtacaattccttgaaaggcatatacagcagcagggcttgctaaataaatgaggtgggggcaggacgggctttttaatatcagaataaatattgaaacaaaaagaagattcagttcagtgcaatgtttactaaaagctacaattgtgaggagaattgtcaccacgaatttaaaaatacacagcttcagaaaaaatcaaaccatcgtctcaaatgtattccaacgataaaaaagcatttagataactgtggtagcctacaacacagtaaaaaaatatagcacaaaatgagctcaccgataagttgagtgcccgtacactggtggcaataagatcatcgactaaaagagctcgatcgttggcctgtacagccccaacatgcatttctatcttatcagtgccaaattccagagaattttcttcagagatcacctcacctagataaaagtgttagctatctcatccatgatgaactcagaagtaacggggcacataccgttgcaaacccataaaaatagaaagcatcaccaaatacgtaatatgggaaagcaaagaatgtattgacgaaaaaacattatgaaaaatcctattactttgcattagtatcaataaccatctccttcatacacatgatattaagaggtgcatatgggcagatcataatttgcactgaaggagataaaatgcaatggaatgattgaaagggacaaaatgagatctctgacaggtaaaactcgttgattgctaattgagacacacctactaaaaaataaactgagcagttgttggtaatgtactggtactcagtgctaaaaatgtggctttccatgaggattgcctccatgagcccagtgctatatgggttcggactggatagtgatggcctccatgaccacgtacaagtatggaacagcaaaatcatttactgtcagctaaaaatacagtcaagctgatgcagcatcagcaagcagcgggggagccaacaaggcagcaggagctgctcagccagttggtgttcaacaacatgtgctctttccaggaagcgaggaatggaccccacattgacaataggtacggtactattgcaagctaagttcattgatttcacaggaaaaatgcaggacattccaattacttaatcagaggcaactgtaatttcagcctatcttctgaatctaaaacagtctgcaactgtaaccaaaccgaaactatacaagctaccaaactctaacgaaacttttctgaatctgaaacagtctgaatctaacgccttttctaacggcctttgaagtgttcgatctgacacctttactctgtgctcatgagcagagtagttaagctgacgaataaaagcatgatgaagggcattgtaatctggatgtgcatttttgtttcagctaggagaatggacattcgcaatgttttggtgtctcatgacgttcagttgctagcttgtgggcttgcggcatacagcctgtagttaactatcttcagagacccggtttcatgtatacattatacaggctggcaccttatccatgtgaaattttatagtaggacgcacctttgagatgagcagaactgcggcgacaagaaacaagaaatgttcaaactgatgcttaccagtgcataggcgacagtgcccaccggaacagcagcttcttatactgtttggataatttgagtttattcgactaatgaggctcaaaggtttgtgacatcattctgccatcatgcaagatccagaaacaag

SEQ ID NO: 52693 - DNA, 1687 bp, Zea Mays
tcccccttcactaataaaccttacccacgagctagccacggcgggccagtgacagtgtggccttcgcgctagcgccattgcataggctgctgggtgctgggtgggtggatagcggcgcccaggcatacgattccctgcgtcatctggctggccgacgggctgcgtgttttaacggctccactcctaacactggctgagctcagcccacacttggcctggcctcgttctgctgaagctcgacccgttccccctaatcttctccaatccctttcttctgggctctgacagggtgacgaatcccatgggcgccgcggcgaggaagcccgccgccgctggggtgttgccaatctggctctgcctcgtctgcgcgtcgagagcgcagccgtacatcggcgtcaactacggcgaggtggcggacaacctgccgtcggcggacgagacggcgaggctgctcaggtcgacgtccatctccaaggtgcggctgtacggcgtggacgcggggctgatccgcgcgctggcggggtccggcatctccgtggtggtgggcgtggcgaacggcgacatcccgtcgctggccgcggacccggcggccgcgtcccggtggctggccgccaacgtgctgcccttcgtcccggcgaccaccatctccgccgtggccgtcggcaacgaggtgctggagtccggggacgccaccctgggcgccgcgctgctcccggccatgcagaacctccgcgccgccgccgcggcggcggggggcggcgccgcggggatcaggttctccaccgtgaacaccatgggcgtgatggcgcagtcggacccgccgtcgacgggcgcgttccacccggacgtggctccgcagctgcagcagatcctggggttcctcagcaggaccggcgcgccgttcatgatcaacccgtacccgtggttcgcgtaccagtcggacccgcggccggacacgctggccttctgcctgttccagcccaacgcggggcgcgtggacggcgggtccaagatcaggtacaccaacatgttcgacgcgcagctggacgccgtgaagtcggcgctggtgcgcgccgggtacggggacgtggacgtcgtggtggcggagacggggtggccgaccaggggcgacgccggggagcccggcgccacggcggagaacgccagggcgtacgtgtccaacctggtggcgcacctgcggtccggcgccggcacgccgctgatgcctgggaaggcggtggagacgtacctgttcgcgctgtacgacgaggacctcaagcccgggcccacgtcggagcgctcgttcgggctgtaccacacggacctcagcatggcctacgacgccaataatgcacggcgcactggaagaaatttcccgttccttttcagctgcaggctacggggcatgcagtgcagatcctcttgtttgtttcgtcgtaccggaagaaatttcccgttccttttcagctgccctgactgcctgcctgccttgggacaggctgggatgtgtcatgtgtgagtgtgacttcgtgtaaaagaactattggacgctgtcagtgtcgccgtgagctctgtggacggtagtagtacatgtgtctaatgtacaagtagagtgagattgtatctatatatgtattttttccctaaaaataaaacttcattcggctctcatcggaatgcgagatta

SEQ ID NO: 52694 - DNA, 2030 bp, Zea Mays
tcccccttcactaataaaccttacccacgagctagccacggcgggccagtgacagtgtggccttcgcgctagcgccattgcataggctgctgggtgctgggtgggtggatagcggcgcccaggcatacgattccctgcgtcatctggctggccgacgggctgcgtgttttaacggctccactcctaacactggctgagctcagcccacacttggcctggcctcgttctgctgaagctcgacccgttccccctaatcttctccaatccctttcttctgggctctgacagggtgacgaatcccatgggcgccgcggcgaggaagcccgccgccgctggggtgttgccaatctggctctgcctcgtctgcgcgtcgagagcgcagccgtacatcggcgtcaactacggcgaggtggcggacaacctgccgtcggcggacgagacggcgaggctgctcaggtcgacgtccatctccaaggtgcggctgtacggcgtggacgcggggctgatccgcgcgctggcggggtccggcatctccgtggtggtgggcgtggcgaacggcgacatcccgtcgctggccgcggacccggcggccgcgtcccggtggctggccgccaacgtgctgcccttcgtcccggcgaccaccatctccgccgtggccgtcggcaacgaggtgctggagtccggggacgccaccctgggcgccgcgctgctcccggccatgcagaacctccgcgccgccgccgcggcggcggggggcggcgccgcggggatcaggttctccaccgtgaacaccatgggcgtgatggcgcagtcggacccgccgtcgacgggcgcgttccacccggacgtggctccgcagctgcagcagatcctggggttcctcagcaggaccggcgcgccgttcatgatcaacccgtacccgtggttcgcgtaccagtcggacccgcggccggacacgctggccttctgcctgttccagcccaacgcggggcgcgtggacggcgggtccaagatcaggtacaccaacatgttcgacgcgcagctggacgccgtgaagtcggcgctggtgcgcgccgggtacggggacgtggacgtcgtggtggcggagacggggtggccgaccaggggcgacgccggggagcccggcgccacggcggagaacgccagggcgtacgtgtccaacctggtggcgcacctgcggtccggcgccggcacgccgctgatgcctgggaaggcggtggagacgtacctgttcgcgctgtacgacgaggacctcaagcccgggcccacgtcggagcgctcgttcgggctgtaccacacggacctcagcatggcctacgacgccgggctggcctcctccgcggcggcggggggtcggggcgggggcgggggcggcgcggcgcagcccaggggcggcgggtggtgcgtggcgcgggccggcgcctcggacgcggagctgcaggcggacctggactacgcgtgctcgcaggtgggcgtcgactgcagcgccatccagcccggcggcgcctgcttcgagcccaacacggtgcgcgcgcacgccgcgtacgccgtgaaccagctgtaccaggcggccgggcggcacccgtggaactgcgacttccgggcgtccgccacgctcacctccgacgacccaagctacggggcatgcgtgtacaccgggggaggccaataatgcacggcgcactggaagaaatttcccgttccttttcagctgcaggctacggggcatgcagtgcagatcctcttgtttgtttcgtcgtaccggaagaaatttcccgttccttttcagctgccctgactgcctgcctgccttgggacaggctgggatgtgtcatgtgtgagtgtgacttcgtgtaaaagaactattggacgctgtcagtgtcgccgtgagctctgtggacggtagtagtacatgtgtctaatgtacaagtagagtgagattgtatctatatatgtattttttccctaaaaataaaacttcattcggctctcatcggaatgcgagatta

SEQ ID NO: 52695 - DNA, 4676 bp, Zea Mays
cggcgtcttccacctcctgacgtcccggcgctgaaaaattaaagccgacacgaggaaaaaggcaggcaggcaggcacgctcccgcacgaacttccgtcctactcccaacacctcctcgccgtctccaccggggcacggccccgctctgctcctcgctgtccccgatcccttctcttcagatctgccgcccatgccggctccccgctccggaccctagccgctagccgcccgggcccacccgccgcgcccccaaaatgggccgccccaggatgctcaccgccgccggtggcatcgaccccatcgccgaggagccccaccacgcgcgctcccccgccgatggcgggctcgggcccgacccggcggccctcgcctgcgcgatctctgccgaggccagcaccgtgctcgccgtcatgcgccggggcctccggcacccgcgtgccacggccgcggacgacgccgcggccgaacacccgctcgttgcctccctccgcgggctccgccgcctcgccttctcgccgtccccctcggccgccgccgcgctccccgccgccgcgctgcggcccttcctcgatgccgtccgctccgaggacgccggcgccgccgccacctccgcctcgctcgccgcgctccacgaggtcatgtccctcacgggccccgcgctcccgggcgccgcgctccgggaggtcgtcgacgccgtcgccagctgccggttcgaggccgggaccgagcccgccgccgaggaggccgtgctcatgaggatgctgcaggcgctcctcgcctgcctccgcgcgcccgccgcgcccgcgctcggggaccagcatgtctgcaccgccgtcaacacctgcttccgtgtcgtccaccaggccgcggccaagggcgagctcctgcagcgattctcgcgccacgtgatgcacgaactcatccgatgcatcttcgcacgcctcccgcagataggcggtgctgacggagttgacggtgctgtcaagccagagatgggtggcatggatatgaatcatccttttggtatcaaacaaatggaaaatggtaatggaagctatgtgtccgagacagattggcttagatgaagatcttcctttgtttgctcttaaattgatcaattcagcgatagagcttggtgggtcttcaattcagaaacatccaaagctgttgtccttggtgcaagatgagcttttcagaaacttaatgcagtttgggttgtcaatgagtccactcatcctttcaatagtatgcagtattgcattgaacctttaccatcatctccggactgagctgaagctgcagcttgaggcttttttttcttgtataattataaggcttgcacaacctcgttttggagcaacatatcatcagcaggaggttgcaatggaagctcttgtagacttctgtcgacagaaaaattttatggtggagatgtatgccaatcttgactgtgatataacctgcaggaatgtttttgaggagcttgcaaatcttctatcaaagagtgcttttcctatcaactgccccttatcttccatgcacattcttgctctagaaggtttgattgctgtgattcaggggatggctgatcgtatcgggaatgcagtctcacgccctgagctcctgcctgtggagcttgatgaatacactcctttctggactgttaagtgtgagaacttttctgatcctcggcattgggtgaagtttgtccgtcaaaggaagtatgtcaaaaggaggctaatgattggtgctgatcatttcaacagggacccaaagaaaggtctggagtttcttcaaggcactcatctgttgcctgagaagcttgatccccagagtgtggcttgttttttccgctatacagctggtttggataagaatcttgttggagatttcctaggcaatcatgatgagttttgtgttcaggtgcttcatgagttcgctcagacctttgatttccaggagatgaacctggatacagctctgcgtctatttttggagactttccggcttcctggtgaatctcagaagatacagagggttcttgaggccttctcagacagatactatgagcagtcccctcagtctttcgcaaacaaggacactgctctactgctgtcatattccattataatgctgaacactgatcagcataacatgcaagtgaagaagaagatgactgaggacgacttcatcaagaacaatagaaacataaatgggggcagtgatctcccacgtgagatgttgtctgagctatatcactcaatctgccgaaatgagattaagacaacacctgagcagggtttgggatattttgaaatgtctcctagtcgttggatagatctaatgcggaagtcaaaatctacgtccccatatatcatcggtgactctcagcctttcctggaccatgatatgtttgctgttatgtctggccctactattgctgccattgcagtggtattcgatcattcggagcatgaagaagttcttttgacttgtatagaaggctttttgggtgttgcaaagatatctgcatttcatcatctcgaggatgttctggacgatcttgttgtttctctatgcaaattcacgactctcttgaatacttctttggttgaggagccagttactgcctttggagatgaccttaaagctaggttggcaactgagacattatttactatagctaacagatatggggattatatacgcaccggctggaggaatgtattggattgcatcctgaggctgcataaacttgggcttctccctgcccgtgttgctagtgatgcagctgatgattccgaacttcctgctgaagcagtccaacgaaaggctgctcctagttcagttcccccatctcatattccagtgatgggcacacctcgcaaatcatccggactcatgggaagatttagtcagctgctctctcttgacagtgaagaaccaagatcacaaccaactgagcagcaacttgccgctcaccagaggactcttcaaacaattcagaaatgccgcatcgatagtatatttacagagagcaaattcttgcagcctgattcactactgcaacttgccaaggctctgatttgggctgcaggccggcctcaaaaggttgccagttcgcctgatgacgaggatacagcagttttctgcttggagctgctgattgccataacccttaataatcgagacaggatcgtgctcctctggcaaggtgtatacgagcatattgccagcatagttcagtccacagttatgccgtgtgctctcgtggagaaagctatttttggactcctgaggatatgccagaggttgctaccatacaaggagaatcttgctgatgaattactgaggtcgttgcagttagttctcaagctcgacgcacgggtagcagatgcgtattgtgagaacatcacacaggaggttgcacggctcgtcaaagcaaatgcggcacatataaagtcacagatgggctggagaacagtaatattgctgctctccattacagcacgccatccagatgcttccgaagtcggttttgaggctatcgtgttcatcatgacagagggggctcacctttcactagcgaactatggcttctgcatcgatgcggcacggcagtttgccgagtctagagttggtttagctgataggtctgtccgtgccctggacttgatgtccgactccgtcagaaaccttgccttgtggtcccaagagataaaagcgacgacatttgaagaaggcgagaaagggccggaggcgataagggagatgtggctcaggctgctgcaagcactgaagaaactgagcctggatcagagggaggaggtgcgaaaccatgcgctggcttctctccagcgatgcctaacatccacgggagaactctgcctccagtccgcgacgtggtcccatgcctttgacctcgtcatattctccttgctcgatgatttgctggagatcagccagaaccactcccagaaggactacagaaacatggaagggtcacttgtgctcgccatgaagctggttgcgaaggtatacctccagctcttgccggaccttttcggcctaagcagtttctgcaagctgtggctgggggtcctgagccggatggagaagtacgtcaaggtcaaggtccgaggcaagcggagcgaccggctgcaggaggtggtcccggacctgctcaagaacatcctgctcgtgatgaagagcaagggcatccttgcgaagaggagcacgatcgggggcgacagcctgtgggagctgacgtggcttcacgcgaacaacatctcgaccagtctgctgcctgatgtttttccaagccaggagtacgagcaacagagcagcaccggtagcccaagagggcccagtcctgttgaggcgtagcggtcaatgttttaacttgtgtgcgaccgtgtgtgtatgttttatttgttttactaggtttactactgctcgtgccctaatccattgaaagtgtaaggtttcgatattgtgattgcgtttcgcctccacggcaagtactatagcatgtgccctaatccattgaaaaacatgcttatgtttctgtgaattatttagttactagtccataatcctatcagaatgctcatttttgctaggaagatgtcatgatgtacatctgaatataatataagaacagaacttcaacgggt

SEQ ID NO: 52696 - DNA, 1316 bp, Zea Mays
tgatgatatggtcttctttctgtgctcacaacacaatcattgagctgataagatatgcttagatcatactaattctgtttctatctgggacctaacaaaagagagggagatatggttatggttagcatgtgcaagcagaactgttcacgcgtcaggtactcaggtcaccaagcttgctctatctcacttgacgtgtgatgcggacactacaccgtcaagggctccatgcataataaaatatatggcttcctaaaactgtaatattgtggcagtgtaatccagggccactttcttttaagaaccaccaatgctgtttctttggattaaacgctactaatttgaagatattgagttaatatgcacactgcaaatacttgattgcttcaacatcccttgtcaaaataaatagtgcaacaccaaaggcattcatatatattggagaactctcttccaatgtgcaatggcaacgattctggataatagtgtaactctagttagcaacatagttgtgatactgtgatttaataacagttcaaagtcgtggtctagtcccttatttttttataagacattgtggtctagttatctgaatactggacaactagtatgctttgggcaccatttctgtagttcatggaattatagctcaatgaacagagtagcttatcttcttatgatcttggttttgtcaagtattcacgtcctatggctgaaaaactgttacctaatttttggagtctgtcgtgcccagtgagatcaaaggtggatgcagacctaaaaacatagcactagaggtgttcgtagataattaatcacagctgaacgatgcatttcaattgtgaatcatctagtaagcagtaagctcctatggccacgcgaaacatcatttctattgcacatattcaccgtgccatcacagcactgacaatctgatacaaactgtaatgcttatatgcaagctatttcagggaagttgattcagaatttcaactgctgcagcggatagggtagttatcatataaactgtagaaccgacacaaacggacgtaaccgtaatggcactgacacgcagtggaagtgcagcgttgcaaacgaccatgccgtccagaacccaagcaccatgagccatgggtcatttcgcaatgattttgcatgattaagaaagggaaatgctaacagaggagcgaggcagtgcctggtgcgctcgccacaagttaacactcgagtacagagagcaagcacctgcgctgtgcgtcttcctgtgccctcgcaatccgtcaagcacctggtgggagcgcgtgacccggggatgcctg

SEQ ID NO: 52697 - DNA, 386 bp, Zea Mays
ctccagttcaaggaatcaaggcacatagaaagcagtagcagcaaacaagcaagcaagcaatggagatagaatcggtcaagtgcgagtgctgtggcctgaaggaggactgcaccccgcactacattgccagcgtgagatcaggcttccatggccaatggttgtgtgggctgtgctgtgaggcggtcagagatgaagcatgcaggaggaaggctcaccatggagtagaggaggctgtgagggctcacatggcgttctgcaacatgttcaagttgaaccccgccgtccgcgtggccgacggcatgcgccagatgctccggaggcggtccggtgatatgtcaaagccagaatcggccaagaagtacgaatcatcagtgacactgtattga

SEQ ID NO: 52698 - DNA, 297 bp, Zea Mays
attttaataggcaatctacttttggggttgcatgtggttgggacattaaaagatcatatttttattttttatttttttagataaaggaagcttgtattgaaaataccaagtcattacatcaagaggatacaaatccttggtacagaacttccgacctctgcctaatgcacatagccaactaaaaaaaaaccaaaaaagacattgatctaatgataaccgatccgaagcctagatcgccacccgtgcctccgggagaaaaacgtcgtggccaccctcaccaaggttcgtgatcctgtt

SEQ ID NO: 52699 - DNA, 2657 bp, Zea Mays
cgggggcagctcctaggctcgctcctgttctgcatctgtggcgtttctttattggcccggagcagcggcagcgcttaactgtttccgccattgatccggcgacctcagctctggctttgcccttgtttgtggaaccggaaagccttttctcagcgctcaaaatcccgcatatgatctggtgctgggggttgccaccaacaggttgttgcccctgcccccgtaatccttgccccctttgctccttgctttcttctctgtgctgcctttgaagtgttgccagatcgctcttgggagatcactggttcgttagccggcccatagtttgtggacaaacaagggccagttcggtctatttcatttcacagaaggggaaaaaattaggcggcgggatcctgctctttcctgcatggtcccttttggagatactgtttgggttgggaggaagtaaaagcggacaagcttggaggttccgaggagggaggaacatatccctttgtagctgcatgaggaggcactgagacaatgagagatgacaactcaagcaagaacaagctgtcctggtccaagacccttgttaggaagtggttcaacatcaaaacaaaggcgaaggatttccattcggattatgcagccgaggaagccggagtgcagtggaggaccagcttctcggatagagacgcatgtaaatccaagaaaagcaggacagagaggttgactaagaggaacgtggagcgagatggtagagtagaaaacggatttgatggtgcttatattacaaacacgcaggactacagggtcttcgttgctacatggaatgtcggcggaaggtcaccatctagtcatttgaacctggaagactggcttcatacttctcctgctgctgatatatatgtgatagggtttcaggaaattgttcccttgaacgctggtaatgttctgttgaccgaagacaacggtccagcgaagaagtgggtttctctcgttagaaaaactctaaacaaccttgaccaacaaggctccggtgtctataattaccacactccctcgccggctccagacccaatcgtggagctcaatgttgacttcgagcgatcatcaaggaggcaacggaactcgtcgtttttccatcgccgttcgttccagtccttgaaccgcagctcaaggatcgacatgatggatccgcactcgttagtggaccgtcgattcagtgtctgcgaccggatcagcttcgggagcaggccaagtgacgttgacaccagcgtgaggtgtggtgggtcgtctgatgatgagactattgacgaggaatcgcctagcggtatgttcttcccaccgatgccgtgtgcgtatggtgctccactatgcgatggttctaggtattgcttagtcgccagcaagcaaatggttgggatttttctcatggtgtgggtacgaagtgacataagggagcatgtgaagaacctgaaggtttcatgtgtgggtagaggcctgatgggctaccttggaaacaagggatccatatcaatgagcatgtctctgcatcagacaagcttctgcttcgtttgcacccacttgacatcaggccaaaaggacggagaccagcttaggcgaaacgcagacgtagtggagatcctgaggaagaccaggttcccgcacgttcacggagcaggtgaagagaagtcaccggagacgatcctggatcacgatcgtgttatttggcttggggacctgaactaccggatcgcgctttcctaccgctcggtgaaggctttggttgagatgcacaactggaagcagttgctggaaaaggaccagcttcgcatagagcaaaggtttggccgggtcttcgcgggctggagagaagggaggatctacttcccgcccacctacaagtactcgtacaactccgacaggtacgccggcgacgacatgcggccaaacgagaagcggaggacaccggcatggtgtgatcggatcctatggtacgggcgaggcctgtcccagctgtgctacgtgcgtggcgagtctcggttctcggaccacaggcccgtgtacagcgtattcacggcggaggttcggattccgagccagcagcaggcagcggctcagttcggcggcggcggcggcggcattactcgttccgcgtccctcctggggctggcgctggacgagctgccttatccacgcagttacatggacatcaatttttactgatcgactgcgcgtgtctcgatggaggacgaaaggagccagccaagccaagggttcaccttctgatggctggctctggctgggtgaagttcatttctcccaaggttccatcggtcggcatgttttgtactagctaacagatagatattcgaggaggtgctttctgactgtaagattaggtatgatccgctgaacggcaaagaccatcagtgctagttttgaatgtaaacgtcgagtcccggttttcgggagagagaaaaaagggagtgttttgtgtcccaggcaccaccttggaagaaggccgtcctggtttcacctttctgtttgttttttttcttctttttggcgtcctgatgtagcaatagtaatgtaacaagagcagccagagccgcgccatgaaaatatttttcttactagtcggaatgaaatggcggcttgttgtacagcga

SEQ ID NO: 52700 - DNA, 2629 bp, Zea Mays
ccgtgttcccgggggcagctcctaggctcgctcctgttctgcatctgtggcgtttctttattggcccggagcagcggcagcgcttaactgtttccgccattgatccggcgacctcagctctggctttgcccttgtttgtggaaccggaaagccttttctcagcgctcaaaatcccgcatatgatctggtgctgggggttgccaccaacaggttgttgcccctgcccccgtaatccttgccccctttgctccttgctttcttctctgtgctgcctttgaagtgttgccagatcgctcttgggagatcactggttcgttagccggcccatagtttgtggacaaacaagggccagttcggtctatttcatttcacagaaggggaaaaaattaggcggcgggatcctgctctttcctgcatggtcccttttggagatactgtttgggttgggaggaagtaaaagcggacaagcttggaggttccgaggagggaggaacatatccctttgtagctgcatgaggaggcactgagacaatgagagatgacaactcaagcaagaacaagctgtcctggtccaagacccttgttaggaagtggttcaacatcaaaacaaaggcgaaggatttccattcggattatgcagccgaggaagccggagtgcagtggaggaccagcttctcggatagagacgcatgtaaatccaagaaaagcaggacagagaggttgactaagaggaacgtggagcgagatggtagagtagaaaacggatttgatggtgcttatattacaaacacgcaggactacagggtcttcgttgctacatggaatgtcggcggaaggtcaccatctagtcatttgaacctggaagactggcttcatacttctcctgctgctgatatatatgtgatagggtttcaggaaattgttcccttgaacgctggtaatgttctgttgaccgaagacaacggtccagcgaagaagtgggtttctctcgttagaaaaactctaaacaaccttgaccaacaaggctccggtgtctataattaccacactccctcgccggctccagacccaatcgtggagctcaatgttgacttcgagcgatcatcaaggaggcaacggaactcgtcgtttttccatcgccgttcgttccagtccttgaaccgcagctcaaggatcgacatgatggatccgcactcgttagtggaccgtcgattcagtgtctgcgaccggatcagcttcgggagcaggccaagtgacgttgacaccagcgtgaggtgtggtgggtcgtctgatgatgagactattgacgaggaatcgcctagcggtatgttcttcccaccgatgccgtgtgcgtatggtgctccactatgcgatggttctaggtattgcttagtcgccagcaagcaaatggttgggatttttctcatggtgtgggtacgaagtgacataagggagcatgtgaagaacctgaaggtttcatgtgtgggtagaggcctgatgggctaccttggaaacaagggatccatatcaatgagcatgtctctgcatcagacaagcttctgcttcgtttgcacccacttgacatcaggccaaaaggacggagaccagcttaggcgaaacgcagacgtagtggagatcctgaggaagaccaggttcccgcacgttcacggagcaggtgaagagaagtcaccggagacgatcctggatcacgatcgtgttatttggcttggggacctgaactaccggatcgcgctttcctaccgctcggtgaaggctttggttgagatgcacaactggaagcagttgctggaaaaggaccagcttcgcatagagcaaaggtttggccgggtcttcgcgggctggagagaagggaggatctacttcccgcccacctacaagtactcgtacaactccgacaggtacgccggcgacgacatgcggccaaacgagaagcggaggacaccggcatggtgtgatcggatcctatggtacgggcgaggcctgtcccagctgtgctacgtgcgtggcgagtctcggttctcggaccacaggcccgtgtacagcgtattcacggcggaggttcggattccgagccagcagcaggcagcggctcagttcggcggcggcggcggcggcattactcgttccgcgtccctcctggggctggcgctggacgagctgccttatccacgcagttacatggacatcaatttttactgatcgactgcgcgtgtctcgatggaggacgaaaggagccagccaagccaagggttcaccttctgatggctggctctggctgggtgaagttcatttctcccaaggttccatcggtcggcatgttttgtactagctaacagatagatattcgaggaggtgctttctgactgtaagattagttttgaatgtaaacgtcgagtcccggttttcgggagagagaaaaaagggagtgttttgtgtcccaggcaccaccttggaagaaggccgtcctggtttcacctttctgtttgttttttttcttctttttggcgtcctgatgtagcaatagtaatgtaacaagagcagccagagccgcgccatgaaaatatttttcttactagtcggaatgaaatggcggcttgttgtacagcga

SEQ ID NO: 52701 - DNA, 2331 bp, Zea Mays
attggcccggagcagcggcagcgcttaactgtttccgccattgatccggcgacctcagctctggctttgcccttgtttgtggaaccggaaagccttttctcagcgctcaaaatcccgcatatgatctggtgctgggggttgccaccaacaggttgttgcccctgcccccgtaatccttgccccctttgctccttgctttcttctctgtgctgcctttgaagtgttgccagatcgctcttgggagatcactggttcgttagccggcccatagtttgtggacaaacaagggccagttcggtctatttcatttcacagaaggggaaaaaattaggcggcgggatcctgctctttcctgcatggtcccttttggagatactgtttgggttgggaggaagtaaaagcggacaagcttggaggttccgaggagggaggaacatatccctttgtagctgcatgaggaggcactgagacaatgagagatgacaactcaagcaagaacaagctgtcctggtccaagacccttgttaggaagtggttcaacatcaaaacaaaggcgaaggatttccattcggattatgcagccgaggaagccggagtgcagtggaggaccagcttctcggatagagacgcatgtaaatccaagaaaagcaggacagagaggttgactaagaggaacgtggagcgagatggtagagtagaaaacggatttgatggtgcttatattacaaacacgcaggactacagggtcttcgttgctacatggaatgtcggcggaaggtcaccatctagtcatttgaacctggaagactggcttcatacttctcctgctgctgatatatatgtgatagggtttcaggaaattgttcccttgaacgctggtaatgttctgttgaccgaagacaacggtccagcgaagaagtgggtttctctcgttagaaaaactctaaacaaccttgaccaacaaggctccggtgtctataattaccacactccctcgccggctccagacccaatcgtggagctcaatgttgacttcgagcgatcatcaaggaggcaacggaactcgtcgtttttccatcgccgttcgttccagtccttgaaccgcagctcaaggatcgacatgatggatccgcactcgttagtggaccgtcgattcagtgtctgcgaccggatcagcttcgggagcaggccaagtgacgttgacaccagcgtgaggtgtggtgggtcgtctgatgatgagactattgacgaggaatcgcctagcggtatgttcttcccaccgatgccgtgtgcgtatggtgctccactatgcgatggttctaggtattgcttagtcgccagcaagcaaatggttgggatttttctcatggtgtgggtacgaagtgacataagggagcatgtgaagaacctgaaggtttcatgtgtgggtagaggcctgatgggctaccttggaaacaagggatccatatcaatgagcatgtctctgcatcagacaagcttctgcttcgtttgcacccacttgacatcaggccaaaaggacggagaccagcttaggcgaaacgcagacgtagtggagatcctgaggaagaccaggttcccgcacgttcacggagcaggtgaagagaagtcaccggagacgatcctggatcacgatcgtgttatttggcttggggacctgaactaccggatcgcgctttcctaccgctcggtgaaggctttggttgagatgcacaactggaagcagttgctggaaaaggaccagcttcgcatagagcaaaggtttggccgggtcttcgcgggctggagagaagggaggatctacttcccgcccacctacaagtactcgtacaactccgacaggtacgccggcgacgacatgcggccaaacgagaagcggaggacaccggcatgggtgtgatcggatcctatggtacgggcgaggcctgtcccagctgtgctacgtgcgtggcgagtctcggttctcggaccacaggcccgtgtacagcgtattcacggcggaggttcggattccgagccagcagcaggcagcggctcagttcggcggcggcggcggcggcattactcgttccgcgtccctcctggggctggcgctggacgagctgccttatccacgcagttacatggacatcaatttttactgatcgactgcgcgtgtctcgatggaggacgaaaggagccagccaagccaagggttcaccttctgatggctggctctggctgggtgaagttcatttctcccaaggttccatcggtcggcatgttttgtactagctaacagatagatattcgaggaggtgctttctgactgta

SEQ ID NO: 52702 - DNA, 2304 bp, Zea Mays
ctcctgttctgcatctgtggcgtttctttattggcccggagcagcggcagcgcttaactgtttccgccattgatccggcgacctcagctctggctttgcccttgtttgtggaaccggaaagccttttctcagcgctcaaaatcccgcatatgatctggtgctgggggttgccaccaacaggttgttgcccctgcccccgtaatccttgccccctttgctccttgctttcttctctgtgctgcctttgaagtgttgccagatcgctcttgggagatcactggttcgttagccggcccatagtttgtggacaaacaagggccagttcggtctatttcatttcacagaaggggaaaaaattaggcggcgggatcctgctctttcctgcatggtcccttttggagatactgtttgggttgggaggaagtaaaagcggacaagcttggaggttccgaggagggaggaacatatccctttgtagctgcatgaggaggcactgagacaatgagagatgacaactcaagcaagaacaagctgtcctggtccaagacccttgttaggaagtggttcaacatcaaaacaaaggcgaaggatttccattcggattatgcagccgaggaagccggagtgcagtggaggaccagcttctcggatagagacgcatgtaaatccaagaaaagcaggacagagaggttgactaagaggaacgtggagcgagatggtagagtagaaaacggatttgatggtgcttatattacaaacacgcaggactacagggtcttcgttgctacatggaatgtcggcggaaggtcaccatctagtcatttgaacctggaagactggcttcatacttctcctgctgctgatatatatgtgatagggtttcaggaaattgttcccttgaacgctggtaatgttctgttgaccgaagacaacggtccagcgaagaagtgggtttctctcgttagaaaaactctaaacaaccttgaccaacaaggctccggtgtctataattaccacactccctcgccggctccagacccaatcgtggagctcaatgttgacttcgagcgatcatcaaggaggcaacggaactcgtcgtttttccatcgccgttcgttccagtccttgaaccgcagctcaaggatcgacatgatggatccgcactcgttagtggaccgtcgattcagtgtctgcgaccggatcagcttcgggagcaggccaagtgacgttgacaccagcgtgaggtgtggtgggtcgtctgatgatgagactattgacgaggaatcgcctagcggtatgttcttcccaccgatgccgtgtgcgtatggtgctccactatgcgatggttctaggtattgcttagtcgccagcaagcaaatggttgggatttttctcatggtgtgggtacgaagtgacataagggagcatgtgaagaacctgaaggtttcatgtgtgggtagaggcctgatgggctaccttggaaacaagggatccatatcaatgagcatgtctctgcatcagacaagcttctgcttcgtttgcacccacttgacatcaggccaaaaggacggagaccagcttaggcgaaacgcagacgtagtggagatcctgaggaagaccaggttcccgcacgttcacggagcaggtgaagagaagtcaccggagacgatcctggatcacgatcgtgttatttggcttggggacctgaactaccggatcgcgctttcctaccgctcggtgaaggctttggttgagatgcacaactggaagcagttgctggaaaaggaccagcttcgcatagagcaaaggtttggccgggtcttcgcgggctggagagaagggaggatctacttcccgcccacctacaagtactcgtacaactccgacaggtgtgatcggatcctatggtacgggcgaggcctgtcccagctgtgctacgtgcgtggcgagtctcggttctcggaccacaggcccgtgtacagcgtattcacggcggaggttcggattccgagccagcagcaggcagcggctcagttcggcggcggcggcggcggcattactcgttccgcgtccctcctggggctggcgctggacgagctgccttatccacgcagttacatggacatcaatttttactgatcgactgcgcgtgtctcgatggaggacgaaaggagccagccaagccaagggttcaccttctgatggctggctctggctgggtgaagttcatttctcccaaggttccatcggtcggcatgttttgtactagctaacagatattcgaggaggtgctttctgactgta

SEQ ID NO: 52703 - DNA, 2376 bp, Zea Mays
cgggggcagctcctaggctcgctcctgttctgcatctgtggcgtttctttattggcccggagcagcggcagcgcttaactgtttccgccattgatccggcgacctcagctctggctttgcccttgtttgtggaaccggaaagccttttctcagcgctcaaaatcccgcatatgatctggtgctgggggttgccaccaacaggttgttgcccctgcccccgtaatccttgccccctttgctccttgctttcttctctgtgctgcctttgaagtgttgccagatcgctcttgggagatcactggttcgttagccggcccatagtttgtggacaaacaagggccagttcggtctatttcatttcacagaaggggaaaaaattaggcggcgggatcctgctctttcctgcatggtcccttttggagatactgtttgggttgggaggaagtaaaagcggacaagcttggaggttccgaggagggaggaacatatccctttgtagctgcatgaggaggcactgagacaatgagagatgacaactcaagcaagaacaagctgtcctggtccaagacccttgttaggaagtggttcaacatcaaaacaaaggcgaaggatttccattcggattatgcagccgaggaagccggagtgcagtggaggaccagcttctcggatagagacgcatgtaaatccaagaaaagcaggacagagaggttgactaagaggaacgtggagcgagatggtagagtagaaaacggatttgatggtgcttatattacaaacacgcaggactacagggtcttcgttgctacatggaatgtcggcggaaggtcaccatctagtcatttgaacctggaagactggcttcatacttctcctgctgctgatatatatgtgatagggtttcaggaaattgttcccttgaacgctggtaatgttctgttgaccgaagacaacggtccagcgaagaagtgggtttctctcgttagaaaaactctaaacaaccttgaccaacaaggctccggtgtctataattaccacactccctcgccggctccagacccaatcgtggagctcaatgttgacttcgagcgatcatcaaggaggcaacggaactcgtcgtttttccatcgccgttcgttccagtccttgaaccgcagctcaaggatcgacatgatggatccgcactcgttagtggaccgtcgattcagtgtctgcgaccggatcagcttcgggagcaggccaagtgacgttgacaccagcgtgaggtgtggtgggtcgtctgatgatgagactattgacgaggaatcgcctagcggtatgttcttcccaccgatgccgtgtgcgtatggtgctccactatgcgatggttctaggtattgcttagtcgccagcaagcaaatggttgggatttttctcatggtgtgggtacgaagtgacataagggagcatgtgaagaacctgaaggtttcatgtgtgggtagaggcctgatgggctaccttggaaacaagggatccatatcaatgagcatgtctctgcatcagacaagcttctgcttcgtttgcacccacttgacatcaggccaaaaggacggagaccagcttaggcgaaacgcagacgtagtggagatcctgaggaagaccaggttcccgcacgttcacggagcaggtgaagagaagtcaccggagacgatcctggatcacgatcgtgttatttggcttggggacctgaactaccggatcgcgctttcctaccgctcggtgaaggctttggttgagatgcacaactggaagcagttgctggaaaaggaccagcttcgcatagagcaaaggtttggccgggtcttcgcgggctggagagaagggaggatctacttcccgcccacctacaagtactcgtacaactccgacaggtacgccggcgacgacatgcggccaaacgagaagcggaggacaccggcatggtgtgatcggatcctatggtacgggcgaggcctgtcccagctgtgctacgtgcgtggcgagtctcggttctcggaccacaggcccgtgtacagcgtattcacggcggaggttcggattccgagccagcagcaggcagcggctcagttcggcggcggcggcggcggcattactcgttccgcgtccctcctggggctggcgctggacgagctgccttatccacgcagttacatggacatcaatttttactgatcgactgcgcgtgtctcgatggaggacgaaaggagccagccaagccaagggttcaccttctgatggctggctctggctgggtgaagttcatttctcccaaggttccatcggtcggcatgttttgtactagctaacagatattcgaggaggtgctttctgactgta

SEQ ID NO: 52704 - DNA, 728 bp, Zea Mays
ctcccgggctgcacgtgggcacacaaaacattactgacatgattttgtataagcataagctaatgcagctactgatgctggcaattcttctaaacaagtctatactagtaataaatgatacacaataagagagcatgtgcaagtacagattttgttttcttcaattttaatttggggaactctagtcttcgcgtacggaaagtagtttagtgggaatgtttaaggattctggtagaacaactgcttcatataaaaaacagagttccagaaagggtctaactgtaatcacaaggggaatggaatttggacttggagaataaatgacttttaaaaatcatactggtagtaaccacttggaaccaccgaaccacaaactgtgtactcgtaaagtgtagaatggttttccaattagtagcttggaggaaaaaaaaacattctacgatgggaattagtagcgataagtttttcctttttcttaaaaaaaaacacctaggggtcaaggtgcctctttcaactcaatcaaacatctgtcgctaccaatttgacaacttgtcactacacaagaaatgaaggatcgatcacatcgctcgatttcttggccagccgtcatcatgtacagagggagcaaacccgcggccagaaggaaaccgcgcgagcgggtccgatccgatccgaatcggaaaacagaggtggaggcagaggaaattcaaacacagcacggggccgag

SEQ ID NO: 52705 - DNA, 258 bp, Zea Mays
atgtgtgcctgcgattcctgtggacgtcgctcttatttacacgcgtcattaaatgctgtcttatttattcgcagatcatggcatatatactatagggtatgccttagagagttggttggtccaaatcagacggagcatgtggctgtgcatgtggactcgcatgggttcgatcgtatcggcagaattattggcaggtggtactcccatttgatcactagtacaatgattgacgactgcaatatatgtatctcaagctga

SEQ ID NO: 52706 - DNA, 922 bp, Zea Mays
acgcagacatgtcgtcgatcttttctgtcatctttttattttttttttcttgctccaataatcatctactgctgcagcctgcagctggttggtccgtccgaatccgatagcactactttcctagctagctaggcgatcgatcggtgtttctttgctaccggagtacatacatcgatctctacgtatcgatgtgcacgatccaagtgaagagagatcccggcgcagcaccgaggggacgcggtgagcagcctggtgtacgaggccaacgcgcgcgtcagggacccggtgtacggctgcgtgggcgccatctcgtcgctgcaggagcaggtggaggcgctgcaggcgcagctggcgctggcgcaggccgagatggtcaggctcaggatgaccaacgactacatcgtgcaccgcctcaaggcggccagcagggccggcggcgggggcagcagctacgccggctcgccctcgtccatgtcctcgcccaagacggcggagccggaggcgcactgcaaggccacgccggagctgctggacatggtcgtggaccagcccggcatggacgacgcccacttctggtcgtcctactagcctagggccgggatggaggccgctgacaaccgagcgcttctcttctgatctattagtcgtgtggtcgatcaggtgctgttttttgagtcacagatggtgtcatcaggtatatggtgtgcgcgcgctgtaacagcgtcacactaggaggaatggaaggcgagcgtacgtagaaggccttcttctcctataccttctaccagtatgtccagggcttgatttttttggctgtccttccatgagaaggtggaacatggttacaggtattggtgtgcatctactgcctagttaaaacaggtgaactctgctgtggaaatgcagatcgatcttaccaatg

SEQ ID NO: 52707 - DNA, 644 bp, Zea Mays
gtacgtacaggtccatattatttcgaagacttggtcgatatgatgtatgacaaaatttctgaatcttttaatgcctactttgaggataatagtattgaggaggttgctgaacagtttttgatcatacatgaagaatgcctgcaaaacaactattcgtctatagagaagctaaggaattctcctgttccggggaatgctgtttctcaaagtagacagatagtgggcgatgacgacgatgacagtgatagctcagatgacggtgatgacacatcgatggtggctgatgaagaggctgggccagaagagatggcagtggacaggccaaggccccccaagcctactccagacgccgatgggtggactgttgtgcctcctaggcgtggtggtcgcagcaagaaatagagtacatggtagctgctggcttttctcgcggaatgtttgttgagtgctgcggttccatattcacttgtatcgctcgatatttgacccgacatggatgttgtgagtgtgtagtatgtttggtttgccaccgcccaccaatttggtgtaaacaaggtaattattatagatgcatcctgtgatcaggttttgagtgttgcagagtcatcgtttacgtgctgcccgtcccacaaagagcttattct

SEQ ID NO: 52708 - DNA, 862 bp, Zea Mays
aattcttcgcagtcagcatctggactgtggagtctgttgtctgcgtgtctgcggctggttctctctgccaccgcacgagtcgcagcagagagggaaaaaccctagcagcctccctccgtcccaaccccgaccccatggccgcatctaacggcggcggcggccccggccccggcccgatctccgcagaggcggaggcggcgcttggagaggctatcaggctggtgttcgggcggtggacggcgctgcagatggcggtggagaaccagtggggcggccgcgactcccgcgccaaggccgaccagttgggcgagtccatcctattctggttctgccgcactaagggtccatattatttcgaagacttggtcgatatgatgtatgacaaaatttctgaatcttttaatgcctactttgaggataatagtattgaggagatagtgggcgatgacgacgatgacagtgatagctcagatgacggtgatgacacatcgatggtggctgatgaagaggctgggccagaagagatggcagtggacaggccaaggccccccaagcctactccagacgccgatgggtggactgttgtgcctcctaggcgtggtggtcgcagcaagaaatagagtacatggtagctgctggcttttctcgcggaatgtttgttgagtgctgcggttccatattcacttgtatcgctcgatatttgacccgacatggatgttgtgagtgtgtagtatgtttggtttgccaccgcccaccaatttggtgtaaacaaggtaattattatagatgcatcctgtgatcaggttttgagtgttgcagagtcatcgtttacgtgctgcccgtcccacaaagagcttattct

SEQ ID NO: 52709 - DNA, 1525 bp, Zea Mays
ccgatacacaacccaactcccgcacgcatctacccccaccaccagacgacctcccccctcccccgcattctctcacgccgcctgcgctctccccctcgcgagatagacaaccctagctcccgtctccttgcttaccctcctctccaacccctctccgatctctataaaagacccgaatttcgaattccccctcgaacccgcgatccgcgctttccttcccgcccatttcggtctctgattcggcgcggattcgctgcgcgggagcccccgaggttgcgtgcgtgattcggatggcggagccggggctcgagggcagccagccggtggatctgtccaagcacccctctggcatcgtccccacgctccagaatatcgtatcaacagttaatttggattgtaaacttgacctcaaagcaatagctttgcaagcacgaaatgcggagtataacccaaagcgttttgctgcagtcatcatgagaataagagaacccaaaaccacagcactgatatttgcatcgggtaaaatggtatgtactggagcgaagagtgaacagcaatccaagcttgcagcaaggaagtatgcccgcattattcagaaacttggttttccagctaagtttaagccaggattttaagattcagaatattgttggctcttgtgatgtcaagtttccaattaggcttgagggccttgcatattctcatggtgccttctcaagttacgaaccagaactctttcctggccttatctatcggatgaaacaaccaaagattgttcttttaatttttgtttcaggcaagattgttttgactggagcaaaggtgagagaggagacctacactgccttcgaaaacatctatcctgtactgtcagagtttagaaaaattcagcaatgatgacatgtgatgtgaaggtcacgttcttcaaattacaagcttcctcgaggattctcgtgtgaccatgaattctaaatgtacataaaagtctggcggaacttatagcatcctgtaatctctgtgagccgcggtctgtcagtattgggtgggcttgctgtggtaactggtggacatgtcgagttcatccatttgggtaggccttggtgaacacggacgccccacatcatgtctcagtttgagtagtttgtgtgaactgaagggtacgtgcttctcccatgtggttgcagcgttaacttgagtcaagtgctaacaagagtagataaaattttgccccagttcgtctttgtgacagtcttttaaagtcttttttctgagtatctttcaaagtgttttcagagtatcttccagtgtgctactgctgtgcgatgatgagaaggctggcactgtatgtaacgggggcaacgtgaccggttgtaagttatgtattgtagttgagatgctgtagcgcctagggcactgggattgaacttgtggaggaaccagtcagtcgaccgttctatttgtgtggccctctgctactgactaatgtggcctgttccaaatgtcgctgcgattttcgtttctttta

SEQ ID NO: 52710 - DNA, 2571 bp, Zea Mays
ccgatacacaacccaactcccgcacgcatctacccccaccaccagacgacctcccccctcccccgcattctctcacgccgcctgcgctctccccctcgcgagatagacaaccctagctcccgtctccttgcttaccctcctctccaacccctctccgatctctataaaagacccgaatttcgaattccccctcgaacccgcgatccgcgctttccttcccgcccatttcggtctctgattcggcgcggattcgctgcgcgggagcccccgaggttgcgtgcgtgattcggatggcggagccggggctcgagggcagccagccggtggatctgtccaagcacccctctggcatcgtccccacgctccatggcatattcctgaaatgtgtgggcagctcggtcccgttgaaccgggggatgaagccattccttgcggccatctctgtgtcaccaggtgcgagcgcattcaaacggaggggcacatggggaagcttcgagctcaaggaaagcggaggaaatgagatggatggagaatatgcaaggcactggatgagcgcggacgtgaagagtagggtgagctccagcgtgggaaggagcgggtccgatgatctcttccggccatatgagatctctggttgggcaggttacgcatctctggtggcagcaattctgaaattgcacgagactgtgcgaatggattggccaaactcttgggcggctgtagttcccagctcttctgtgatgttgcgcgactgcggtacaatgttgaaaatcaggctttgctcacacgaagaaggcaacaaggataggtgtagagacaatggctggtggtgccatggtggcattaatacaccagctggtttcatcccaccaaatccttcaaactaaacaaaaattggaatggacatatccctccaaccaaacaagagctgggtcaattccgcccaaaaaatagggacatgaccattccatcctacttagtgtccaaaccaaaagcaacctaagggactggtttttgtgaaagattttttattatgatttaggtaaaaaatctacaggagatttcaacttcgtgtgggatttaagtgctatttgcttattagtgccacaacgagtcctgaaatgactttgatacaaaactttttatgatccaaccattataatgtaggttatcttgaatgatagtcttacatttattatgatttgtagttttgtacatgttggaaattggcaggaacaagaaattaatagcacgcatatcatatgaaaaggaatgatgaaaatcattttgtagtgtccctacaatgctaaaaacttacaataagaatcatatgttgcttttacaaaacaaaattcacatgtttactgaagttcttcaatcattgtctgcttgatgtgatgtcattttttcatgacaggaatatcgtatcaacagttaatttggattgtaaacttgacctcaaagcaatagctttgcaagcacgaaatgcggagtataacccaaagcgttttgctgcagtcatcatgagaataagagaacccaaaaccacagcactgatatttgcatcgggtaaaatggtatgtactggagcgaagagtgaacagcaatccaagcttgcagcaaggaagtatgcccgcattattcagaaacttggttttccagctaagtttaaggattttaagattcagaatattgttggctcttgtgatgtcaagtttccaattaggcttgagggccttgcatattctcatggtgccttctcaagttacgaaccagaactctttcctggccttatctatcggatgaaacaaccaaagattgttcttttaatttttgtttcaggcaagattgttttgactggagcaaaggtgagagaggagacctacactgccttcgaaaacatctatcctgtactgtcagagtttagaaaaattcagcaatgatgacatgtgatgtgaaggtcacgttcttcaaattacaagcttcctcgaggattctcgtgtgaccatgaattctaaatgtacataaaagtctggcggaacttatagcatcctgtaatctctgtgagccgcggtctgtcagtattgggtgggcttgctgtggtaactggtggacatgtcgagttcatccatttgggtaggccttggtgaacacggacgccccacatcatgtctcagtttgagtagtttgtgtgaactgaagggtacgtgcttctcccatgtggttgcagcgttaacttgagtcaagtgctaacaagagtagataaaattttgccccagttcgtctttgtgacagtcttttaaagtcttttttctgagtatctttcaaagtgttttcagagtatcttccagtgtgctactgctgtgcgatgatgagaaggctggcactgtatgtaacgggggcaacgtgaccggttgtaagttatgtattgtagttgagatgctgtagcgcctagggcactgggattgaacttgtggaggaaccagtcagtcgaccgttctatttgtgtggccctctgctactgactaatgtggcctgttccaaatgtcgctgcgattttcgtttctttta

SEQ ID NO: 52711 - DNA, 2114 bp, Zea Mays
ccttatcccctcgttaacacctccccacatctcgttccttgtcctctccatttcgagctcaagctcaatcacttcggattggcggcgggcacgcgccggacgaaatggaagcggcaccatccgcccgcgccttctccccgtcctcgtctccctccgcgggggctagacccagccttcccctcgcgggcctggcctcgcggcgcgcccgggtgctcgcggcgccgcccccgccccgcgccgtcgcctcctcccgcgcgccgctggtggtctccagcccgccaccgccggaggactccggcacgcacaaccccgcgcacgccaaggtcgaccgctccggccgcttctgcagcccccgcgccgcacgggaactcgcgctgatgatttcctacgccgcgtgtctggagggaaccgatgttgtccggctcttcgatcgcaggatcagcgcaaggcgaggcatgcctattgaattacaaccatatgagctttggcgggggaccgctcgaggttggaacggagcaggaggctgagaagctggccagtcagaacgataaggattcagccaacgaagcagatgtactttcagctcctccaaaacttgtttacaacaactatgtattacggttgtccagggaacttttagtggctgttgccagtggatgggataagcatgtggttatcatcgacaaaataattccccaggcttggaaggttagataccttttcctaatcttctatgttgattcatcaatcccttctacatgcatcacagcatcaaactatttatatgttcagcagtctggttcaaacatgtacttattctgtatattacaccactgtttttcacactacactgtactagtgaacaatcactctgatgcataccagaagctgtttacagtttggtttgaacatatccttattctgtatattacaccactgtttttcattgcactgaaatagtgaacaagcactatgatgcataacagaagtgtatgaccatcaaggatgattttctgccttgtgtttcagcatgcagtgaaatattgagatctcacattgttatttaattattttagactaatgccttaccttattacgaattaattttctagcatagttaattagttatttctgtttgccaccccaaggatgaggaagtgatacataatctgaagaatgtaccttccttaatctgaatcactttgtttctatatttgtttctactaccagagctcagatgtttttatagtaaaaaaaatatatgaaacacaatatactttgctttcagtttataatctaccggttttttaactgttgtcctaatatgtgtttgtatatattttaatatttagttttttgcgtcctgttttatggcataacctgctgttggtacatggaaaatttcatggtcaggatgaacctgtggcaaggattcttgagctctgcattctacatattgctatggctgagatggcatcaaaaggaacaccccacaaagttgtcattaatgaggcagtagatctggcaaagcgattttgtgatggtggtgcccctcgggtaatcaacggatgccttcgaacatttgtgaaggatcatgttgatgttgcaggcacgagccaggaagctaaatcaaaatcatgattttttgcaaatactcatacaacaaaatggtggctgaagtaaagaagtacggagagaaccttgctgtcttgagttcaggcgaataccttctgtctccaaggtttagccttcaacctaagggaatctaaaaggtaaacatgatggactcatcaaggagccacaacacgttcattcttttagaatgttcggttattaggtgaagtatacagagctgtaaaccggtgatgcacattcatgcttcatctaaaacaaccgaaggttatggcttctgatagcctactcgacgcagatcgttaaatgatcagatattaagatgaccaggagttgtgtaaaagcttgatgcatatgtaaaatgttatatatacttggcattggctcattgcaatgggagaaggatattctagtttcataagttgatgtaagacatgtacgctcattttaggattattaatcgcatattgtgtttgcttcta

SEQ ID NO: 52712 - DNA, 1403 bp, Zea Mays
ccttatcccctcgttaacacctccccacatctcgttccttgtcctctccatttcgagctcaagctcaatcacttcggattggcggcgggcacgcgccggacgaaatggaagcggcaccatccgcccgcgccttctccccgtcctcgtctccctccgcgggggctagacccagccttcccctcgcgggcctggcctcgcggcgcgcccgggtgctcgcggcgccgcccccgccccgcgccgtcgcctcctcccgcgcgccgctggtggtctccagcccgccaccgccggaggactccggcacgcacaaccccgcgcacgccaaggtcgaccgctccggccgcttctgcagcccccgcgccgcacgggaactcgcgctgatgatttcctacgccgcgtgtctggagggaaccgatgttgtccggctcttcgatcgcaggatcagcgcaaggcgaggcatgcctattgaattacaaccatatgagctttggcgggggaccgctcgaggttggaacggagcaggaggctgagaagctggccagtcagaacgataaggattcagccaacgatgtactttcagctcctccaaaacttgtttacaacaactatgtattacggttgtccagggaacttttagtggctgttgccagtggatgggataagcatgtggttatcatcgacaaaataattccccaggcttggaaggatgaacctgtggcaaggattcttgagctctgcattctacatattgctatggctgagatggcatcaaaaggaacaccccacaaagttgtcattaatgaggcagtagatctggcaaagcgattttgtgatggtggtgcccctcgggtaatcaacggatgccttcgaacatttgtgaaggatcatgttgatgttgcaggcacgagccaggaagctaaatcaaaatcatgattttttgcaaatactcatacaacaaaatggtggctgaagtaaagaagtacggagagaaccttgctgtcttgagttcaggcgaataccttctgtctccaaggtttagccttcaacctaagggaatctaaaaggtaaacatgatggactcatcaaggagccacaacacgttcattcttttagaatgttcggttattaggtgaagtatacagagctgtaaaccggtgatgcacattcatgcttcatctaaaacaaccgaaggttatggcttctgatagcctactcgacgcagatcgttaaatgatcagatattaagatgaccaggagttgtgtaaaagcttgatgcatatgtaaaatgttatatatacttggcattggctcattgcaatgggagaaggatattctagtttcataagttgatgtaagacatgtacgctcattttaggattattaatcgcatattgtgtttgcttcta

SEQ ID NO: 52713 - DNA, 2059 bp, Zea Mays
ccttatcccctcgttaacacctccccacatctcgttccttgtcctctccatttcgagctcaagctcaatcacttcggattggcggcgggcacgcgccggacgaaatggaagcggcaccatccgcccgcgccttctccccgtcctcgtctccctccgcgggggctagacccagccttcccctcgcgggcctggcctcgcggcgcgcccgggtgctcgcggcgccgcccccgccccgcgccgtcgcctcctcccgcgcgccgctggtggtctccagcccgccaccgccggaggactccggcacgcacaaccccgcgcacgccaaggtcgaccgctccggccgcttctgcagcccccgcgccgcacgggaactcgcgctgatgatttcctacgccgcgtgtctggagggaaccgatgttgtccggctcttcgatcgcaggatcagcgcaaggcgaggcatgcctattgaattacaaccatatgagctttggcgggggaccgctcgaggttggaacggagcaggaggctgagaagctggccagtcagaacgataaggattcagccaacggttgtccagggaacttttagtggctgttgccagtggatgggataagcatgtggttatcatcgacaaaataattccccaggcttggaaggttagataccttttcctaatcttctatgttgattcatcaatcccttctacatgcatcacagcatcaaactatttatatgttcagcagtctggttcaaacatgtacttattctgtatattacaccactgtttttcacactacactgtactagtgaacaatcactctgatgcataccagaagctgtttacagtttggtttgaacatatccttattctgtatattacaccactgtttttcattgcactgaaatagtgaacaagcactatgatgcataacagaagtgtatgaccatcaaggatgattttctgccttgtgtttcagcatgcagtgaaatattgagatctcacattgttatttaattattttagactaatgccttaccttattacgaattaattttctagcatagttaattagttatttctgtttgccaccccaaggatgaggaagtgatacataatctgaagaatgtaccttccttaatctgaatcactttgtttctatatttgtttctactaccagagctcagatgtttttatagtaaaaaaaatatatgaaacacaatatactttgctttcagtttataatctaccggttttttaactgttgtcctaatatgtgtttgtatatattttaatatttagttttttgcgtcctgttttatggcataacctgctgttggtacatggaaaatttcatggtcaggatgaacctgtggcaaggattcttgagctctgcattctacatattgctatggctgagatggcatcaaaaggaacaccccacaaagttgtcattaatgaggcagtagatctggcaaagcgattttgtgatggtggtgcccctcgggtaatcaacggatgccttcgaacatttgtgaaggatcatgttgatgttgcaggcacgagccaggaagctaaatcaaaatcatgattttttgcaaatactcatacaacaaaatggtggctgaagtaaagaagtacggagagaaccttgctgtcttgagttcaggcgaataccttctgtctccaaggtttagccttcaacctaagggaatctaaaaggtaaacatgatggactcatcaaggagccacaacacgttcattcttttagaatgttcggttattaggtgaagtatacagagctgtaaaccggtgatgcacattcatgcttcatctaaaacaaccgaaggttatggcttctgatagcctactcgacgcagatcgttaaatgatcagatattaagatgaccaggagttgtgtaaaagcttgatgcatatgtaaaatgttatatatacttggcattggctcattgcaatgggagaaggatattctagtttcataagttgatgtaagacatgtacgctcattttaggattattaatcgcatattgtgtttgcttcta

SEQ ID NO: 52714 - DNA, 551 bp, Zea Mays
gccgctagcccacaagtccccgagggctgccgcgtctgctcctaatgcaatccctaacccactctcccactcttcctccctctcgctcctggctccctcctccctacgacggcacggtgcacactcggcacctcctccctcctcctatgttcttaaggggctcagtgagcggcgggtgcaacggatgcaggagcgcgtggtgaagatgatcccgcggctggtgtacgcgtcatcgtccgatgggttcggcgacggcatggaggacaccctcgatgtggtgctgcgcggcgtgctggagcggttccgacggcgccgggcgagcaccgcgcctgtagtataaggcgagaaagcactatctgcggggagcaaaacgtaactaaaaatggcgaacaagttacaacagaatccagagaccctggagccctgcaagcagcaatgtcgaacaggaggacgagatcggcgtacccattggtcccgacggccccgcagaccctagactagaaattcacacctcgcgagggggtgcgacaagaggggagagcgaaaggagg

SEQ ID NO: 52715 - DNA, 1267 bp, Zea Mays
cacccacccccgccgctagcccacaagtccccgagggctgccgcgtctgctcctaatgcaatccctaacccactctcccactcttcctccctctcgctcctggctccctcctccctacgacggcacggtgcacactcggcacctcctccctcctcctatgttcttaaggggctcagtgagcggcgggtgcaacggatgcaggagcgcgtggtgaagatgatcccgcggctggtgtacgcgtcatcgtccgatgggttcggcgacggcatggaggacaccctcgatgtggtgctgcgcggcgtgctggagcggttccgacggcgccgggcgagcaccgcgcctgtaggcaaagagttgatcttttggagatggacaaggacataacagtaacagaagaagaggtttgggcaacaataaaagaattgcctgctgatagggtgtcgggtccagatgaattcatcgggcgtttctacaagccgtgttagccaacaattaaatcggacttcatggcagccatcatcgtgttacagacatcatcacccggtttctcaaaatatctttttagggtttgtttcttgcactggtagactcctcattgtagctttttgtaaattctaatatacacattgttagtaaatgtatactcaactgaaagctccttaatttatcaatcagttatttccttgtgaacttcagcaacagtaccatcactcatcaagcaccgaaaaaaactaaaatgaacaggtagtatgaccacagatataagagcttatccctccggcgacagatcaggtgacagttttttttctagtgcaatagtcaacaaaaattgtagccatccaattcgttcatggagcctactgttccacacaattcattggtttaaggctttaagcatgttgttggcacatttagagaacaggtaacaagcggaacagcaatatttttagaggccagaaaaatttaagagccttccatgctgtcagtcacaaggtatcttcttggtgcgaaatttccgttaaataatgtttgccttcaacactttattcagtataaggcgagaaagcactatctgcggggagcaaaacgtaactaaaaatggcgaacaagttacaacagaatccagagaccctggagccctgcaagcagcaatgtcgaacaggaggacgagatcggcgtacccattggtcccgacggccccgcagaccctagactagaaattcacacctcgcgagggggtgcgacaagaggggagagcgaaaggagg

SEQ ID NO: 52716 - DNA, 3375 bp, Zea Mays
cttttataaatgaaacccacgaacccctcagatttcccgtgctcatcatcaccagttcaccacccacctcccactcccagttcaccccgtcgtcctcggcgccaccactcctcgtcccccggcgctactcccccgctccacggtccaaggatggcgtcccatattgttggataccctcgcatgggccccaagagggagctcaagtttgccttggagtctttctgggatgggaagagcagcgccgaggatttggagaaagttgccactgacctgaggtctagcatctggaagcaaatgtcagaagctgggatcaagtacattcccagcaataccttctcgtactacgaccaggttcttgataccacggccatgcttggcgctgtcccagagcgctactcttggactggaggcgagattggcttgagcacctacttctctatggccaggggaaatgccactgtccctgccatggagatgaccaagtggtttgatacaaactaccactttattgtccctgaacttggtccaagcaccaagttcacatacgcttctcacaaggctgtttctgagtacaaggaggcaaaggcgctcggcattgatacagtcccagtgcttgttggaccagtctcatacttgctcctctctaagcctgccaagggtgtggagaaatctttctctcttctttcacttcttggtagcattcttcccatctacaaggaggttgttgctgagctgaaggcagctggtgcttcatggattcagcttgatgagcctacccttgttaaagaccttgatgctcacgaattggccgcattctcttcagcatatgctgaactggagtcatcgttctctggattgaatgtgcttatcgagacatacttcgctgatattcctgctgagtcctacaagaccctcacatcattgagtggtgtgactgcttacggtttcgatcttatccgtggagccaagacccttgatcttatcaggagcagcttcccctctgggaagtacctcttcgctggtgttgtagatggacgcaacatttgggctgatgatcttgctgcatctcttagcactcttcattctcttgaggctgttgctggcaaggacaaacttgtggtgtcaacctcctgctcactgatgcacaccgctgttgaccttgtaaatgagactaagctggatgatgagattaagtcatggcttgcatttgctgcccaaaaggttgttgaggttaatgcccttgccaaggctttggcaggccaaaaggatgaggtctactttgcagccaatgctgctgctcaggcctcaaggagatcatcgcccagggtgacaaacgaggaggtccagaaggctgcagctgctttgaggggatctgaccaccgccgttctaccactgtttctgctagattggatgctcagcagaaaaagctcaaccttcctgtccttcccacaaccacaattggttcattccctcagactgtggaactcaggagggttcgccgtgaatacaaggcaaagaagatcaccgaggacgaatacatcagtgccatcaaggaagaaatcagcaaggtcgtcaagatccaagaggagcttgacattgatgtgcttgtgcatggagagccagagagaaatgacatggttgagtacttcggtgagcaattatctggttttgcgttcactgccaacggatgggtgcaatcctatggatcacgctgtgtgaagccacccattatctacggtgatgtcagccggccgaaccccatgactgttttctggtccaagatggcacagagcatgacccctcgtcccatgaagggaatgttgactggtccggtcacaatcctcaactggtcattcgtcaggaacgaccagcctaggtttgagacatgctaccaaatagctcttgcaatcaaaaaggaggttgaggatcttgaggctgctggtattcaggtgatccagatcgatgaggcagctctaagggagggtctgccactacgcaagtcagagcatgcattctacctggactgggctgtccactctttcaggatcaccaactgcggagtccaggacaccacccagatccacacccacatgtgctactccaacttcaacgacatcatccactccatcatcgacatggatgccgatgtgatcacgatcgagaactcccggtctgacgagaagctactgtccgtcttccgtgagggtgtgaagtacggagctggcattggccctggtgtctacgacatccactctcctaggattccctccacagaggagatcgcagaccgcgtcgagaagatgctcgccgtgctcgacaccaacatcctctgggtgaaccctgactgtggtctcaagacacgcaagtacacggaggtcaagcccgccctgaccaacatggtctcggccaccaagctcatccgcacccagcttgccagcgcgaaatgaggtcgtttgatagctccatggtctgatagcgcggaatgagccagttgttttgaataatttgggtgttaccccctgttccatggtgttagtgttaggttagcctctcattggtgagatacgccgtttcaagatgtgttctaagtttggagtgtgtgttttcctttgggctatgtttctgggggtatgtgtgtgctttggttataaacagaaatgaaatatgcagtcttccaattgtatcaccatctgcattggcatgtcctccttgcagaggggaatgccattgccgtgctattgcacatgatacatcatacatgtagacatatagttgttttcacagtaacgctatatacaggacagtggcaccaacccccaccaatgcaaggaccaggaggaagctaagaacacgcagatttctgatcttcctccaccacctcccgtcctcacccttgccatcaccatcgttgttcctggctgcattttcagttgcaccaccgtctcctcccgtgtccgccctcatcagctcttcaagagaatgtgcgcgctccgcagggtgacgctccttctgactgtccttggacgacgatgacgatcccttgggcttgggcaggacgacggagagctgggccctctcggtgtctagcctggcctggatggtgccggcgtcgcagctcctgggcaccgggaccaccttgaggaagcgcgcccaccggccgccgtcggccctgcgctccccggtgaccttcagcctgggcgcgccgtcgggctggcgcccgccggtggccttcagcttcttccgccggacgctgtacacgaccttcagctcgtccttcttgaaccctgaatgggtggaagagagaccgtttgttgttcgtaaggcgcatgcagccgcgcaggcgacaggttctctggtgcgacgtgcggtctcgc

SEQ ID NO: 52717 - DNA, 3178 bp, Zea Mays
cacgctcccccaacccctctccgcggtccgcccccctctcaccccacccatcgtccctcgcctcctcccgtcccgcacctcgccggagcaccgcccccctcgccggagcaccgcccccgcctccctcgcgcatccccctttttaccatctcctccgcctatctctgctccccttatccatcctcgagctcgcccgccgcgtggatcgcctcgacccattttactttttttttgtacctccccgcccgagcgttagctggtgggcggatgtacgtgtcttggctggagatggagatgccactggcttgacggattgatctcggggagctgcctttagtgaccggccgccctcggcctcgccgcggcggccatggacacggagaggggggcgggcagcgagcaggggtcgcccgacagcgaaatgggagacggcgacaacgacagcgtcggttacggcgcagagatggaggtggacgccgggagcggctcggccggggcctcggctccggcgagctcggcgtccgcatcggcctcggtctccgcgtcagcgtacgccgcgcgcgccggcgcctacgacggggtcgaccctttcgagggcatggagttcgacgacgaggaggaggcctggacgttctacaacgtctacgcccaccgcgtgggcttcagcacccggattagcgtcatgcacaggtcgcgacggaacggctccgtcatgtcccgccagttcgtctgcgccaaggagggattccgcacctaccgcgggaagaatgaggtttcacgtggtgatgccgtagacgctggcgacgacgatagtgggaggggtcggcggacgcgggctgtcaccagggttggctgcaaggccatgatccgggtgaagaagcaggacaatggccgctggagtgtgaccaagctggagactgcacataaccaccccctggtccctgcgaaccaggcacactgtctgcgcccgcacaagccactgtcagagtgtggaaagcagcggccttttgggggccatcgaaatggcagtttgcctctggcaattgagccaccgccacctcctcttacaccgcctgttcctcatacaagcatagctcaagtggttcctgagtatgtttcggatggtatcgggcatgacactagagtaattttggattatgtcaagcgcatgcaagctgaagatccagcgttcttttatgccatgcaatttgttgaggggcgtccagtggggaatgtgttttgggccgattcgagggctaggacggcatacaaagattttggagatgccatcatcttggatgactactgcaaaaggagcaagcatgaacttctactttcagctgctttgaaagtatttcctctaactaggctccagttctgtaagtggcacatcatgaacgaagcacaagataagctgtcatatctcctagatgtgtttccatccttccatgaggactttatcaattgcatcaacatgtctgaaacaatcaatgagtttgaagcaagttggaaggcattaatttctaaggtcagctctcaaaaaagtgaatggattgacttgatgtacagctgccgccatcagtgggtccccgtatatctgagagatacattctttggggatgtgtcattaaagctgcaatgttcaagcaggagttcgttgtttgaaggttatatcagtgccaaaactgattcacagtcattcattcagcagtacgaaaaagctttagactgttgttacgagaaagaggtgaaggaagaatttgaaacaaaatattcacttcctgatatgaagacatcatctcctatagaaaagcaaggagcggagttatatacaaggtcaatgtttttgaaattccaacaggaattggttggtgcctctgtttacactgctgacatggtgaaagaggagggcgatgcttcaatttatacagtgaccagatctgaaggaagtgagaagtctgtaacagttcagttcagttcttctggaagttcggcgacatgtagctgtcatatgtttgaatattttggtattgtctgcaggcacatacttaccgtgtttggcataagaggtgtctctgcactcccttctcattactttgtaaaaagatggacaaagaatgcactggatagaagctcaggcaagaatgttgacgaagttagcagagttgcggagcccaaggaggagcaaagaagtagcgctgaagatgatgagcagtccccgacatggcgttacaacagtttgtgtcgtgaagcactaaggtatgctgaggagggggcatcatcattagaggtttatattgtggcaatgcaagctcttcaagaggctgctaacagggttaatatggccaagagaggtattggacaggtagcaccattagcggtgatgccaattgcagcacaaccaccagaaagttttgcaagaaatcaggagattagttctaataagcaaaagaagagaaaaaggaattcaaatagctcaagggagaatgtcacaccaaatcaacttatttgataagttttctgggttacctgtccgaaatgcatcagctccttcaattggaaatctgcaaggtggagaaacaaaatccatagggactgattcacaaataaaagagagccatgaattatcccaagctaatggtagcaggggatgcagtgtaaatacattaaactccagtgtcgcgccacagctcgtgactgttcctattggactgtgccttccatccactgatggctccaagatatctgcggctggtatgaactctgtaaattctggagatatcagtagcaatggcaagttgtcatttggtcttcatcaatctcagtcatctgcacaacagccagctacaccatcacagacaacaacgcttgaccatattgactcccgtgctaatcctgagggttcatctataagggctgcagccattgcagccggcgcacgcattgggtccccatctgatgcagcaacaatcataaaagcggctcagtcaaaaggcgccatccacatcatgcctggggaaaacctcccaaattacctgaaaccactagcaccaaaaccactttctgcactaccaccggcgaacccactcaacccggcacatgcacccccaggacagctcagctttggtgattctgcagccgccaaggacgcaatcttcggtcaacttttgcctgattaa

SEQ ID NO: 52718 - DNA, 1179 bp, Zea Mays
gtgtttttttgaagtttgaacagagggttatccaatttccattgttccaagataacgggaataagatacgaaacaggttgtggaggtttctacctccaagactggtaagcatggccatgccaaatgccactttgtcgccatagacattttcaatgggaaaaagcttgaagatattgttccttcatcacacaactgtgacattccgcatgtgaaccgtactgagtatcagctgattgatatttctgaggatggatttgtgagccttcttacttcagatggcaacactaaggatgatcttagactcccaactgatgagactcttgtggcccaggtctgtatggaaatgttttccatcctaaacgctgcttcttattacgatgttatttttataacgatgttatttttcagtctatctctacatccctctccccatcttgttatcactactaatccttaagaggctaacgagggcgtccaccagcttcaccgtggaattttttttcttaataagtttgtcccaaaaaactctgtatcagcctctaaagtacttcatgcagtctgtaaatgttgactacctacgatagttatttgattatttcaggcctacctcctcgccatgctcgctctcgtcattgtcctcttctacttcactatcttcgcctttatcgtcacccacagggggtaccaggaactgggacaggattaggagctgccttcaggactccaaggtctgtaggagcctgcagaacaagaatgagaagatcgcacacctctcccagaatgaatgcagattgatgggaagttgcattcacaaagtaacttattcagttcggcagctctgctaacactcttcacgaatatcacaacttggttgaaatcaagagcgtccaagagatcattcagtttccagttcttctctacctcgctaagttttatatagtgctgcaaaaatatacgattccaattatttagagaaaacaaataaaaaaaatgtgcacgactcaaatgcagagtattattgtattacctgtacaagaccatggagggtcaactttgcctcatcatcaacatatatttccatcggattacatgcagcctccatacagaagttcagttatgcactgttcaacactagattctctccaaatatgcttaagttttgcaacagtgcttccaaat

SEQ ID NO: 52719 - DNA, 726 bp, Zea Mays
atgggaaaaagcttgaagatattgttccttcatcacacaactgtgacattccgcatgtgaaccgtactgagtatcagctgattgatatttctgaggatggatttgtgagccttcttacttcagatggcaacactaaggatgatcttagactcccaactgatgagactcttgtggcccagttatttgattatttcaggcctacctcctcgccatgctcgctctcgtcattgtcctcttctacttcactatcttcgcctttatcgtcacccacagggggtaccaggaactgggacaggattaggagctgccttcaggactccaaggtctgtaggagcctgcagaacaagaatgagaagatcgcacacctctcccagaatgaatgcagattgatgggaagttgcattcacaaagtaacttattcagttcggcagctctgctaacactcttcacgaatatcacaacttggttgaaatcaagagcgtccaagagatcattcagtttccagttcttctctacctcgctaagttttatatagtgctgcaaaaatatacgattccaattatttagagaaaacaaataaaaaaaatgtgcacgactcaaatgcagagtattattgtattacctgtacaagaccatggagggtcaactttgcctcatcatcaacatatatttccatcggatgtaagggaacaaatgatacatgaaacaaattagcattccagcgtc

SEQ ID NO: 52720 - DNA, 709 bp, Zea Mays
atgggaaaaagcttgaagatattgttccttcatcacacaactgtgacattccgcatgtgaaccgtactgagtatcagctgattgatatttctgaggatggatttgtgagccttcttacttcagatggcaacactaaggatgatcttagactcccaactgatgagactcttgtggcccaggcctacctcctcgccatgctcgctctcgtcattgtcctcttctacttcactatcttcgcctttatcgtcacccacagggggtaccaggaactgggacaggattaggagctgccttcaggactccaaggtctgtaggagcctgcagaacaagaatgagaagatcgcacacctctcccagaatgaatgcagattgatgggaagttgcattcacaaagtaacttattcagttcggcagctctgctaacactcttcacgaatatcacaacttggttgaaatcaagagcgtccaagagatcattcagtttccagttcttctctacctcgctaagttttatatagtgctgcaaaaatatacgattccaattatttagagaaaacaaataaaaaaaatgtgcacgactcaaatgcagagtattattgtattacctgtacaagaccatggagggtcaactttgcctcatcatcaacatatatttccatcggatgtaagggaacaaatgatacatgaaacaaattagcattccagcgtc

SEQ ID NO: 52721 - DNA, 632 bp, Zea Mays
atgggaaaaagcttgaagatattgttccttcatcacacaactgtgacattccgcatgtgaaccgtactgagtatcagctgattgatatttctgaggatggatttgtgagccttcttacttcagatggcaacactaaggatgatcttagactcccaactgatgagactcttgtggcccagggggtaccaggaactgggacaggattaggagctgccttcaggactccaaggtctgtaggagcctgcagaacaagaatgagaagatcgcacacctctcccagaatgaatgcagattgatgggaagttgcattcacaaagtaacttattcagttcggcagctctgctaacactcttcacgaatatcacaacttggttgaaatcaagagcgtccaagagatcattcagtttccagttcttctctacctcgctaagttttatatagtgctgcaaaaatatacgattccaattatttagagaaaacaaataaaaaaaatgtgcacgactcaaatgcagagtattattgtattacctgtacaagaccatggagggtcaactttgcctcatcatcaacatatatttccatcggatgtaagggaacaaatgatacatgaaacaaattagcattccagcgtc

SEQ ID NO: 52722 - DNA, 212 bp, Zea Mays
agagaatgtttgtggacgacatatacatgatataaaaaaggtggcttcttttgccgtccatgtactgttttcaataggtcctttaaatgccctcacatttccgcacaaagggcttttacatgaattagacaaattattatgtatcacatcacatactccacccagttggttttatatacaccacatctacacacattccaacaatgtgtaaa

SEQ ID NO: 52723 - DNA, 5469 bp, Zea Mays
aaatcacatagaggattacctctaaaacattccaataacttttttagttaatttggtacataaatagaaaagttactatgatagaccaataacaactaataaagggtttaagtgtcatgaccaataactaataaaaaggtgttttcttattttgtaggtccatagaaagaaaagaaatcggttgttgcataaggggttgaattctatcgtctttatttttctacaaatgaaagatgaaagttatgtcccaaaaactgcgcaaggagaaaaactttgatccattggttcatgaggatttcaactgggacaatgagtgggctgattctttgcatgtagaccttgaaggtgggcgtgggtgtgagtatgaccttacatgggaccttgtggataatgccattggagcatcagaagcacttcgtagccgaaacttaccaagaagaacccataataggctgaagaggaagatgaagatgaagaaaatgatccacatgatgatgcagaaatcacaaattgtgaagatgaacatgatggtggcaatgatggtgatatgtcgtgggtgcctaggactgcgcagtggtgatcgcagcaaagcttgggactgggcaagggatctcagtggatatggagatcggccaaaggaggagctaatttcgtcagctggcgcaaggtgcgccaggatgaccaaggaagctccaccggccaggtaaaacttctttttttatgaaccctaatacaaactacaacagctcctttatagatttaggcgccactttattctcaaccacctcaactgagagctaatctctccactaaaataggagggataaccgcctccctctttatctcttcttatcttctaaacaaacagcctagctaggacttatcctttgtggcatctgccatactaccgacccacaaaggtgtctacaacatttcccccctcgccgacgaagagctcatcctcgagcgtcatgaccggatatctaagcttgaaatcttccagttgctcccaagaagtatccgtctctgctcggcctgtccacttgatcagaacttcccacaccccccgattcagccttgcacggaggactttttctagtgtagggatgactctgccgttgaggagctcgggcagcggtataacttgggttggagcctcctctatgaatttcttgagtagagaaacgtggaacacatcatgtattctggcactgggaggaagttgcagcttgtaggagacagtgcccaccctcgatagcacttgatatggtccaaagaactttggcccaagcttgtggggtgtagcagaagtgacaccaactgctatgcgttgttgtaagcgcagccatacccaatcgccctcatggaactccacttccagtcggtgcttgtcctagtagcttttcattgtcacctgtgactgaatcaatcgatcacgaatatccaccaagaattcgtcacgtgcctgtagttgtttgccaacagcagccacctgtgatgttcctggatgatagggcagaagagcaggaggttctcggccatataccaccttaaatggagagcatcggagagcagtttggaaggaagtgttgtagcagaattcggcccatggaagccattaaagccactctcttggtctatcccctgccaggcaccgaagatacatggtgataattcgatttaccacttccgattgtccatcagattgggggtggaaagctgaactcatgtgcagcttgactcctgctagctagaacaattctgaccagaatgtgctagtaaatactgtatctctatcactgacaatggagtaaggcaacccatggagacggacaatgttatcaaagaaggcttttgctaccgatgctgttgtgtaagggtgtcctagagcaataaagtgtgcaaacctggagaaacggtcaacaactgtgagaatcaccgacttgctgcccacctttggaaacccctcaatgaagtccatagaaatatcactccatacttccgaaggtactgatagaggttgcaagagaccaccgggatggagatgttcagttttattgcgctagcagactgaacagcctttgatgaattccttaaccctctgtaatgcatgaggattatagaatgacgatcggaacctatgaattgtcttttggattccttcatgtcctgtgtcatggtcactggacaatagtatcgaccaaagagtagaggcatctggcacatagacttttcctttgaaaaggagcaactcatccaattttgtccaacccagtgaaacaatgccgacagcaagctgctggtgcacatcctggatttgtgggtccgttgcagcctcgactcgcaaactgtcaaacaactcaaaagaaggtgtagagatggtgttgagcgccatgcctaacttggcacgacgtgagagagcatcaactgcgccattgagtttgccaggcttgtactccaccgtaaaatcatatccgaataacttgctcacccatgtatgttggggaattgtggtcagtcgctgatctaacagatatttaagactgtagtgatcggtgctgaccagaaactggcgcccccaggccccagatataaggcctccagtgccggaccgttttcaccaacccaatcagttcccgttcatatgccggcaacttctgatgttgcggtgcgactgccctgctgaagaaagcaatagctccatctccctggtgtaacatggcgccaaaaccagaccctgacacatcacaatcaatgatgaaattgcggtcgaagtcgggcatctgcaataacggtgcggacattaaggcttgtttgagcagattaaaagcctcgtctgcttcttctgtccatctgaatgcctctcgttttaatagggctgtcaagagggctgctacagtgccataaccagcgatgaatttccgataatacccagtcagtcccaaaaatcctctgagcgcccaaatggagcgtggtggtggccatgactccactgcttcaatcttggcagggtccatcacaactcccttatccgagatgatgtggcctaagtaacccacctgtgtttcgccaaaggaacacttggtgcgcttgagggccaacttctgctctcgtaacagctggaatacttgtcgcatatgttgaagatgctcagcccaggaagagctatagattaatatgtcatcaaagaatatcagtacaaacttacggatgaacggcttgagtacatcattcataagcgcctggaatgtcgacggtgcattagtcaagccgaaaagcatgactaagaacttgtagtggccatggtgtgtgcagaaggtcgtcttatcaatgtcctctgggtgcatgtgcacctgatggtagccgctacgcaagtcaagcttggtgaagaaccgggctccccgaagctcatccaggagttcatccactactgggataggaaatttgtccttgacagtcttcgtgttgagctcacggtagtcaatgtagaagcgccatgtgttgtccaatttcttcacaagcagcactagtgatgagaacactgaggtacactcttggatgataccttgggatagcatcaggtcacactgtcattcaatctcatctttgagcaactgagagcggtacagtcgtaccgccactggtactatccctggcagaagccgaatgcgatgatcatggcggcgaggtggaggaagtccctggagttcgacaaagaggtcttcaaaggacaacagtagggtatccaacagtttgtgtgccatgtccagagcattacaggggggtggagagccgccaatgtctgtccaacgcaccatgtgtccgtggcaccaaaaagacagcgtcaacttctcaaagttgcaaatgaagggacccaaagaacgcaaccattgtaccccgagcaccacatcaaagccatccaggggaagagtgtagcatgttgtggtaaagttcttttcgccgacagtgagtggggtctgagaacagatgcccccactcaacatcttctcaccatttgcaaccttgacaagaagtcctgctgttggagtcacatgcagtcccagtcttggcacaatagcatcgcggatgaatatatcggtggatcctgaatccacaagagcaatgagagccacaccattgatagagactttcagttttagtgtgtcgacgatgtaaatcccagtgagagcatgaagtgatatgcccatctcctctgccagtgtatcagttgtcccggtatcttctccatccagttccaacagaaaaactccgcgagcagcacacttgtgatcgattgaatatttttcagagcagtggtagcattcaccgctggctcgtttggcggcaacctcctccggtgagagcctgcataaacttggtctgctggtagcagatgacgagggttttgctgcagatgccgttggttttgatgtagcaaatggcgtccttgatggggtcgaggacagatccatacgacattcataggcgcgtgccaggtacatggctcgctgcaatgtagttggagtcagcagttcaacatcagtccgaagcgattcacccaagtctgcggtaaacatttgagcttgctggagccgtgtcatatcctcgcagcgacagagaatggacagaaactgacgttgatagtcttcgacggtgccgatgcgccgaaggtccttgagatcagccataccgttggaccgtagaggtggtccaaaccgcatatgggtgaactcaacgaagcaggaccaagtgaggacgtcgctcgtgtcccgctccacagcatggaaccatcctgtcgccacaccgtccaaatggagtgatgtctgccacaccttctctggagtcctcatgcccctgaagtaagtctcacatttattgatccacggcagggggtcggactcaccatcgtagtggggaaaggagacattgggtcttcgatagccaccatcgtcgatgcggtcatgagaagcagatcttgtgctatgcatgaccccgacaggcgctgcggtacgtgggctggtttctgaagattccggcagctgttggtcgattgggcgcttctccaaaagcgtgatccgctgtccatgcaggtcgaggcgtgagttgatggtggagagctgcgccaatatctgatccaacttggctgagtcggaggaggtcttcgcaggatcgtgatcaacgcggatatgttggtcgatgcgtcagaggaatctgataccaaattgatatgtcgtgggcgcctaggcctgtgcagtggtgatcgcagcaaggcttgggactgggaagggatctcagtggatatggggatcggccaaaggagaagctaattccgttagctggcgcaaggtgagccaggatgaccaaggaagctccaccggccaggtaaaacttctttttgatgaaccctaatacaaactacaacagcccctttatagatttaggcgccactttattctcaaccacctcaac

SEQ ID NO: 52724 - DNA, 450 bp, Zea Mays
agcatctcccagagacgaagataacctgataaagcttcaacagtttgggcaacttcaggcagtagaccttgagtccattgagccttcacttagagctggtacaacggctgatatttctttgagaaaagataagcctgaaacattcgataacagagatgccataaaggaggccattccaagttatgatgatccatatatcaaagtgccaagagtgctgaacaaagaatgatctgtagcatgtatatcagaattgttagaatattaatactctacaatgcagcatggttaaacataatgataaaatttgcagaaagattgaacgagtcaccagcaagcttaattgattttgtgcatttcaatttgataatgctgtgattgaacagagcaatcagcaaccttgcattgggacaggataacaggaaagatttgggagatctgcttcaggggaaa

SEQ ID NO: 52725 - DNA, 1803 bp, Zea Mays
aaaaagttaagtgtcccccgaccccgagacggtcgacgcacacgcatcaaacccaccccctcgtccaacttgctcccaaatccaaacgacaaaatgctcctcgctgcggtttgatcgaggccgcggccccccgaaccctcgcctcgcctccccctcccgccgccgtcatggacgacgaccgcgaccacgaccaggaccccgatgcgtcgtcgccggccgcgccgtggcggcggtccgtgaagcggaagctgggcgcggaggcgggggacgaggcgggccccgcggcgcgggtcgaggcggaggacgagcgcgcggcgctgcgggaggcggcggcggcggcccagtccacggcgtcggcgctgcgggtcgaggtcgaggaggagcgcctcgccgcggccagcgccgccagcgaggccatggccatgatgctccgcctgcagcgcgacaaggccgaggtccagatggagctccgccagttccgccgtttcgccgacgagaagatggcgctcgacgccgccgaaatcgaccagctccgcgcgctcctcgcccagcgcgcgcgccgcctgctgcgcctgcgctccaggctccgcgagtacaggctgcagtgcctccacctcggcatcccgcttcccgagggcgaggacctcgtcgcccagaacgccgccgaggaggaggaggaggacctcctcctgctcgagggcgaggagggctacatcgttggcgatggagggtactactaccctgagctccgctgcaacgacggggagtactactacgaggacgggcgggaggaagaggacgtggttgccctcgatctggagcgccggatctgccttctcgaacacgatcaggaacctcgcctgcttgagccaccgcatgagaaagaggaaggtacccacctttacacagatgaagtgttgccggacatgtctgaacatgaactgggtggcctctatgccgacgagatgttatctaaggaggatgtggaaacaatgaacaacctccacaatgatgatgaagaactgccagagtcgcctactgctggaaatgatgacggggaggaagcaagcgaggctgacggtgctgacagtgtaagtggcagtggcagtgatagggtgtacaccatttgcctagaaaacacgcagttgggattgtagaaaggagattcacagaggacaagaaggcgatacttgtgaagacattttccatggctgccttgttcaagtggatcctcgctttattgggcaagaaaaagaagctatctcaaagcaggtatacttttggcttaacaaataataatgttggtttgctcatactcttggataagtgcccacggatccagaaaaccctcacaagaacaaagttaaaccttgccgaaagaagcagcagcagctgtacaatgtaaaatagatagctttcagttgggaagattgcatttcttttgttaatgtttggtggagcgaaagttcttttgattctttagttgatgattttccgatttcccatcttttggtgatgaggattttatgcgttggtcttgcaattgttaagtcacaaaatcgctttcgcatttttctcaccaggaagaactacaatgcatgtatagtgcgcttgtaaatacactggtttagtttgcttgctgccttgcttccaggttgatgagtgaatatttatgaatgttagcttacaggtgcaaactctaaacttttgtgaaaaaatgtccttgtattcaaactaagtctgtttatgcttgtatgctcagtttttttggactggtaatcagaaatttgtgtaaaattcctg

SEQ ID NO: 52726 - DNA, 2480 bp, Zea Mays
accattcagaaatgcggcccatgacgaacccgcccctgctctcaccgtccccgttccctcttctcctccgcctcctccacctctcgcgcgcccctcgccgccggaaccctaccaccgggcgggcacctacttgtacttcccgcgaccgcctcccgctcctcctccccgctgccatgtcctccgcttccaacaccgccccccactccgtcgtcgccgaccccactactcttgcccgcaaaatcgcagacatccgtgccgccggacccaccaaactccaggttatcgccgacttcgatggcacgctcacgcggtactggtacgacggcgcccgcgggcagagtagccatggactgcttaggcaagggaacgaggagtacgacgccaagagagaagcgttgtatcagcactaccaccccatcgagatctgccccgacatcccactctcggagaaggccaagctcatggaagaatggtgggagaagactcatggtcttcttattgaaggcggtcttacatacgaagctatcacaaaatctgtctctgatgccgcaattgctttcagagagggtgtggtggagctctttgagtacttggaggttttatcaaaaccttctctagctaacacaatatttaggaacttttttgggacatgcctagatacccttttgtgttcagtatggattaagatcagtaataactttactatgtcactttaagtaaaagaactgacggttaagctgcttcataaaaagttcgaaacatgctttatcttctatgtttctcccttattttcttttgatgccaccctatgcatgttttacttctgtgctacccttttccttttagcatgatttcgctttctgttttttttccttaacagtttgtcaaactgaaagcctgcaaatttgtggtgctctcatttgtgaagtttttttagttttgggtatttctttttgcagagtttattagcacatatatgagtatcagcaagcacttagtatcaactgaaatttgctatgttgtatacttgtccttctgcagaattcttcttgttgtcttgttgaagtgagttttggtgtgcatatgaagtaggctagttgggatttcaaccctcaatgcttcaaattgtttcataaaaaagtatttcttgttccttttctactgtttgcttcttgtctgtcttaaatttatgccatcaactgattttcctactttgaatgctatgcatatggatcctcaaactaaaaaagactcgatatatgggggtacgacagcctccgagcattgcattaagaagaagaccttacacaggttaagaaaacccctaagctcctgctctatccatacccaacaacactgtagcccatatgagaacaaccacgtctggggccaaaccttaaacttgtgctttgatgcgagacaagcgaggggatttttctaattctaacatgaaaattcgctcccacaggaagtcaaacacaggtggacctgaggtgtgttactaaggccgtctaaacaactcaactagaggctctttcacatttggatcctcaaatttactccgctgatttgattggatgtaccacatttcatatatgcttcatgagttcatagtaacatattatgcttatctccttagggcagaaaaatttctagtgaagagaccattccctagaattctgtgatgactgatgtgctgttcttttttcatccttcatgtcctatgtgtagtgtaggtgacaatgtgatattataactagatcaaaatgggtttacctgggggcaaggcgacaacattttcaggatgaagatgaactaattgataagtttttacgtgaatgttaattaagattaatacttccaattataatttcaggagagagagattccagtgctggtattttctgcaggacttgcagacataattgaagaggtcttccggcagaaattacacaaaacattcaagaacatcaaggttgtctccaacaggatggtgtttaatgaagaaggccgcctcatagcatttaaagggaaaacaattcacgttctaaacaaaaatgagcatgccttggacatggctgctccagtgcatggcaatccgggggatccaaacggatctatggatgactattcattggtgaagaaaaggaccaatgtgctgctacttggcgatcacattggggacttggggatgtctgatggtttaaactatgacaacaggatcgctgttggattcctgaacgccaacatcgagaaatctttgaaggattactctagcgcgtttgacattgtatatctgaacgatgctccgatgcacggagttgtgcaacttgtgtctgaattatgtccataatccagtgatcttcgaatcgcccctcagaaaaaaagtatatcttcccatcaactttgcagctaccgaagttcgctcacctggaaatggggcaaaaaaactgcctatgatctggcatgcgcatgcgcac

SEQ ID NO: 52727 - DNA, 1338 bp, Zea Mays
accattcagaaatgcggcccatgacgaacccgcccctgctctcaccgtccccgttccctcttctcctccgcctcctccacctctcgcgcgcccctcgccgccggaaccctaccaccgggcgggcacctacttgtacttcccgcgaccgcctcccgctcctcctccccgctgccatgtcctccgcttccaacaccgccccccactccgtcgtcgccgaccccactactcttgcccgcaaaatcgcagacatccgtgccgccggacccaccaaactccaggttatcgccgacttcgatggcacgctcacgcggtactggtacgacggcgcccgcgggcagagtagccatggactgcttaggcaagggaacgaggagtacgacgccaagagagaagcgttgtatcagcactaccaccccatcgagatctgccccgacatcccactctcggagaaggccaagctcatggaagaatggtgggagaagactcatggtcttcttattgaaggcggtcttacatacgaagctatcacaaaatctgtctctgatgccgcaattgctttcagagagggagagagagattccagtgctggtattttctgcaggacttgcagacataattgaagaggtcttccggcagaaattacacaaaacattcaagaacatcaaggttgtctccaacaggatggtgtttaatgaagaaggccgcctcatagcatttaaagggaaaacaattcacgttctaaacaaaaatgagcatgccttggacatggctgctccagtgcatggcaatccgggggatccaaacggatctatggatgactattcattggtgaagaaaaggaccaatgtgctgctacttggcgatcacattggggacttggggatgtctgatggtttaaactatgacaacaggatcgctgttggattcctgaacgccaacatcgagaaatctttgaaggattactctagcgcgtttgacattgtatatctgaacgatgctccgatgcacggagttgtgcaacttgtgtctgaattatgtccataatccagtgatcttcgaatcgcccctcagaaaaaaagtatatcttcccatcaactttgcagctaccgaagttcgctcacctggaaatgtaaggattccactcttgctaactagggcttgcttcatgagcagctgttctataggctcatttcagggctaaagagcccttggaacaatgttttttagcactagtgcattcaaacacccactgtagatattttctcctcctcttccaattcgaaagatccgtgaatgtttttttctgggctgtggagtgaatctggtctttgctgcgtt

SEQ ID NO: 52728 - DNA, 1686 bp, Zea Mays
cctaataaaaaaatctgacctaaaagccgaaaagacacaacccaactaaaaaacgatccgacccatccaacaggagccaaaggcaagatgttcgggcgcgcgccgaagaagagcgacaacaccaagtactacgagatcctcggggtgcccaagtcggcgtcccaggacgacctcaagaaggcctaccgcaaggcagctatcaagaaccaccccgacaagggcggtgaccccgagaagttcaaggagctcgcacaagcctatgaggttttgagtgatccagagaaacgtgagatttatgatcagtatggtgaagatgcccttaaggaaggaatgggtggtggaggtggtggaagcagcaggggaagaaggcaaaggaggggagaagatgtagtccactcacttaaagtttctctggaagatctttacaatggaatctcaaagaagctctctctttcgcgcaatgtcatctgctccaagtgcaagggcaagggctcgaagtctggtgcttcaatgaggtgccctgggtgccagggctcaggtatgaaagtcaccattcgtcagctggggccttccatgatacagcagatgcagcagccttgcaacgagtgcaaggggactggggagagcatcaacgagaaggaccgctgcccagggtgcaagggtgagaaggtcgttcaggagaagaaggttcttgaggttcatgttgagaagggaatgcaacacagccagaagatcaccttccctggtgaagctgatgaagcgcctgataccgtcactggagacattgtattcgtcctccagcagaaggaccactccaagttcaaaagaaagggtgaagatctcttttatgagcacaccctgtctctgaccgaagctctatgtgggttccaatttgttcttacacacctggacaacaggcagcttctgatcaaatcaaaccccggcgaagttgttaaacctgaccaattcaaggcgataaatgacgaggggatgcctatttaccagaggcccttcatgaaggggaagctctacattcatttcacggtggagttccccgactcgctggcaccagagcagtgcaaggctctcgagtcggtacttccgccaaagccttcgtccaagctgacagacatggagatagatgaatgcgaggagacaaccatgcatgatgtgaacaacatcgaggaagagatgcgcaggaagcaggctcatgctgctcaggaggcgtacgaggaggacgacgagatgcctggcggagcccaaagagtgcagtgcgctcaacagtaagcagactaccaaaatgggattcaaggcactttggttgctcttcaattatgcgagtgcgcctgtggactgtatggttctatggttttgctgtcgctgagctacaaagtaggaagctgatgcgcccctggctctgcaagcgggggaatgtatccttttttgctgcaactgaaaaatgctacccaggcaatagctggctaccttataacttttgcttgtgagatttgctagagtgacgattttaatttgtaggtggacttaatgtttgtgtaaggctaggcataacatcatgtctcaatggacgttgccgttgcacattggtgcattttattttaatgtaacgcatgtgcttgtgctgtcgaacaatcttggaatggtctgatcgatgatcggcgtctgttt

SEQ ID NO: 52729 - DNA, 1825 bp, Zea Mays
gtctgctatgggaaagcaagccatgggaatttatgtcaccaactaccaattaaggatggacacgttggcctacgttctatactacccacaaaagcctctagttactactcgtgctatggaacatttgcacttcagacagttaccagctggcattaatgcaattgttgctattgcttgttattctggatataatcaagaagattcagttattatgaatcaatcttccatagatcgtgggttctttcggtcactatttttccgctcttacagagacgaggaaaagaagatgggcacacttatcaaagaggaatttggtcgtccaaatagggaaaatactatgggaatgcgccatgggtcatatgataaactagatgatgatggccttgcaccacctggaacaagggtctcaggggaagatgtcattattgggaagacatctcctattccacaagatgacgctcaagggcaagcttctagatactcaaagcgtgaccatagtactgctctgcgtcacagtgaaagtggcatggtagatcaggttctgttaacaacaaatgcggatggtctaagatttgtcaaggttaggatgcgatctgttcgcataccacaaattggcgacaagtttagcagcaggcatggacaaaaaggaactgttgggatgacttacactcaagaggatatgccatggacaatcgaaggcattacacctgatattattgtgaatccacatgctattccatcccgtatgactattgggcagctgattgagtgtattatgggtaaagttgctgctcagatggggaaggaaggcgatgccactccattcacggatgtgactgtggataacatcagcaaagctcttcataaatgtaattatcaaatgcgtggatttgagacaatgtacaatggtcacactggaagaaaactgactgcgatgattttcctgggccccacatattaccaaagactcaagcacatggtggatgacaagatacattcgagaggacgtggtcctgtgcagatactcacccggcaaccagcagaggggcggtctcgtgatggaggtctccgctttggagaaatggaaagggattgtatgatcgcacatggagcagctttcttcctgaaggaaaggctgtttgaccagagtgacgcatacagagtccatgtatgcgagaaatgtggtctcatcgcaattgctaacctaaagaaaaactcgttcgaatgcaggggctgcaagaacaagactgacattgtccaagtacacataccctatgcttgtaagcttctgtttcaggagcttatggcaatggccattgctcccagaatgcttacccatgatatgaagacagggaaggatcagaagaagcgctgaacgtgtatcacgtgagatgtaaccagaactcatgccccgttgctatattcctggatcctggttcacacaatagtaccctgttgaggaactttgtggtcacttcttttctgatttggacttcggttcttcgcgatcgatggagggctgttactatctcttgatggattattatcctatctgtgctcgtgttgcctgaagatcagtgctagcagatcgtcgagttaattttgtacattaggaatgtgttgtaatgtattaatctgtgcgagtagaaagatttttgactaaaggtgtcaatttggaggtgtaactgtacgttaatactaaacgcgatgccattgcaatttcagttttattttgaaatacatggggttttagtggcatgtctctaaactatcacaatcttaatggcatggttctaattaatctttttcttcttatacaacaacc

SEQ ID NO: 52730 - DNA, 2429 bp, Zea Mays
aaaaatcttgccttgatggtatatatcactgttggttctgccgcaaatccaattttggaatttttggaggagtggggcacagaaaattttgaggagatatcaccagccgtcattccacaagctgctaaaatttttgtcaatggttgttgggttggaattcataggaaccctgacctgttggttaagactcttagacgtttaagaagacagattgatgtcaacactgaagttggtgtggtgcgtgatatccgtcttaaagaacttcgactctacacggattatggacgctgcagtcgtccattgtttattgttgagggccagaggctgctcatcaagaaggcgcatatccgagccttgagactcctgatgaaggctggcatgaattggtctcaaaaggatatatagaatacatagacactgaagaagaggagactaccatgatctccatgaccataaatgaccttcaaaatgcaaggcacaacccagaggaggcttactctgaaacttacacgcattgtgagattcatccttcattgatacttggtgtttgtgcgtcgattataccttttcctgatcacaaccagtcacctcgtaatacatatcagtctgctatgggaaagcaagccatgggaatttatgtcaccaactaccaattaaggatggacacgttggcctacgttctatactacccacaaaagcctctagttactactcgtgctatggaacatttgcacttcagacagttaccagctggcattaatgcaattgttgctattgcttgttattctggatataatcaagaagattcagttattatgaatcaatcttccatagatcgtgggttctttcggtcactatttttccgctcttacagagacgaggaaaagaagatgggcacacttatcaaagaggaatttggtcgtccaaatagggaaaatactatgggaatgcgccatgggtcatatgataaactagatgatgatggccttgcaccacctggaacaagggtctcaggggaagatgtcattattgggaagacatctcctattccacaagatgacgctcaagggcaagcttctagatactcaaagcgtgaccatagtactgctctgcgtcacagtgaaagtggcatggtagatcaggttctgttaacaacaaatgcggatggtctaagatttgtcaaggttaggatgcgatctgttcgcataccacaaattggcgacaagtttagcagcaggcatggacaaaaaggaactgttgggatgacttacactcaagaggatatgccatggacaatcgaaggcattacacctgatattattgtgaatccacatgctattccatcccgtatgactattgggcagctgattgagtgtattatgggtaaagttgctgctcagatggggaaggaaggcgatgccactccattcacggatgtgactgtggataacatcagcaaagctcttcataaatgtaattatcaaatgcgtggatttgagacaatgtacaatggtcacactggaagaaaactgactgcgatgattttcctgggccccacatattaccaaagactcaagcacatggtggatgacaagatacattcgagaggacgtggtcctgtgcagatactcacccggcaaccagcagaggggcggtctcgtgatggaggtctccgctttggagaaatggaaagggattgtatgatcgcacatggagcagctttcttcctgaaggaaaggctgtttgaccagagtgacgcatacagagtccatgtatgcgagaaatgtggtctcatcgcaattgctaacctaaagaaaaactcgttcgaatgcaggggctgcaagaacaagactgacattgtccaagtacacataccctatgcttgtaagcttctgtttcaggagcttatggcaatggccattgctcccagaatgcttacccatgatatgaagacagggaaggatcagaagaagcgctgaacgtgtatcacgtgagatgtaaccagaactcatgccccgttgctatattcctggatcctggttcacacaatagtaccctgttgaggaactttgtggtcacttcttttctgatttggacttcggttcttcgcgatcgatggagggctgttactatctcttgatggattattatcctatctgtgctcgtgttgcctgaagatcagtgctagcagatcgtcgagttaattttgtacattaggaatgtgttgtaatgtattaatctgtgcgagtagaaagatttttgactaaaggtgtcaatttggaggtgtaactgtacgttaatactaaacgcgatgccattgcaatttcagttttattttgaaatacatggggttttagtggcatgtctctaaactatcacaatcttaatggcatggttctaattaatctttttcttcttatacaacaacc

SEQ ID NO: 52731 - DNA, 4133 bp, Zea Mays
ctcgccatttcgcccccgccccccaatctctgcgtctctagctctcgggagaggcggctcgccgcgacatcgatcccgaccgggcaccggctcaccccggcccccagcgtagcagctcgccactagggctagcgctctgtccatggaggatgacgagtacgaggatgggatggacatgggctacggcgggcatcaccagcgcggcggcggccacgcggggtacggcgcggaggaggacgacgagatggggtatggcgaggggggtggggacggggacgagatggaggaggaggcggatggggacgccgagcagcaggaagatatcacgcaggacgacgcctgggccgtcatctccgcctacttcgaggagaagggcctcgtgcgccagcagctcgactccttcgatgagttcatccagaacaccatgcaagagattgtcgatgagtccgccgacatcgagatccggcccgagtcgcagcacaaccccggccgtcaggccgagtttgccgagagtaatgaagaaaggacatgactgtgaggaagttacagagactgctgagtatccaaaagtgtttattgggaaggttccaatcatgttgcgttctagttactgcacactgtatcaacagtctgagaaggatctcactgaacttggggagtgtccttatgatcaaggtggttatttcattatcaatggaagcgaaaaggtccttattgcccaggagaagatgagcaccaaccatgtctatgtttttaagaagaggcagcctaacaaattcgcatatgtggctgaagtccgctccatggctgagaaccagaacagaccagccagcagcatgtttgtacggatgctttcacgagcaggagcaaaagggggatcatctggtcaatatatccgtgctactctgccttatattcgagcggacattcccattattattgtatttcgagcattaggatttgttgccgacaaggatatactggagcatatatgttatgacttttctgatacacaaatgatggaattgctacgtccatccctggaggaagcttttgtcattcaaaatcaacaggttgctctggactacattggaaagcgtggcgcaacagttggtgtcactcgagaaaagagaattaaatacgcaaaggaaatacttcagaaggaaatgttgcctcatgttggtgttggggaattctgtgaaactaagaaggcatactattttgggtatattattcaccgcctactgatgtgcgctcttagtcgaagagctgaggatgaccgagatcattatggaaacaaacgactagatcttgctggtccactgcttggagggctgtttagaatgcttttcaggaagttaacaagggacgtgagatcttatgtgcaaaagtgtgtagataatggaaaggaagttaatttgcaatttgctataaaagcaaaaactattaccagtggtttgaagtactcccttgctactggaaactggggacaggctaaccaagctggaaccagagcaggggtttctcaggtgctcaatcgcctgacctatgcttctacactttcacatctccggaggcttaactctcccattgggcgtgaaggaaaattggcaaaaccccgccagttgcataattcgcattggggaatgatgtgtcctgctgaaacaccagaaggacaagcttgtggcttggtgaaaaatcttgccttgatggtatatatcactgttggttctgccgcaaatccaattttggaatttttggaggagtggggcacagaaaattttgaggagatatcaccagccgtcattccacaagctgctaaaatttttgtcaatggttgttgggttggaattcataggaaccctgacctgttggttaagactcttagacgtttaagaagacagattgatgtcaacactgaagttggtgtggtgcgtgatatccgtcttaaagaacttcgactctacacggattatggacgctgcagtcgtccattgtttattgttgagggccagaggctgctcatcaagaaggcgcatatccgagccttgcaacaaagggagactcctgatgaaggctggcatgaattggtctcaaaaggatatatagaatacatagacactgaagaagaggagactaccatgatctccatgaccataaatgaccttcaaaatgcaaggcacaacccagaggaggcttactctgaaacttacacgcattgtgagattcatccttcattgatacttggtgtttgtgcgtcgattataccttttcctgatcacaaccagtcacctcgtaatacatatcagtctgctatgggaaagcaagccatgggaatttatgtcaccaactaccaattaaggatggacacgttggcctacgttctatactacccacaaaagcctctagttactactcgtgctatggaacatttgcacttcagacagttaccagctggcattaatgcaattgttgctattgcttgttattctggatataatcaagaagattcagttattatgaatcaatcttccatagatcgtgggttctttcggtcactatttttccgctcttacagagacgaggaaaagaagatgggcacacttatcaaagaggaatttggtcgtccaaatagggaaaatactatgggaatgcgccatgggtcatatgataaactagatgatgatggccttgcaccacctggaacaagggtctcaggggaagatgtcattattgggaagacatctcctattccacaagatgacgctcaagggcaagcttctagatactcaaagcgtgaccatagtactgctctgcgtcacagtgaaagtggcatggtagatcaggttctgttaacaacaaatgcggatggtctaagatttgtcaaggttaggatgcgatctgttcgcataccacaaattggcgacaagtttagcagcaggcatggacaaaaaggaactgttgggatgacttacactcaagaggatatgccatggacaatcgaaggcattacacctgatattattgtgaatccacatgctattccatcccgtatgactattgggcagctgattgagtgtattatgggtaaagttgctgctcagatggggaaggaaggcgatgccactccattcacggatgtgactgtggataacatcagcaaagctcttcataaatgtaattatcaaatgcgtggatttgagacaatgtacaatggtcacactggaagaaaactgactgcgatgattttcctgggccccacatattaccaaagactcaagcacatggtggatgacaagatacattcgagaggacgtggtcctgtgcagatactcacccggcaaccagcagaggggcggtctcgtgatggaggtctccgctttggagaaatggaaagggattgtatgatcgcacatggagcagctttcttcctgaaggaaaggctgtttgaccagagtgacgcatacagagtccatgtatgcgagaaatgtggtctcatcgcaattgctaacctaaagaaaaactcgttcgaatgcaggggctgcaagaacaagactgacattgtccaagtacacataccctatgcttgtaagcttctgtttcaggagcttatggcaatggccattgctcccagaatgcttacccatgatatgaagacagggaaggatcagaagaagcgctgaacgtgtatcacgtgagatgtaaccagaactcatgccccgttgctatattcctggatcctggttcacacaatagtaccctgttgaggaactttgtggtcacttcttttctgatttggacttcggttcttcgcgatcgatggagggctgttactatctcttgatggattattatcctatctgtgctcgtgttgcctgaagatcagtgctagcagatcgtcgagttaattttgtacattaggaatgtgttgtaatgtattaatctgtgcgagtagaaagatttttgactaaaggtgtcaatttggaggtgtaactgtacgttaatactaaacgcgatgccattgcaatttcagttttattttgaaatacatggggttttagtggcatgtctctaaactatcacaatcttaatggcatggttctaattaatctttttcttcttatacaacaacc

SEQ ID NO: 52732 - DNA, 4305 bp, Zea Mays
agcacgttcccattgcgctttccctcgccatttcgcccccgccccccaatctctgcgtctctagctctcgggagaggcggctcgccgcgacatcgatcccgaccgggcaccggctcaccccggcccccagcgtagcagctcgccactagggctagcgctctgtccatggaggatgacgagtacgaggatgggatggacatgggctacggcgggcatcaccagcgcggcggcggccacgcggggtacggcgcggaggaggacgacgagatggggtatggcgaggggggtggggacggggacgagatggaggaggaggcggatggggacgccgagcagcaggaagatatcacgcaggacgacgcctgggccgtcatctccgcctacttcgaggagaagggcctcgtgcgccagcagctcgactccttcgatgagttcatccagaacaccatgcaagagattgtcgatgagtccgccgacatcgagatccggcccgagtcgcagcacaaccccggccgtcaggccgagtttgccgagactctgcacaagatcagctttggtcaaatctatctcagcaagccaatgatgactgaagccgatggagagacagctactttatttccaaaatcagcaaggctcaggaacctgacatactctgctccactgtatgttgatgtgtcatacagagtaatgaagaaaggacatgactgtgaggaagttacagagactgctgagtatccaaaagtgtttattgggaaggttccaatcatgttgcgttctagttactgcacactgtatcaacagtctgagaaggatctcactgaacttggggagtgtccttatgatcaaggtggttatttcattatcaatggaagcgaaaaggtccttattgcccaggagaagatgagcaccaaccatgtctatgtttttaagaagaggcagcctaacaaattcgcatatgtggctgaagtccgctccatggctgagaaccagaacagaccagccagcagcatgtttgtacggatgctttcacgagcaggagcaaaagggggatcatctggtcaatatatccgtgctactctgccttatattcgagcggacattcccattattattgtatttcgagcattaggatttgttgccgacaaggatatactggagcatatatgttatgacttttctgatacacaaatgatggaattgctacgtccatccctggaggaagcttttgtcattcaaaatcaacaggttgctctggactacattggaaagcgtggcgcaacagttggtgtcactcgagaaaagagaattaaatacgcaaaggaaatacttcagaaggaaatgttgcctcatgttggtgttggggaattctgtgaaactaagaaggcatactattttgggtatattattcaccgcctactgatgtgcgctcttagtcgaagagctgaggatgaccgagatcattatggaaacaaacgactagatcttgctggtccactgcttggagggctgtttagaatgcttttcaggaagttaacaagggacgtgagatcttatgtgcaaaagtgtgtagataatggaaaggaagttaatttgcaatttgctataaaagcaaaaactattaccagtggtttgaagtactcccttgctactggaaactggggacaggctaaccaagctggaaccagagcaggggtttctcaggtgctcaatcgcctgacctatgcttctacactttcacatctccggaggcttaactctcccattgggcgtgaaggaaaattggcaaaaccccgccagttgcataattcgcattggggaatgatgtgtcctgctgaaacaccagaaggacaagcttgtggcttggtgaaaaatcttgccttgatggtatatatcactgttggttctgccgcaaatccaattttggaatttttggaggagtggggcacagaaaattttgaggagatatcaccagccgtcattccacaagctgctaaaatttttgtcaatggttgttgggttggaattcataggaaccctgacctgttggttaagactcttagacgtttaagaagacagattgatgtcaacactgaagttggtgtggtgcgtgatatccgtcttaaagaacttcgactctacacggattatggacgctgcagtcgtccattgtttattgttgagggccagaggctgctcatcaagaaggcgcatatccgagccttgcaacaaagggagactcctgatgaaggctggcatgaattggtctcaaaaggatatatagaatacatagacactgaagaagaggagactaccatgatctccatgaccataaatgaccttcaaaatgcaaggcacaacccagaggaggcttactctgaaacttacacgcattgtgagattcatccttcattgatacttggtgtttgtgcgtcgattataccttttcctgatcacaaccagtcacctcgtaatacatatcagtctgctatgggaaagcaagccatgggaatttatgtcaccaactaccaattaaggatggacacgttggcctacgttctatactacccacaaaagcctctagttactactcgtgctatggaacatttgcacttcagacagttaccagctggcattaatgcaattgttgctattgcttgttattctggatataatcaagaagattcagttattatgaatcaatcttccatagatcgtgggttctttcggtcactatttttccgctcttacagagacgaggaaaagaagatgggcacacttatcaaagaggaatttggtcgtccaaatagggaaaatactatgggaatgcgccatgggtcatatgataaactagatgatgatggccttgcaccacctggaacaagggtctcaggggaagatgtcattattgggaagacatctcctattccacaagatgacgctcaagggcaagcttctagatactcaaagcgtgaccatagtactgctctgcgtcacagtgaaagtggcatggtagatcaggttctgttaacaacaaatgcggatggtctaagatttgtcaaggttaggatgcgatctgttcgcataccacaaattggcgacaagtttagcagcaggcatggacaaaaaggaactgttgggatgacttacactcaagaggatatgccatggacaatcgaaggcattacacctgatattattgtgaatccacatgctattccatcccgtatgactattgggcagctgattgagtgtattatgggtaaagttgctgctcagatggggaaggaaggcgatgccactccattcacggatgtgactgtggataacatcagcaaagctcttcataaatgtaattatcaaatgcgtggatttgagacaatgtacaatggtcacactggaagaaaactgactgcgatgattttcctgggccccacatattaccaaagactcaagcacatggtggatgacaagatacattcgagaggacgtggtcctgtgcagatactcacccggcaaccagcagaggggcggtctcgtgatggaggtctccgctttggagaaatggaaagggattgtatgatcgcacatggagcagctttcttcctgaaggaaaggctgtttgaccagagtgacgcatacagagtccatgtatgcgagaaatgtggtctcatcgcaattgctaacctaaagaaaaactcgttcgaatgcaggggctgcaagaacaagactgacattgtccaagtacacataccctatgcttgtaagcttctgtttcaggagcttatggcaatggccattgctcccagaatgcttacccatgatatgaagacagggaaggatcagaagaagcgctgaacgtgtatcacgtgagatgtaaccagaactcatgccccgttgctatattcctggatcctggttcacacaatagtaccctgttgaggaactttgtggtcacttcttttctgatttggacttcggttcttcgcgatcgatggagggctgttactatctcttgatggattattatcctatctgtgctcgtgttgcctgaagatcagtgctagcagatcgtcgagttaattttgtacattaggaatgtgttgtaatgtattaatctgtgcgagtagaaagatttttgactaaaggtgtcaatttggaggtgtaactgtacgttaatactaaacgcgatgccattgcaatttcagttttattttgaaatacatggggttttagtggcatgtctctaaactatcacaatcttaatggcatggttctaattaatctttttcttcttatacaacaacc

SEQ ID NO: 52733 - DNA, 633 bp, Zea Mays
agttactgcacactgtatcaacagtctgagaaggatctcactgaacttggggagtgtccttatgatcaaggtggttatttcattatcaatggaagcgaaaaggtccttattgcccaggagaagatgagcaccaaccatgtctatgtttttaagaagaggcagcctaacaaattcgcatatgtggctgaagtccgctccatggctgagaaccagaacagaccagccagcagcatgtttgtacggatgctttcacgagcaggagcaaaagggggatcatctggtcaatatatccgtgctactctgccttatattcgagcggacattcccattattattgtatttcgagcattaggatttgttgccgacaaggatatactggagcatatatgttatgacttttctgatacacaaatgatggaattgctacgtccatccctggaggaagcttttgtcattcaaaatcaacagaggttgctctggactacattggaaagcgtggcgcaacagttggtgtcactcgagaaaagagaattaaatacgcaaaggaaatacttcagaaggaaatgttgcctcatgttggtgttggggaattctgtgaaactaagaaggcatactattttgggtatattattc

SEQ ID NO: 52734 - DNA, 2744 bp, Zea Mays
aaatgcgattttttttctctctccctctcttcgttcactctctctgcgctctccggactccggtcttcttcctcgccttcacaccttctgacatttgcgattcatttaccgtaccgtgaacgacgaccgccgccctccggcctccgggtcgcccccccctggattcgcgcccgcgccaccgcgtctccggatcctctcggagatctgctgctgagggagatgcatataatctgagctgctcgtgaagtgtccagaagaggttcctttttttttcgtgcgtgtataatggaggaagtggaggaggcgaacagggaagccgtggagagctgccgcagggtgctagccttgctctcccatccgcatgaccccgcgcaggtcaggagcatagctctggggacggacgaagcatgcaccaagtttaggaaggtggtctccctgctcagcaatggagaagtaggaacaggagaagccggaccatcaggcacaagcgcaagcgcaagccatcctagagctaagcttgttagcagaagacagaatccagggttcttgactcagaaaggcttcctggacagtaacaccccggtcgtggtgctgaacagcgccgcccatccttctccgacctccgcgcaggtgcatccaagagccggagcattggatacggagggcgtgcaccccctcggagttggaggacctcccaagctggtccagcctttgtccgcgcattttcagttcggcaatgtgtcgtcgaggtatcagcagttaccgagtcatcatcatcgtcatcagcagcaggagaagctgcaggccgccgagatgttcaagagaagcaacagcgggataaacctgaagttcgagagcgccagcggcacgggtacaatgtcgtcggcgaggtccttcctgtcgtctctgagcatggatggcagcgtggtggctagcctggatggcaagctgccgtcgtcgtcgtcatcgttccgtttgatcggtgcgcctgcaatgagcgatccggcgaacgccgcgcagcaggccccgaggcggcggtgcacgggccgcgggaaggacgggactggcaagtgcgctttggcgggcaggtgccattgttcaaagagaagtaagaagttgcgggtgaagaggtcgattaaggttcctgccgttagtaacaagatcgctgatatacctccggatgagtactcgtggaggaagtatgggcagaagccgatcaagggttcccctcatcctaggtatggactgaacactgaagtagtatgattagtctagtctaatctttcttgcatgctagacgattccacaattaatgccaccaacaatgtcaactcatcagttttgtcagcaaggacgtctcatcatctgcaatgtgataatgcggtacaagttccatgatatactcaagtgccttgttgataaataacgaaccgatgataatcataacacactttatctgagtggatatgcttatctacatttgttttctgcacctcttctttttttcctttcccatggattccctcccaacacttggtgtggggggcacttaagacatgtttggcatggaattcccttccatgtggattctctccaattcccttgtcagctcatcgttttcttgaatgaaatgcaggggctactacaaatgcagcagtgtgaggggctgtccagctaggaagcacgtggaacggtgtgtggatgattcggcgatgctcatcgtgacatacgagggcgagcacaaccacaccggaatgccagctcagtcagcagcagcagcagcacaggtgtagccgtgtagtcgtagagaactcatcatcagttcatcactgcacccccgcctccccctccttgaggacgaagtggcaccaccaacatggcctctgttggtcaccaggtcgtcgagatgtctggtcctgcttgcgcccacaagatctgtagcgagaatggagtgtgggtgtacacaagactttctaatccatttgtgggggcagctggctgtcgctcaggattatttattgtggtcttgttgagaggtggaagggagaaagtaaaagtttggcgggaacgggatagccgtgtaaactacttgttcatagcacaatcgtcagcggcactgccttcgtttctctgctacggttcttttttgaaacgaaccaggcaggagagctgtcgattatatttataaagaagaagtggtccggatcgaactaatcaacaaaacaaacaataggcggttggattgggacatcaacacgctgacaccatacaacttaactcgccggttggattgagacatcaacacggcaccacactcaccgccgacacagagtgcccaaacaaacacaggcagcggcaaccccacacgagagcatataaaactgcttaaggtcatcgttgtcaagcaaggatgcagagcatccagcaactccgactttccaaagcagccgacagacgaaccaaacgaaaagcagacagacaaccctaagcgaaaggtctcaacaggtcatcgttgccgggctcaaggcacagagcagctccgacttccaatcttgaccctccgccctgccttcggtttttgcccgaccttcgaaacattctggaccacgaagaagggaggttcgcctcatgttatcgttgccgagccacatcccctgacatagcagctccgacttcacgttgcaaaaccccacctccacctgcgtaccaggcgtcgagaagcgaagcaacagttgaaggcaaag

SEQ ID NO: 52735 - DNA, 2449 bp, Zea Mays
gaaaggctcgcgtatgccttccccctcctccacctttttcccccgttcgagtgctcgagctccgaccaaatctcgcagcggtagcaatccccgagcggccgagcccgaagcgggatcagtggaggacgagtggacgacaccctcgattctgacctgcggtcggcgcgacttacagagaaccggagatgcagcagggcgacagcacggaggcgcaggtgacgtgggaggaccagcagaacatcaaccgcttcggtcgcctcaacaaccgcctccacgagctccaggacgagatcaaactcgcgaagatctgctgctgagggagatgcatataatctgagctgctcgtgaagtgtccagaagaggttcctttttttttcgtgcgtgtataatggaggaagtggaggaggcgaacagggaagccgtggagagctgccgcagggtgctagccttgctctcccatccgcatgaccccgcgcaggtcaggagcatagctctggggacggacgaagcatgcaccaagtttaggaaggtggtctccctgctcagcaatggagaagtaggaacaggagaagccggaccatcaggcacaagcgcaagcgcaagccatcctagagctaagcttgttagcagaagacagaatccagggttcttgactcagaaaggcttcctggacagtaacaccccggtcgtggtgctgaacagcgccgcccatccttctccgacctccgcgcaggtgcatccaagagccggagcattggatacggagggcgtgcaccccctcggagttggaggacctcccaagctggtccagcctttgtccgcgcattttcagttcggcaatgtgtcgtcgaggtatcagcagttaccgagtcatcatcatcgtcatcagcagcaggagaagctgcaggccgccgagatgttcaagagaagcaacagcgggataaacctgaagttcgagagcgccagcggcacgggtacaatgtcgtcggcgaggtccttcctgtcgtctctgagcatggatggcagcgtggtggctagcctggatggcaagctgccgtcgtcgtcgtcatcgttccgtttgatcggtgcgcctgcaatgagcgatccggcgaacgccgcgcagcaggccccgaggcggcggtgcacgggccgcgggaaggacgggactggcaagtgcgctttggcgggcaggtgccattgttcaaagagaagtaagaagttgcgggtgaagaggtcgattaaggttcctgccgttagtaacaagatcgctgatatacctccggatgagtactcgtggaggaagtatgggcagaagccgatcaagggttcccctcatcctaggggctactacaaatgcagcagtgtgaggggctgtccagctaggaagcacgtggaacggtgtgtggatgattcggcgatgctcatcgtgacatacgagggcgagcacaaccacaccggaatgccagctcagtcagcagcagcagcagcacaggtgtagccgtgtagtcgtagagaactcatcatcagttcatcactgcacccccgcctccccctccttgaggacgaagtggcaccaccaacatggcctctgttggtcaccaggtcgtcgagatgtctggtcctgcttgcgcccacaagatctgtagcgagaatggagtgtgggtgtacacaagactttctaatccatttgtgggggcagctggctgtcgctcaggattatttattgtggtcttgttgagaggtggaagggagaaagtaaaagtttggcgggaacgggatagccgtgtaaactacttgttcatagcacaatcgtcagcggcactgccttcgtttctctgctacggttcttttttgaaacgaaccaggcaggagagctgtcgattatatttataaagaagaagtggtccggatcgaactaatcaacaaaacaaacaataggcggttggattgggacatcaacacgctgacaccatacaacttaactcgccggttggattgagacatcaacacggcaccacactcaccgccgacacagagtgcccaaacaaacacaggcagcggcaaccccacacgagagcatataaaactgcttaaggtcatcgttgtcaagcaaggatgcagagcatccagcaactccgactttccaaagcagccgacagacgaaccaaacgaaaagcagacagacaaccctaagcgaaaggtctcaacaggtcatcgttgccgggctcaaggcacagagcagctccgacttccaatcttgaccctccgccctgccttcggtttttgcccgaccttcgaaacattctggaccacgaagaagggaggttcgcctcatgttatcgttgccgagccacatcccctgacatagcagctccgacttcacgttgcaaaaccccacctccacctgcgtaccaggcgtcgagaagcgaagcaacagttgaaggcaaag

SEQ ID NO: 52736 - DNA, 663 bp, Zea Mays
cccagatttacacaaataatcgaccttcctggaaacgaacgagaaccttgacgatgctgggaacgaactcatcctgtcggacgaagatgtcgtgcgcttccagatcggggaggtgtttgctcacatgccgagggacgacgtcgagactaggctggagcagatgaaagaggatgcggctaagaagctggagaggctagaggaggagaaggaatccgtcctcgcccagatggccgagctgaagaagatactgtacgggaagttcaaggacgccatcaacctggaggaagattaagagtagtactggagttgtgacgacgtggccctctctttctagttcaggtcctgtttttgttcccctgctccccccacagaagcgcttggcccgctcgtgtaatggaagcttgagtctctcagtctttcagaagctcttttcaccaagaacccagaatagttttcattctgcgggtttatacggattgaagctaatggcgctgggcccatgaatcctttttcagtttgattgtacttggtgtatgtgggtacatcgcttgccctatttcctagtacttactagcaagcctgtgactgtgagtaccggaaaacagtggagataacgggcatgtaggtcttgttttctgcctaatatgttgggaatcatttgca

SEQ ID NO: 52737 - DNA, 1470 bp, Zea Mays
catgtattgagggcaagggctgaaaggctcgcgtatgccttccccctcctccacctttttcccccgttcgagtgctcgagctccgaccaaatctcgcagcggtagcaatccccgagcggccgagcccgaagcgggatcagtggaggacgagtggacgacaccctcgattctgacctgcggtcggcgcgacttacagagaaccggagatgcagcagggcgacagcacggaggcgcaggtgacgtgggaggaccagcagaacatcaaccgcttcggtcgcctcaacaaccgcctccacgagctccaggacgagatcaaactcgcgaagttacaatgggagcactgcaaacgatcagattggagaagagtcgaaggtagaagccgatgagctgaaatcccctcgcagtcgtagcgtcgtgaaggtgcgaatgttgtggctggaatagagacatgtgtgcactccatgtagatgatagcccccggatgccgaggtagccgaagtcgaggtggtcgaagttcgagcatcaacggtcggtggggtgacacaaaaatggacaacaacagactcgtggaccttcttgattctttccgtgtccggtcatcgaggagcctcgccaaggaagccggcgcagcgcatgcgtctgcgctggtcaaggtggctgcgctcgctagaggggccgcgccggcctccggccagtggaggcggcggcggatccggtcgggaaggccacgacagcgacagatctagccataaagactcgcttcgacagcaattcgttagcctaaaacaagggagtggtactgttcaggactacatatgaaacgcgacaacttgatgaggaaacgaacgagaaccttgacgatgctgggaacgaactcatcctgtcggacgaagatgtcgtgcgcttccagatcggggaggtgtttgctcacatgccgagggacgacgtcgagactaggctggagcagatgaaagaggatgcggctaagaagctggagaggctagaggaggagaaggaatccgtcctcgcccagatggccgagctgaagaagatactgtacgggaagttcaaggacgccatcaacctggaggaagattaagagtagtactggagttgtgacgacgtggccctctctttctagttcaggtcctgtttttgttcccctgctccccccacagaagcgcttggcccgctcgtgtaatggaagcttgagtctctcagtctttcagaagctcttttcaccaagaacccagaatagttttcattctgcgggtttatacggattgaagctaatggcgctgggcccatgaatcctttttcagtttgattgtacttggtgtatgtgggtacatcgcttgccctatttcctagtacttactagcaagcctgtgactgtgagtaccggaaaacagtggagataacgggcatgtaggtcttgttttctgcctaatatgttgggaatcatttgca

SEQ ID NO: 52738 - DNA, 748 bp, Zea Mays
tggatctctgttaggctgtgaagccttttttatcataaagtggaaggcgtgctgattattttaactctatctctaattcaactgaggataagaatagggataatatgagctcatctcgatcaaccgaagagctgtggcaagtgttctttgccaatcctcttgactggtgggataacaggacaaataagaagaacccaaggtatccagacttcaagcataagcagactggcgaagcactatgggttgacgggaggaacaaccccaactgggttatatctcagctggcggttttggactcgagaatgagttcgctgcaagacaatgagaggaaaccagtctcctatatgtatgctgacgagttcatgacattggacggcaaccgatagtcgttatggaggagggaagcttcgctcgtgccgattggctggctgttatggcgagcgagatcatgctgtcgacctgtcttagtagctagctcatgcttgctgtctcagttttgttgagcggctctggagggttgcgtgttatgagcgtcgtccgtagtatggtttgtgacataaggtagctatgatgagcctagaacaaacataaacaaagtgcgggggaaacccttgcttttagtgactccattagtagtgctatgtggtttgtgacatggtttttaactatgatgttacgccgaatggtaatatattgaagaacgtgccgtggccctacacaacttagttattatttagactagatggag

SEQ ID NO: 52739 - DNA, 1208 bp, Zea Mays
gtttgagaccggctgacagccacaacagcagctcgtgacccattagtaggggagctgctggagcacacgcacggccacgccccgatatcgccatggctatcctcgccgttgcctctccactcaaaaccctaaaccctagccccggggaccacagccgctgccgcctctcctcttccctcctccaccttccgctaccagtgccacgatggcgccgcctccggtgctccgctcagtacagtgaggcggcggcgcagcccacgtcgacaacgacggcgcgtccagcggacataccctggagcaaggagctctgcaactcggtgcggctcattgggactgtaggcaccgacgtagagctgcggcagctgcccagcggctccgccgttgcgaggggtcgcctcgccgtatggaagtcagccaccgagactacatgggtaactctacaattctgggacgatcttgctattgtggcctctgagcatgttaagaagggtgaccggatatttgtttctggacggcttgtgtcagatactgttgatgaggggcctgagaagcggcatgtttactacaagcttgcagttcaacagttgaatttcatcgagtcccagccagttcgattatatgaaccagaggcaagccaggatgccctagaagaacccaaggtatccagacttcaagcataagcagactggcgaagcactatgggttgacgggaggaacaaccccaactgggttatatctcagctggcggttttggactcgagaatgagttcgctgcaagacaatgagaggaaaccagtctcctatatgtatgctgacgagttcatgacattggacggcaaccgatagtcgttatggaggagggaagcttcgctcgtgccgattggctggctgttatggcgagcgagatcatgctgtcgacctgtcttagtagctagctcatgcttgctgtctcagttttgttgagcggctctggagggttgcgtgttatgagcgtcgtccgtagtatggtttgtgacataaggtagctatgatgagcctagaacaaacataaacaaagtgcgggggaaacccttgcttttagtgactccattagtagtgctatgtggtttgtgacatggtttttaactatgatgttacgccgaatggtaatatattgaagaacgtgccgtggccctacacaacttagttattatttagactagatggag

SEQ ID NO: 52740 - DNA, 1409 bp, Zea Mays
gtttgagaccggctgacagccacaacagcagctcgtgacccattagtaggggagctgctggagcacacgcacggccacgccccgatatcgccatggctatcctcgccgttgcctctccactcaaaaccctaaaccctagccccggggaccacagccgctgccgcctctcctcttccctcctccaccttccgctaccagtgccacgatggcgccgcctccggtgctccgctcagtacagtgaggcggcggcgcagcccacgtcgacaacgacggcgcgtccagcggacataccctggagcaaggagctctgcaactcggtgcggctcattgggactgtaggcaccgacgtagagctgcggcagctgcccagcggctccgccgttgcgaggggtcgcctcgccgtatggaagtcagccaccgagactacatgggtaactctacaattctgggacgatcttgctattgtggcctctgagcatgttaagaagggtgaccggatatttgtttctggacggcttgtgtcagatactgttgatgaggggcctgagaagcggcatgtttactacaagcttgcagttcaacagttgaatttcatcgagtcccagccagttcgattatatgaaccagaggcaagccaggatgccctaggtggaaggcgtgctgattattttaactctatctctaattcaactgaggataagaatagggataatatgagctcatctcgatcaaccgaagagctgtggcaagtgttctttgccaatcctcttgactggtgggataacaggacaaataagaggtctgctgaacgtttgcttggcttgtgtcctcaaatcgtaccatcaacagaagaacccaaggtatccagacttcaagcataagcagactggcgaagcactatgggttgacgggaggaacaaccccaactgggttatatctcagctggcggttttggactcgagaatgagttcgctgcaagacaatgagaggaaaccagtctcctatatgtatgctgacgagttcatgacattggacggcaaccgatagtcgttatggaggagggaagcttcgctcgtgccgattggctggctgttatggcgagcgagatcatgctgtcgacctgtcttagtagctagctcatgcttgctgtctcagttttgttgagcggctctggagggttgcgtgttatgagcgtcgtccgtagtatggtttgtgacataaggtagctatgatgagcctagaacaaacataaacaaagtgcgggggaaacccttgcttttagtgactccattagtagtgctatgtggtttgtgacatggtttttaactatgatgttacgccgaatggtaatatattgaagaacgtgccgtggccctacacaacttagttattatttagactagatggag

SEQ ID NO: 52741 - DNA, 1244 bp, Zea Mays
gtttgagaccggctgacagccacaacagcagctcgtgacccattagtaggggagctgctggagcacacgcacggccacgccccgatatcgccatggctatcctcgccgttgcctctccactcaaaaccctaaaccctagccccggggaccacagccgctgccgcctctcctcttccctcctccaccttccgctaccagtgccacgatggcgccgcctccggtgctccgctcagtacagtgaggcggcggcgcagcccacgtcgacaacgacggcgcgtccagcggacataccctggagcaaggagctctgcaactcgggtaactctacaattctgggacgatcttgctattgtggcctctgagcatgttaagaagggtgaccggatatttgtttctggacggcttgtgtcagatactgttgatgaggggcctgagaagcggcatgtttactacaagcttgcagttcaacagttgaatttcatcgagtcccagccagttcgattatatgaaccagaggcaagccaggatgccctaggtggaaggcgtgctgattattttaactctatctctaattcaactgaggataagaatagggataatatgagctcatctcgatcaaccgaagagctgtggcaagtgttctttgccaatcctcttgactggtgggataacaggacaaataagaagaacccaaggtatccagacttcaagcataagcagactggcgaagcactatgggttgacgggaggaacaaccccaactgggttatatctcagctggcggttttggactcgagaatgagttcgctgcaagacaatgagaggaaaccagtctcctatatgtatgctgacgagttcatgacattggacggcaaccgatagtcgttatggaggagggaagcttcgctcgtgccgattggctggctgttatggcgagcgagatcatgctgtcgacctgtcttagtagctagctcatgcttgctgtctcagttttgttgagcggctctggagggttgcgtgttatgagcgtcgtccgtagtatggtttgtgacataaggtagctatgatgagcctagaacaaacataaacaaagtgcgggggaaacccttgcttttagtgactccattagtagtgctatgtggtttgtgacatggtttttaactatgatgttacgccgaatggtaatatattgaagaacgtgccgtggccctacacaacttagttattatttagactagatggag

SEQ ID NO: 52742 - DNA, 1699 bp, Zea Mays
cccataaagcaccatcaattcctcatgcaaaaaagaaaaaaaaaacatgctttcttcttcatcaccctcttcttcctcgagacgtgattgcggatttccagtccaggaagtggcgccgctcacctccggccggctctcgcacagcagcgggcccctcaacggcggcggctccctctccgacagcccgccggtctcgccggagatcgatgacgccaagtactgcagagcggccagcacgccgaaggcgcaggcataccgggcgggcaacaagacggtggggcggtggctcaaggaccggagggagaagaggaaagaggagacgcgggcgcacaacgcgcaggtccacgcggcggtgtccgtggcggcagtggcggcggcggtggccgccgtggccgcggccacggccacggcctcggcgtccggtggcaaggacgagcgcgccgcgcgcacggacatggccgtggcgtcggccgcgacgctggtggccgcgcagtgcgtggaggcggccgaggccatgggcgccgagcgggagcacctggaggccgccgtcgggtcggccgtgagcgtccggacgccgggggacatcgtcaccgtcaccgccgccgccgccaccgcgttgagaggcgccgcgacgctgaaggcgagggctctcaaggaggtgtggaacatcgcggcggtgatcccggtggagaagggcccgggcccggtcggcggaggaggaggaggccaccaccaccaacaccaccagaagcacggcgcgcccaagcagcagctgcaccgcaagatggatagcgacggcagcagcgtcagcgacctctcgctggaggaggagaacagcttccttggcatctgcagccaggagctgcttgctcgcggcaccgaactcctcaaacgcacccggaaaggcgctctgcactggaaggtcgtgtcggtgtacatcaaccggatgggcctggtgatgctgaagacgaagagccggcacgtggcagggacgatcacgaagaagaagaaaagtgtggtggtcgaggtgtgcagggacgtgccggcgtggcccgggcggcacctgctggaggacggcgggcaccggcggtacttcggcctgcgcacggcggagcggcgggtggtcgagttcgagtgccgcagccagcgggagtacgagatgtggaccaagggcgtggcgcggctcctgagcgtggccgccgagcggaagcgcctggcgtgacagattgcgtgcaggtgcagccccgtgccgcacaggaattatgtaggtaggtatgctagggcacgaccgcacgaggttggattggatttgtggcggtgtggttttttgtacgggctgggatgcgacgccggcgcgtggaacgccatgccatgcccttgtgggtgtgagaaggcgcttgctacgctgagctgagctctgaccttgttctggctctctctctttctctttcttgtaagttttgcgtctactctctctctctctctcgttgggccatactacactgtagctggcgaaagataaatgctttgttctggtggtagtagtaactctgtctttgaccggacagtcgatgtgtttggttcccgtggtttggccatcaccatcatcctgtcctgaccgagcaacccgaagccgaggggcgctgctggtccggcaacagcgacaacagcgaaatgcaagtgcgctggagtatctgag

SEQ ID NO: 52743 - DNA, 1730 bp, Zea Mays
gtgattttgcccccctcttccccgcaccacccagctccgctcctgggtttcactctgaccccgtgtttgggctgggacaaggagaaaccgccaaaggagagatttgttttcccgcgacactcggaaacacaagtcaggaagtggcgccgctcacctccggccggctctcgcacagcagcgggcccctcaacggcggcggctccctctccgacagcccgccggtctcgccggagatcgatgacgccaagtactgcagagcggccagcacgccgaaggcgcaggcataccgggcgggcaacaagacggtggggcggtggctcaaggaccggagggagaagaggaaagaggagacgcgggcgcacaacgcgcaggtccacgcggcggtgtccgtggcggcagtggcggcggcggtggccgccgtggccgcggccacggccacggcctcggcgtccggtggcaaggacgagcgcgccgcgcgcacggacatggccgtggcgtcggccgcgacgctggtggccgcgcagtgcgtggaggcggccgaggccatgggcgccgagcgggagcacctggaggccgccgtcgggtcggccgtgagcgtccggacgccgggggacatcgtcaccgtcaccgccgccgccgccaccgcgttgagaggcgccgcgacgctgaaggcgagggctctcaaggaggtgtggaacatcgcggcggtgatcccggtggagaagggcccgggcccggtcggcggaggaggaggaggccaccaccaccaacaccaccagaagcacggcgcgcccaagcagcagctgcaccgcaagatggatagcgacggcagcagcgtcagcgacctctcgctggaggaggagaacagcttccttggcatctgcagccaggagctgcttgctcgcggcaccgaactcctcaaacgcacccggaaaggcgctctgcactggaaggtcgtgtcggtgtacatcaaccggatgggcctggtgatgctgaagacgaagagccggcacgtggcagggacgatcacgaagaagaagaaaagtgtggtggtcgaggtgtgcagggacgtgccggcgtggcccgggcggcacctgctggaggacggcgggcaccggcggtacttcggcctgcgcacggcggagcggcgggtggtcgagttcgagtgccgcagccagcgggagtacgagatgtggaccaagggcgtggcgcggctcctgagcgtggccgccgagcggaagcgcctggcgtgacagattgcgtgcaggtgcagccccgtgccgcacaggaattatgtaggtaggtatgctagggcacgaccgcacgaggttggattggatttgtggcggtgtggttttttgtacgggctgggatgcgacgccggcgcgtggaacgccatgccatgcccttgtgggtgtgagaaggcgcttgctacgctgagctgagctctgaccttgttctggctctctctctttctctttcttgtaagttttgcgtctactctctctctctctctcgttgggccatactacactgtagctggcgaaagataaatgctttgttctggtggtagtagtaactctgtctttgaccggacagtcgatgtgtttggttcccgtggtttggccatcaccatcatcctgtcctgaccgagcaacccgaagccgaggggcgctgctggtccggcaacagcgacaacagcgaaatgcaagtgcgctggagtatctgag

SEQ ID NO: 52744 - DNA, 2096 bp, Zea Mays
taaaccacatttctgaactggcatcagactcacatcactagtaacgcccccggcccccgctcgctcgcactcgcaggtcgcaccacactccgtccccctccataactcccacccgcgcgcatgggcgatccgcgggcccgcacgtccgccgtggccgccggcgagctgcggccaccggagccggcgctcgacccgctcgagttcctctcccgctcctggagcgcctccgggcgcgcgctcgcgcccacgccgccgccgccgccggccgcattcgcggccagccccatcgcggaggacgccgcgtgcgagctggacgacgggggcgtcgtcgccgccgcgtccgggagctccttctccttcgcgtccgcggccacgtcgcagctcatcatggaacggatcctcgcgcagtcccaggaagtggcgccgctcacctccggccggctctcgcacagcagcgggcccctcaacggcggcggctccctctccgacagcccgccggtctcgccggagatcgatgacgccaaggctacgggttttacactaacattgtgcaagtattggctgatgagctgcacctgcacctttcttcaatcatccactacttaaaaaccctttactgcagagcggccagcacgccgaaggcgcaggcataccgggcgggcaacaagacggtggggcggtggctcaaggaccggagggagaagaggaaagaggagacgcgggcgcacaacgcgcaggtccacgcggcggtgtccgtggcggcagtggcggcggcggtggccgccgtggccgcggccacggccacggcctcggcgtccggtggcaaggacgagcgcgccgcgcgcacggacatggccgtggcgtcggccgcgacgctggtggccgcgcagtgcgtggaggcggccgaggccatgggcgccgagcgggagcacctggaggccgccgtcgggtcggccgtgagcgtccggacgccgggggacatcgtcaccgtcaccgccgccgccgccaccgcgttgagaggcgccgcgacgctgaaggcgagggctctcaaggaggtgtggaacatcgcggcggtgatcccggtggagaagggcccgggcccggtcggcggaggaggaggaggccaccaccaccaacaccaccagaagcacggcgcgcccaagcagcagctgcaccgcaagatggatagcgacggcagcagcgtcagcgacctctcgctggaggaggagaacagcttccttggcatctgcagccaggagctgcttgctcgcggcaccgaactcctcaaacgcacccggaaaggcgctctgcactggaaggtcgtgtcggtgtacatcaaccggatgggcctggtgatgctgaagacgaagagccggcacgtggcagggacgatcacgaagaagaagaaaagtgtggtggtcgaggtgtgcagggacgtgccggcgtggcccgggcggcacctgctggaggacggcgggcaccggcggtacttcggcctgcgcacggcggagcggcgggtggtcgagttcgagtgccgcagccagcgggagtacgagatgtggaccaagggcgtggcgcggctcctgagcgtggccgccgagcggaagcgcctggcgtgacagattgcgtgcaggtgcagccccgtgccgcacaggaattatgtaggtaggtatgctagggcacgaccgcacgaggttggattggatttgtggcggtgtggttttttgtacgggctgggatgcgacgccggcgcgtggaacgccatgccatgcccttgtgggtgtgagaaggcgcttgctacgctgagctgagctctgaccttgttctggctctctctctttctctttcttgtaagttttgcgtctactctctctctctctctcgttgggccatactacactgtagctggcgaaagataaatgctttgttctggtggtagtagtaactctgtctttgaccggacagtcgatgtgtttggttcccgtggtttggccatcaccatcatcctgtcctgaccgagcaacccgaagccgaggggcgctgctggtccggcaacagcgacaacagcgaaatgcaagtgcgctggagtatctgag

SEQ ID NO: 52745 - DNA, 1115 bp, Zea Mays
gacaagtgaaaatacccgttgggctcggctcgcgcggcgccgtcctctcccactctctacgcacgaacacagcacgcgccgcaccccgctctctctctcctgcgttcccatctgcggcggggagtgagcacattgaggacggtctactcctcgttcgcgtgcggttcgtcccgagcgatccggcaaccatgaacatcttcaagaagaaggtcgaccccaaagaggctctcaggaccagcaaacgtgaaatggcggtcgccacgcggggagttgagagagagattggttccctgcaaatggaggagaaaaagctggttgcagagataaagaagactgccaagactggaaatgaggctgcaaccaaaatattagctcggcaacttgtcaggctgaggcaacaaatcctcaatttgcaaggcacacgggcacagattcgtggagtagctactcacacacaggcaatgtatgctggcacttcaatctctgctggaatgaaaggtgcaagcaaagctatgtcagcaatgaacaagcaaatggaaccggcgaaacagataaaggtcatgaaagaattccagaaacaatcaacacagttggacatgacgcttgagatgatgtctgatgctattgatgaaacacttgacaaagatgaggcggaggaggaaacagaagagcttacaaaccaggtccttgacgagattggcgtcgatgtggcttctcagctctcttcggctcctaaagggcgcatcggagctactaacaagaaagtcgataatggtcaagcacggaacgtggcggctcctgctctagaaccctcctctgctgaagttgaggatctggagaggcgactggcatctctgcgccgtacctgagtctgagctgttgaagaaagaacttgtttgtaatactagcagttattcatctatatatgtaaagttggtttatatgtgtagggaaaacagcgagctgcacatgatacggttgaacctacttaatgttttatttaatttggaagttgactgcacagtgaccctagtcgctagtcccataagccgacggaactaggcgaagccagggcttagggtcacgaagggtttagggtcacgaaggattttaat

SEQ ID NO: 52746 - DNA, 1105 bp, Zea Mays
gacaagtgaaaatacccgttgggctcggctcgcgcggcgccgtcctctcccactctctacgcacgaacacagcacgcgccgcaccccgctctctctctcctgcgttcccatctgcggcggggagtgagcacattgaggacggtctactcctcgttcgcgtgcggttcgtcccgagcgatccggcaaccatgaacatcttcaagaagaaggtcgaccccaaagaggctctcaggaccagcaaacgtgaaatggcggtcgccacgcggggagttgagagagagattggttccctgcaaatggaggagaaaaagctggttgcagagataaagaagactgccaagactggaaatgagctcggcaacttgtcaggctgaggcaacaaatcctcaatttgcaaggcacacgggcacagattcgtggagtagctactcacacacaggcaatgtatgctggcacttcaatctctgctggaatgaaaggtgcaagcaaagctatgtcagcaatgaacaagcaaatggaaccggcgaaacagataaaggtcatgaaagaattccagaaacaatcaacacagttggacatgacgcttgagatgatgtctgatgctattgatgaaacacttgacaaagatgaggcggaggaggaaacagaagagcttacaaaccaggtccttgacgagattggcgtcgatgtggcttctcagctctcttcggctcctaaagggcgcatcggagctactaacaagaaagtcgataatggtcaagcacgtcctgcaaggaacgtggcggctcctgctctagaaccctcctctgctgaagttgaggatctggagaggcgactggcatctctgcgccgtacctgagtctgagctgttgaagaaagaacttgtttgtaatactagcagttattcatctatatatgtaaagttggtttatatgtgtagggaaaacagcgagctgcacatgatacggttgaacctacttaatgttttatttaatttggaagttgactgcacagtgaccctagtcgctagtcccataagccgacggaactaggcgaagccagggcttagggtcacgaagggtttagggtcacgaaggattttaat

SEQ ID NO: 52747 - DNA, 726 bp, Zea Mays
atagcgtccggtaaaataccggagctcgccagcggccgctaaacatggagtgcccttcggtgtcctctaaattagttcccgcgcctgcttggagacttcagcctcgctctcgccgtcctcctcctccctcccatgtcgacgaggcggcagtgggcgaagccttgccctccctcggctaccggcagttgagcggcccctgggcgccatcccgtcgagcttcctcagttcctcttcgtgggtcgctagtagaagaaatacgacagaccaaggtctatccgctagaagaaacaagattgatgcatatcgctggtaaaaaaggtgttctggtgcccttcttcgtcaacacagttcaagccctgatactgtttgttcatatgcctcttaggatattcttgtattatccttcaccctttcagaatcattgtactgctaattgtttacattctaagctttcaatccaatcatttagttttcgatgtattcattagaataaatctgtgcgcagtttaccaatagtaatcgtccaaccgcctgaaatcaaatgattttgctggtggcccacttcaaatgatttgtgcgcccatcttacaactatatttgcccattgagtttataattaaggaatcaagttaaacttcataaagtttgagcaacaattaatcaaaatatgtacatgtttgaatttgtatcacttcattcacatccccaacatctgttaataaaaat

SEQ ID NO: 52748 - DNA, 626 bp, Zea Mays
cttagagcaagcatataaaggtgcaaattgttcagcagataaatcatgatggagaggtcaatcgagctcgctatatgccccaaaattcatttataattgctactaagacagttagtgcagaagtatatgtcttcgactacagcaagcacccatctaagcctccactagatggtgcatgcaaccctgatttacggctgaagggacataattctgaaggatatggcttatcatggagtatttttaatgagggacatttgttaagtgggtctgaagatgctcaaatttgcttgtgggacattaaagcaaatagtagaaacaaaagtcttgatgccctgcagatttttaagcatcatgatggtgtcgttgaagatgttgcttggcacttgaggcatgggtacttatttgggtcagttggtgacgatcatcatcttttaatttgggacctgcggtctccctcgcctgctaggcctgttcagtctgtggtggcacaccagggcgaggtgaactgcctggctttcaacccgttcaatgaatgggttgttgcaactggttctactgacaagactgtcaaattatttgatcttaggaagattcatacttctctgcacacctttgactgtcacaag

SEQ ID NO: 52749 - DNA, 625 bp, Zea Mays
gtggggtttggtttctgctgtgcaaattgttcagcagataaatcatgatggagaggtcaatcgagctcgctatatgccccaaaattcatttataattgctactaagacagttagtgcagaagtatatgtcttcgactacagcaagcacccatctaagcctccactagatggtgcatgcaaccctgatttacggctgaagggacataattctgaaggatatggcttatcatggagtatttttaatgagggacatttgttaagtgggtctgaagatgctcaaatttgcttgtgggacattaaagcaaatagtagaaacaaaagtcttgatgccctgcagatttttaagcatcatgatggtgtcgttgaagatgttgcttggcacttgaggcatgggtacttatttgggtcagttggtgacgatcatcatcttttaatttgggacctgcggtctccctcgcctgctaggcctgttcagtctgtggtggcacaccagggcgaggtgaactgcctggctttcaacccgttcaatgaatgggttgttgcaactggttctactgacaagactgtcaaattatttgatcttaggaagattcatacttctctgcacacctttgactgtcacaag

SEQ ID NO: 52750 - DNA, 696 bp, Zea Mays
ctgtggtgactccctaactatctgatgattgcagaagtgcatatgccctgcaaagattccttttctaagcactgcgccaaatcgaagaaggtgcaaattgttcagcagataaatcatgatggagaggtcaatcgagctcgctatatgccccaaaattcatttataattgctactaagacagttagtgcagaagtatatgtcttcgactacagcaagcacccatctaagcctccactagatggtgcatgcaaccctgatttacggctgaagggacataattctgaaggatatggcttatcatggagtatttttaatgagggacatttgttaagtgggtctgaagatgctcaaatttgcttgtgggacattaaagcaaatagtagaaacaaaagtcttgatgccctgcagatttttaagcatcatgatggtgtcgttgaagatgttgcttggcacttgaggcatgggtacttatttgggtcagttggtgacgatcatcatcttttaatttgggacctgcggtctccctcgcctgctaggcctgttcagtctgtggtggcacaccagggcgaggtgaactgcctggctttcaacccgttcaatgaatgggttgttgcaactggttctactgacaagactgtcaaattatttgatcttaggaagattcatacttctctgcacacctttgactgtcacaag

SEQ ID NO: 52751 - DNA, 1233 bp, Zea Mays
actcggcctgacgccgaccgataaaccccttcccccatcgcttcgctttcgctcccattccccaccatcgccccctttgctcatctccatcccacctgccaatcaaatccttgcgcctcctcccgccatttcgcccccgctcaccaggctaccccccccccccccccccccaaaccctaacccataccgacgatgccgaaggccggcagcggggtggcggacgaggaggacttccgcgccgaggtggacgagcgcctcatcaacgaggagtacaagatctggaagaagaacacacccttcctctacgacctcgtcatcacacacgcgctcgaatggccttccctcaccgtgcagtggcttcccgaacgcaccgagccgccggggaaggaccactgggtccagaagatgatcctcggcacgcacacctccgataacgagcccaactacctcatgctcgcgcaggtccagctgccccacgaagacaccgaggccgacgtgcgccactacgacgatgagcactccgacaacgggttgttcggcgcggccaccggcgagtatggaggatgcatttcagctgctgaatattggtggactaattgttctgagccggccaagcccacgacaaaggtgcaaattgttcagcagataaatcatgatggagaggtcaatcgagctcgctatatgccccaaaattcatttataattgctactaagacagttagtgcagaagtatatgtcttcgactacagcaagcacccatctaagcctccactagatggtgcatgcaaccctgatttacggctgaagggacataattctgaaggatatggcttatcatggagtatttttaatgagggacatttgttaagtgggtctgaagatgctcaaatttgcttgtgggacattaaagcaaatagtagaaacaaaagtcttgatgccctgcagatttttaagcatcatgatggtgtcgttgaagatgttgcttggcacttgaggcatgggtacttatttgggtcagttggtgacgatcatcatcttttaatttgggacctgcggtctccctcgcctgctaggcctgttcagtctgtggtggcacaccagggcgaggtgaactgcctggctttcaacccgttcaatgaatgggttgttgcaactggttctactgacaagactgtcaaattatttgatcttaggaagattcatacttctctgcacacctttgactgtcacaag

SEQ ID NO: 52752 - DNA, 1215 bp, Zea Mays
actcggcctgacgccgaccgataaaccccttcccccatcgcttcgctttcgctcccattccccaccatcgccccctttgctcatctccatcccacctgccaatcaaatccttgcgcctcctcccgccatttcgcccccgctcaccaggctaccccccccccccccccccccaaaccctaacccataccgacgatgccgaaggccggcagcggggtggcggacgaggaggacttccgcgccgaggtggacgagcgcctcatcaacgaggagtacaagatctggaagaagaacacacccttcctctacgacctcgtcatcacacacgcgctcgaatggccttccctcaccgtgcagtggcttcccgaacgcaccgagccgccggggaaggaccactgggtccagaagatgatcctcggcacgcacacctccgataacgagcccaactacctcatgctcgcgcaggtccagctgccccacgaagacaccgaggccgacgtgcgccactacgacgatgagcactccgacaacgggttgttcggcgcggccaccggcgagtatggaggatgcatttcagctgctgaatattggtggactaattgttctgagccggccaagcccacgacaaagataaatcatgatggagaggtcaatcgagctcgctatatgccccaaaattcatttataattgctactaagacagttagtgcagaagtatatgtcttcgactacagcaagcacccatctaagcctccactagatggtgcatgcaaccctgatttacggctgaagggacataattctgaaggatatggcttatcatggagtatttttaatgagggacatttgttaagtgggtctgaagatgctcaaatttgcttgtgggacattaaagcaaatagtagaaacaaaagtcttgatgccctgcagatttttaagcatcatgatggtgtcgttgaagatgttgcttggcacttgaggcatgggtacttatttgggtcagttggtgacgatcatcatcttttaatttgggacctgcggtctccctcgcctgctaggcctgttcagtctgtggtggcacaccagggcgaggtgaactgcctggctttcaacccgttcaatgaatgggttgttgcaactggttctactgacaagactgtcaaattatttgatcttaggaagattcatacttctctgcacacctttgactgtcacaag

SEQ ID NO: 52753 - DNA, 919 bp, Zea Mays
actcggcctgacgccgaccgataaaccccttcccccatcgcttcgctttcgctcccattccccaccatcgccccctttgctcatctccatcccacctgccaatcaaatccttgcgcctcctcccgccatttcgcccccgctcaccaggctaccccccccccccccccccccaaaccctaacccataccgacgatgccgaaggccggcagcggggtggcggacgaggaggacttccgcgccgaggtggacgagcgcctcatcaacgaggagtacaagatctggaagaagaacacacccttcctctacgacctcgtcatcacacacgcgctcgaatggccttccctcaccgtgcagtggcttcccgaacgcaccgagccgccggggaaggaccactgggtccagaagatgatcctcggcacgcacacctccgataacgagcccaactacctcatgctcgcgcaggtccagctgccccacgaagacaccgaggccgacgtgcgccactacgacgatgagcactccgacaacgggttgttcggcgcggccaccggcgaggtgcaaattgttcagcagataaatcatgatggagaggtcaatcgagctcgctatatgccccaaaattcatttataattgctactaagacagttagtgcagaagtatatgtcttcgactacagcaagcacccatctaagcctccactagatggtgcatgcaaccctgatttacggctgaagggacataattctgaaggatatggcttatcatggagtatttttaatgagggacatttgttaagtgggtctgaagatgctcaaatttgcttgtgggacattaaagcaaatagtagaaacaaaagtcttgatgccctgcagatttttaagtgacgcaagcttcatagaaatactaatgcagtaatgc

SEQ ID NO: 52754 - DNA, 717 bp, Zea Mays
ataaacaatgcctttatgacatatatgcaatgtcaccggtacagtgggccagaaagtagttggtggaggatttatgcccttaatgttgcctcattgtcttcatgtaagcagaatcgtttttgggtcactgcctcactggcatccattaactcgagatcgtggtgcataaaatattcgtgattactgtaacaggaagaatacaaatatctacaaaattgattactctgtaatggatactacagatattcaaacattcagtgaagaactaagtgactaaatgctacctggcatttgaacaaaaggctacccaccttctgacagacatgtgaagcgttgcagtttttccttccataatccaattgatgagttaacataggaggtctatgcacaccatattgtctgtcatcctatgaatcgattataaatttataaatttgaaatttattcagtgctatactgggtcatacgtaaatgtgctaatggtttgttaaccgaaccataactggcccaaactaaacacgtctacactcaaaacccacttcactccacccccatttcattctccccactaaaacaaatccacaccaaactgcatggattattaaatccaaatcaacccaacccaggaccttaaaccacagtttcaaaccagcttaagacatgcagagcaaagggtgctttgttgcctgctggtgtgctctgctctgcgtctctcgc

SEQ ID NO: 52755 - DNA, 479 bp, Zea Mays
aaacgaattacttttgttactttggcacttaatgcgcacttttgtccttaaatgcaaggattggattctttggaggttgcatcccttggaaactcatcgggcttgcgtccttttccatgcattttgcagagtacttagcgcctcgtgtgtcggcaaacggacagtatatctgctgtaacttacataaataatcatatgttagcctgctgctactcactgccccgcatcgattggaactaagttgatgtttggttcacataattgtataacgttaaatcatgtttgtttaagtctaaccttaatcggattccacactaaaaactgatattggcctattcaaatttattactgctgttatttatgttatattttgttttattttgcgaaccaaacggcactgtacaaattgttcctttgtacgagctcatgaaagaggaagatttttgtcctgcccgtatttgtattgtggttggttgatg

SEQ ID NO: 52756 - DNA, 1184 bp, Zea Mays
cgctagcaagccaaaatgggaaggatggttgatgaggagatcagacggaatgattcatatcctgatgtaggtccttttatttttctgtgtgttatcagtgttaagaaattagaagaacatagtgtgcaatatttggtgagtttaaaattgttgtttcattggtttagtgtattgtgaggttgtgtcctacacgaatgttggttttactgtttagtagtattcgatctttctagagaaacctgttttaattgttttctagatgatattagagaaaatatgctattatttttgacaaaactacttatatctgtgctgcgctactggtttttatgatgtaaattagcttcatagtcttggtgcactatagatgttggtgattttatccattgttatgtttattgatctccaaggttcggtgcaagtactcctgcacatccattatttatagaatcatgataatacttttgtactcatgcacatatattttttgtgtccatgaatttgctcttgcaatacgattttgctggtcttctgtgacaaaattgcattgctgatcaaatttgaacattaaaatgcacaagcggttactgcaccaatggtcttcacatgcattagctcataataattagttctataaaaaagttgatatggggatttttgtggtctggatctattaggaaatgacgacgatgcatgatgcttgggaagcaattttaaagcatggaaaaggcacttaatgcgcacttttgtccttaaatgcaaggattggattctttggaggttgcatcccttggaaactcatcgggcttgcgtccttttccatgcattttgcagagtacttagcgcctcgtgtgtcggcaaacggacagtatatctgctgtaacttacataaataatcatatgttagcctgctgctactcactgccccgcatcgattggaactaagttgatgtttggttcacataattgtataacgttaaatcatgtttgtttaagtctaaccttaatcggattccacactaaaaactgatattggcctattcaaatttattactgctgttatttatgttatattttgttttattttgcgaaccaaacggcactgtacaaattgttcctttgtacgagctcatgaaagaggaagatttttgtcctgcccgtatttgtattgtggttggttgatg

SEQ ID NO: 52757 - DNA, 902 bp, Zea Mays
ttttttttctaaaattctaagccgcaaaaatccggctccacaatcccgctgttcgcgagccactccctctcacgagtgacgacgaaaccctaggccatggcttggcgcggcgccgcctcccgctccattatcgccgccgtccgtgctcgcgccgcatccccgtcttccaccgccgcctcgcgcctccgctcgacggctccacttcccgccccctcgcgccggtccgtccccgccttcgctttcgcgaccgcgaggccgttggcggcgatgtcggggtccccggcggcggccgtggtgaagctcaccgggcactcggcgacgagcgtgcgggcgtgctgtgagctctcccagggtaccctcttctgccgcacttgtcaggatcgctagcaagccaaaatgggaaggatggttgatgaggagatcagacggaatgattcatatcctgatgcacttaatgcgcacttttgtccttaaatgcaaggattggattctttggaggttgcatcccttggaaactcatcgggcttgcgtccttttccatgcattttgcagagtacttagcgcctcgtgtgtcggcaaacggacagtatatctgctgtaacttacataaataatcatatgttagcctgctgctactcactgccccgcatcgattggaactaagttgatgtttggttcacataattgtataacgttaaatcatgtttgtttaagtctaaccttaatcggattccacactaaaaactgatattggcctattcaaatttattactgctgttatttatgttatattttgttttattttgcgaaccaaacggcactgtacaaattgttcctttgtacgagctcatgaaagaggaagatttttgtcctgcccgtatttgtattgtggttggttgatg

SEQ ID NO: 52758 - DNA, 916 bp, Zea Mays
ttttttttctaaaattctaagccgcaaaaatccggctccacaatcccgctgttcgcgagccactccctctcacgagtgacgacgaaaccctaggccatggcttggcgcggcgccgcctcccgctccattatcgccgccgtccgtgctcgcgccgcatccccgtcttccaccgccgcctcgcgcctccgctcgacggctccacttcccgccccctcgcgccggtccgtccccgccttcgctttcgcgaccgcgaggccgttggcggcgatgtcggggtccccggcggcggccgtggtgaagctcaccgggcactcggcgacgagcgtgcgggcgtgctgtgagctctcccagggccaaaatgggaaggatggttgatgaggagatcagacggaatgattcatatcctgatgaaatgacgacgatgcatgatgcttgggaagcaattttaaagcatggaaaaggcacttaatgcgcacttttgtccttaaatgcaaggattggattctttggaggttgcatcccttggaaactcatcgggcttgcgtccttttccatgcattttgcagagtacttagcgcctcgtgtgtcggcaaacggacagtatatctgctgtaacttacataaataatcatatgttagcctgctgctactcactgccccgcatcgattggaactaagttgatgtttggttcacataattgtataacgttaaatcatgtttgtttaagtctaaccttaatcggattccacactaaaaactgatattggcctattcaaatttattactgctgttatttatgttatattttgttttattttgcgaaccaaacggcactgtacaaattgttcctttgtacgagctcatgaaagaggaagatttttgtcctgcccgtatttgtattgtggttggttgatg

SEQ ID NO: 52759 - DNA, 954 bp, Zea Mays
ttttttttctaaaattctaagccgcaaaaatccggctccacaatcccgctgttcgcgagccactccctctcacgagtgacgacgaaaccctaggccatggcttggcgcggcgccgcctcccgctccattatcgccgccgtccgtgctcgcgccgcatccccgtcttccaccgccgcctcgcgcctccgctcgacggctccacttcccgccccctcgcgccggtccgtccccgccttcgctttcgcgaccgcgaggccgttggcggcgatgtcggggtccccggcggcggccgtggtgaagctcaccgggcactcggcgacgagcgtgcgggcgtgctgtgagctctcccagggtaccctcttctgccgcacttgtcaggatcgctagcaagccaaaatgggaaggatggttgatgaggagatcagacggaatgattcatatcctgatgaaatgacgacgatgcatgatgcttgggaagcaattttaaagcatggaaaaggcacttaatgcgcacttttgtccttaaatgcaaggattggattctttggaggttgcatcccttggaaactcatcgggcttgcgtccttttccatgcattttgcagagtacttagcgcctcgtgtgtcggcaaacggacagtatatctgctgtaacttacataaataatcatatgttagcctgctgctactcactgccccgcatcgattggaactaagttgatgtttggttcacataattgtataacgttaaatcatgtttgtttaagtctaaccttaatcggattccacactaaaaactgatattggcctattcaaatttattactgctgttatttatgttatattttgttttattttgcgaaccaaacggcactgtacaaattgttcctttgtacgagctcatgaaagaggaagatttttgtcctgcccgtatttgtattgtggttggttgatg

SEQ ID NO: 52760 - DNA, 845 bp, Zea Mays
ttttttttctaaaattctaagccgcaaaaatccggctccacaatcccgctgttcgcgagccactccctctcacgagtgacgacgaaaccctaggccatggcttggcgcggcgccgcctcccgctccattatcgccgccgtccgtgctcgcgccgcatccccgtcttccaccgccgcctcgcgcctccgctcgacggctccacttcccgccccctcgcgccggtccgtccccgccttcgctttcgcgaccgcgaggccgttggcggcgatgtcggggtccccggcggcggccgtggtgaagctcaccgggcactcggcgacgagcgtgcgggcgtgctgtgagctctcccagggtaccctcttctgccgcacttgtcaggatcgctagcaagcacttaatgcgcacttttgtccttaaatgcaaggattggattctttggaggttgcatcccttggaaactcatcgggcttgcgtccttttccatgcattttgcagagtacttagcgcctcgtgtgtcggcaaacggacagtatatctgctgtaacttacataaataatcatatgttagcctgctgctactcactgccccgcatcgattggaactaagttgatgtttggttcacataattgtataacgttaaatcatgtttgtttaagtctaaccttaatcggattccacactaaaaactgatattggcctattcaaatttattactgctgttatttatgttatattttgttttattttgcgaaccaaacggcactgtacaaattgttcctttgtacgagctcatgaaagaggaagatttttgtcctgcccgtatttgtattgtggttggttgatg

SEQ ID NO: 52761 - DNA, 766 bp, Zea Mays
ttttttttctaaaattctaagccgcaaaaatccggctccacaatcccgctgttcgcgagccactccctctcacgagtgacgacgaaaccctaggccatggcttggcgcggcgccgcctcccgctccattatcgccgccgtccgtgctcgcgccgcatccccgtcttccaccgccgcctcgcgcctccgctcgacggctccacttcccgccccctcgcgccggtccgtccccgccttcgctttcgcgaccgcgaggccaaaatgggaaggatggttgatgaggagatcagacggaatgattcatatcctgatgcacttaatgcgcacttttgtccttaaatgcaaggattggattctttggaggttgcatcccttggaaactcatcgggcttgcgtccttttccatgcattttgcagagtacttagcgcctcgtgtgtcggcaaacggacagtatatctgctgtaacttacataaataatcatatgttagcctgctgctactcactgccccgcatcgattggaactaagttgatgtttggttcacataattgtataacgttaaatcatgtttgtttaagtctaaccttaatcggattccacactaaaaactgatattggcctattcaaatttattactgctgttatttatgttatattttgttttattttgcgaaccaaacggcactgtacaaattgttcctttgtacgagctcatgaaagaggaagatttttgtcctgcccgtatttgtattgtggttggttgatg

SEQ ID NO: 52762 - DNA, 818 bp, Zea Mays
ttttttttctaaaattctaagccgcaaaaatccggctccacaatcccgctgttcgcgagccactccctctcacgagtgacgacgaaaccctaggccatggcttggcgcggcgccgcctcccgctccattatcgccgccgtccgtgctcgcgccgcatccccgtcttccaccgccgcctcgcgcctccgctcgacggctccacttcccgccccctcgcgccggtccgtccccgccttcgctttcgcgaccgcgaggccaaaatgggaaggatggttgatgaggagatcagacggaatgattcatatcctgatgaaatgacgacgatgcatgatgcttgggaagcaattttaaagcatggaaaaggcacttaatgcgcacttttgtccttaaatgcaaggattggattctttggaggttgcatcccttggaaactcatcgggcttgcgtccttttccatgcattttgcagagtacttagcgcctcgtgtgtcggcaaacggacagtatatctgctgtaacttacataaataatcatatgttagcctgctgctactcactgccccgcatcgattggaactaagttgatgtttggttcacataattgtataacgttaaatcatgtttgtttaagtctaaccttaatcggattccacactaaaaactgatattggcctattcaaatttattactgctgttatttatgttatattttgttttattttgcgaaccaaacggcactgtacaaattgttcctttgtacgagctcatgaaagaggaagatttttgtcctgcccgtatttgtattgtggttggttgatg

SEQ ID NO: 52763 - DNA, 986 bp, Zea Mays
cccaaacataccaaagtaggagtgctcatcatattacatattcacatccatatccatgcttacacacagcacgcacatcattatttgttctaccacgaagctagcgacgacatggcgtgctctgaatctgaagacgacatggcaatggcatggatcctagcagtagcagtagttaggcgaggacgaggctcttcttgaaatgcgcgatctgaatgttctccacgttgagcttcttgaagttgctgttcttcctggtgctgaagaagtcgccccagttgtaggcgtcgtacctgggcggatcgtccttgctcaccagctcctccaccggctccaccatggtgtaggtcgccgggttgaagaagtagggcatggagaacctctccctcgccgagttcaccgacacccggtgctccgcgctctcgtacctgtcgttgctccacaccttacgccacacgaagcgatctgagaagcctatacacatgcagtgcatgcaacctacgttcagctcagttcatcaggtgggcacgtacctggatgaggtcgccgacgttgatgatgaacgagtcgggcacgggcctgacgcggacccactcgccgtcggagcgccgccggacgtcgagccccccgacgtcgtcctggtacaggatggtcagggcgccggcgtccttgtgccgccccacgccgagggccaggtcggggctcgggcaaggagggtagtggttcagccggatgaaggtcgtctggtccttgaagaagccgtgcagccggtcgggcctcagcttcaggctccgggcgatcagctccagcagcttgaacgccagctcttccatcgctttcgcgtactcctccagcgcctctctgcggaaacttacgtgtggagttcgaagacggtgattgacgagaaatgtgaaggtcgtgtggattcgtgtcgatggactgagagtggtgaagggcgaacgcttgggacttgactgagggactggaga

SEQ ID NO: 52764 - DNA, 1523 bp, Zea Mays
agtggttccgttgtgcacgccgcgccaccgtcgagtgggtcttcgaggtgaccgacggatcggttcagcacagcacagacgcaggcttacttcggcttctcccaccgcacggcgtacctggccgtctcctacatggaccgcttctgcctccaccggtgcatggacaggtcagtgatgccctgggcggcgcggctgctggcggtggcgtgcgtgtccctggcggcgaagatggaggagtaccgcgcgccggcgctgccggagttccgcgccgacgacgagtacgacttcagcagcgtctccatccggcgcatggagctgctggtgctgtccacgctggggtggcgcatgggcgacgtcacgccgctggactaccttccctgcctctcctccagcaggctacgccggggcggcgatggcggcctcgtcgccgccaaggccgccgcgcttatcttctccaccgcggaagccgccagcgtgctcgactaccggccgtccaccgttgccgtcgccgccgtcctggcggcagcccacggtgccgtgacaaaggaagcgctggagtccaagatgagcagcctgtctccgtccagcctgctcgacaaggacgacgtgcacgcctgctacagcacgatgatgctgaacgagagctcgtcggcgacgccgagcaagctgttggcggccaagagaccggcgccatcagcctccggctccacaggcgccggcagtccatacgagtccgtcgacgcggactcctcctcgttcgcggccgcggcggacagcaacaagagggcgcggctggtggagctgccggccgtcggccgatgagaagcaccgccggtcaatgtagtcttcgcttcttccagctttgaattttcagttgtttgattggtcacgcgccgcgccgcgcgcactgccggagaaacggtgaccggcaatgcggcggtgttgtggagacggcgagcttcggtttggttccttgtgaggttcgatggcgagagaggacgaaaggagagctcgatcgagaaaatagcgagtgcgactgtgcccacacgatcacgactcagcagacaatgtatagcgcaaggcggtgagcagtgagctccagcgccacccgcccacccgtccacgcacccgggatgggaagcctgaagccgccgcgcaggcgcatcagcagtagacgggtcagcgccggccattctccatggtgctgctgctggttggcggtagctgcagcgtcgcaagcgagcgccatggccgcccatggccatggcccatgcctgccgaaagtggatgtgtacatgcatgccctgtgcgtgaggatggtgaccgaggggtggtttcgtggcagagctgtaccgcgctttagtcacgtgattcgcttgctcttgctgctgggttgcttgctactagctaggactacttgctattgcaccagcactgcctcttgatctgtacactagcaagttgtaagtgtaaccctacatctacatgcatggccctgagaattgaaatgcattgggtagtgg

SEQ ID NO: 52765 - DNA, 1492 bp, Zea Mays
agtggttccgttgtgcacgccgcgccaccgtcgagtgggtcttcgagacgcaggcttacttcggcttctcccaccgcacggcgtacctggccgtctcctacatggaccgcttctgcctccaccggtgcatggacaggtcagtgatgccctgggcggcgcggctgctggcggtggcgtgcgtgtccctggcggcgaagatggaggagtaccgcgcgccggcgctgccggagttccgcgccgacgacgagtacgacttcagcagcgtctccatccggcgcatggagctgctggtgctgtccacgctggggtggcgcatgggcgacgtcacgccgctggactaccttccctgcctctcctccagcaggctacgccggggcggcgatggcggcctcgtcgccgccaaggccgccgcgcttatcttctccaccgcggaagccgccagcgtgctcgactaccggccgtccaccgttgccgtcgccgccgtcctggcggcagcccacggtgccgtgacaaaggaagcgctggagtccaagatgagcagcctgtctccgtccagcctgctcgacaaggacgacgtgcacgcctgctacagcacgatgatgctgaacgagagctcgtcggcgacgccgagcaagctgttggcggccaagagaccggcgccatcagcctccggctccacaggcgccggcagtccatacgagtccgtcgacgcggactcctcctcgttcgcggccgcggcggacagcaacaagagggcgcggctggtggagctgccggccgtcggccgatgagaagcaccgccggtcaatgtagtcttcgcttcttccagctttgaattttcagttgtttgattggtcacgcgccgcgccgcgcgcactgccggagaaacggtgaccggcaatgcggcggtgttgtggagacggcgagcttcggtttggttccttgtgaggttcgatggcgagagaggacgaaaggagagctcgatcgagaaaatagcgagtgcgactgtgcccacacgatcacgactcagcagacaatgtatagcgcaaggcggtgagcagtgagctccagcgccacccgcccacccgtccacgcacccgggatgggaagcctgaagccgccgcgcaggcgcatcagcagtagacgggtcagcgccggccattctccatggtgctgctgctggttggcggtagctgcagcgtcgcaagcgagcgccatggccgcccatggccatggcccatgcctgccgaaagtggatgtgtacatgcatgccctgtgcgtgaggatggtgaccgaggggtggtttcgtggcagagctgtaccgcgctttagtcacgtgattcgcttgctcttgctgctgggttgcttgctactagctaggactacttgctattgcaccagcactgcctcttgatctgtacactagcaagttgtaagtgtaaccctacatctacatgcatggccctgagaattgaaatgcattgggtagtgg

SEQ ID NO: 52766 - DNA, 2360 bp, Zea Mays
gtcgcgttctccagtttagcgcgcgcgcgcgccgccgccggctccgtctctccgccccgagctccgcgtgtaatctcagacccagcctaagcaaaccaccagagtcagtaccccgccagcacccgagcccctgttctggtgattggtgaagaccttgtcgcagaccgcaacgatgtcggccgcggcagggacgccaccggaagacggaggggatcggccgtggcagtcttaccataccgcatacaccaacgccaaagctggaatggagggtgttgacaaagagaaggtgcagaaggtaatctacgaaatgagcaagggctcaaaatatttcgaaaatgagcagaggaaggaggcagccaccaaacaaaagattgaacatctccgtgcacaatgtgcagtattgactgataatgacatatcacattttcagaaggttgcagataagaaaatgttagagttggaagcttcacgagatctttcaaagatatggcttcacactgacatggatgccttttatgctgctgttgagacattggagaacccatccttgaagggaaaacccttggcggttggtagcatgtctatgatagctactgccagttatgaggcacgcaagtttggagtgcgtgcagcgatgcctggttttattggatgcaaactatgtcctgacttggtttttgtcccaccaaactttgagagatatactcattatagcgagctgacaagaaaagttttccagaggtatgatcccaacttcattgcaacaagtctagatgaagcatacctcaacataaccaatgtttgcattgagagaggcattacaggcgaggaggttgctattgaacttaggtctgccattcaccaggaaactggtctaacatgtagtgctggggttgctccaaaccgtatgattgcgaaggtttgctctgatattaacaagcccaatgggcagtttattttgccaaatgactgggaagctgtattgacatttgtatctacattgcctataagaaagataggtggcataggtaaggtaacagaacagatgttacatcaggttcttggaatcagtacatgtcaggagatgctgcaaaaggctgcttttttatgtgctcttttttcggaaagctcagctgatttctttctgtcggttggtctcgggttaggaggtacagaaaccccagaacaaaggcaaaggaaaagtatcagttgcgagcgaactttcacagcaacaaatgattcttctttgcttttcaaaaaattagctagccttgcagaaaatttatctgatgatttgcaaaaggagggtttcaagggaaaaacactaacactcaaactgaagactgcagattttgaggttcggacaagggcagtaacaacacggaactacatcgactccaaggaagatattctggtctatgctacaaagttgattaaagctgaaatgcctatttctttgagattgatggggttgcggatgtctcagctacatgatgagaaggacgatccatctacttcaacacaaaagacactagatatattctttcgttcatcaaacagtaactcaaatggcaatggaaccactgttcagagaatcactaattccccagggcaggataatgattctattagtctcacaaccaaggaagagtacttggcacctgatgctggaacaagtgtttccacaggccaacaggatttcttcctacatgatgagatctgttttattcccgaacaacaacggagtttagacaacgatactaaagaggctgtcctaagcgacccgttaggtggaacaaagtcagatgatgtgtcttccagtgcaaaggttacgcccactaagaagttggatgaacctgatcccttgatcagcccgaaggctgtgtcttcatcaagtaaacctgaccagcagtcatggattgatggctacatttgttccatctgtggatttgaactgcctccgggcttcgaggaggagaggctggaacattcagattttcacctggctgaaacactccagcaggaagaagcagtggacggcacaagacacatctcaaacgagagctgggtggctgaaagaccacgctctactgcacccacgcccaagaagaaactcaagtcttctaaagaaggaaagcatattcctattgactctttcttcacaaagtgtaataagagcccgtaaccgtaaggaaggcagcagaaggctgctggagaccgtctacggatacagaagcagtagagtaattgcatgcaaacagaagcagcagctccaacaccaaagctgttgatccgtggtttcttgagaggagcaggagctgcacaccattggacctgccggctgaccgatacaaatttcc

SEQ ID NO: 52767 - DNA, 2095 bp, Zea Mays
ctccagtttagcgcgcgcgcgcgccgccgccggctccgtctctccgccccgagctccgcgtgtaatctcagacccagcctaagcaaaccaccagagtcagtaccccgccagcacccgagcccctgttctggtgattggtgaagaccttgtcgcagaccgcaacgatgtcggccgcggcagggacgccaccggaagacggaggggatcggccgtggcagtcttaccataccgcatacaccaacgccaaagctggaatggagggtgttgacaaagagaaggtgcagaaggtaatctacgaaatgagcaagggctcaaaatatttcgaaaatgagcagaggaaggaggcagccaccaaacaaaagattgaacatctccgtgcacaatgtgcagtattgactgataatgacatatcacattttcagaaggttgcagataagaaaatgttagagttggaagcttcacgagatctttcaaagatatggcttcacactgacatggatgccttttatgctgctgttgagacattggagaacccatccttgaagggaaaacccttggcggttggtagcatgtctatgatagctactgccagttatgaggtttgctctgatattaacaagcccaatgggcagtttattttgccaaatgactgggaagctgtattgacatttgtatctacattgcctataagaaagatctttgtatgcagataggtggcataggtaaggtaacagaacagatgttacatcaggttcttggaatcagtacatgtcaggagatgctgcaaaaggctgcttttttatgtgctcttttttcggaaagctcagctgatttctttctgtcggttggtctcgggttaggaggtacagaaaccccagaacaaaggcaaaggaaaagtatcagttgcgagcgaactttcacagcaacaaatgattcttctttgcttttcaaaaaattagctagccttgcagaaaatttatctgatgatttgcaaaaggagggtttcaagggaaaaacactaacactcaaactgaagactgcagattttgaggttcggacaagggcagtaacaacacggaactacatcgactccaaggaagatattctggtctatgctacaaagttgattaaagctgaaatgcctatttctttgagattgatggggttgcggatgtctcagctacatgatgagaaggacgatccatctacttcaacacaaaagacactagatatattctttcgttcatcaaacagtaactcaaatggcaatggaaccactgttcagagaatcactaattccccagggcaggataatgattctattagtctcacaaccaaggaagagtacttggcacctgatgctggaacaagtgtttccacaggccaacaggatttcttcctacatgatgagatctgttttattcccgaacaacaacggagtttagacaacgatactaaagaggctgtcctaagcgacccgttaggtggaacaaagtcagatgatgtgtcttccagtgcaaaggttacgcccactaagaagttggatgaacctgatcccttgatcagcccgaaggctgtgtcttcatcaagtaaacctgaccagcagtcatggattgatggctacatttgttccatctgtggatttgaactgcctccgggcttcgaggaggagaggctggaacattcagattttcacctggctgaaacactccagcaggaagaagcagtggacggcacaagacacatctcaaacgagagctgggtggctgaaagaccacgctctactgcacccacgcccaagaagaaactcaagtcttctaaagaaggaaagcatattcctattgactctttcttcacaaagtgtaataagagcccgtaaccgtaaggtaggacttgccggcaactctgtaactatgggcatgctagccaagtgttgtacgtgttaactttattcttgatgagagcaatatatgtaaatatcaccctcaactctcactaatagccaagtgttgttacagagttccacggtgtttccacatacgcaggccttcatgacaaaaaaaaaaaatggagagtgttttttttttctttctaa

SEQ ID NO: 52768 - DNA, 2360 bp, Zea Mays
ctccagtttagcgcgcgcgcgcgccgccgccggctccgtctctccgccccgagctccgcgtgtaatctcagacccagcctaagcaaaccaccagagtcagtaccccgccagcacccgagcccctgttctggtgattggtgaagaccttgtcgcagaccgcaacgatgtcggccgcggcagggacgccaccggaagacggaggggatcggccgtggcagtcttaccataccgcatacaccaacgccaaagctggaatggagggtgttgacaaagagaaggtgcagaaggtaatctacgaaatgagcaagggctcaaaatatttcgaaaatgagcagaggaaggaggcagccaccaaacaaaagattgaacatctccgtgcacaatgtgcagtattgactgataatgacatatcacattttcagaaggttgcagataagaaaatgttagagttggaagcttcacgagatctttcaaagatatggcttcacactgacatggatgccttttatgctgctgttgagacattggagaacccatccttgaagggaaaacccttggcggttggtagcatgtctatgatagctactgccagttatgaggcacgcaagtttggagtgcgtgcagcgatgcctggttttattggatgcaaactatgtcctgacttggtttttgtcccaccaaactttgagagatatactcattatagcgagctgacaagaaaagttttccagaggtatgatcccaacttcattgcaacaagtctagatgaagcatacctcaacataaccaatgtttgcattgagagaggcattacaggcgaggaggaaactggtctaacatgtagtgctggggttgctccaaaccgtatgattgcgaaggtttgctctgatattaacaagcccaatgggcagtttattttgccaaatgactgggaagctgtattgacatttgtatctacattgcctataagaaagataggtggcataggtaaggtaacagaacagatgttacatcaggttcttggaatcagtacatgtcaggagatgctgcaaaaggctgcttttttatgtgctcttttttcggaaagctcagctgatttctttctgtcggttggtctcgggttaggaggtacagaaaccccagaacaaaggcaaaggaaaagtatcagttgcgagcgaactttcacagcaacaaatgattcttctttgcttttcaaaaaattagctagccttgcagaaaatttatctgatgatttgcaaaaggagggtttcaagggaaaaacactaacactcaaactgaagactgcagattttgaggttcggacaagggcagtaacaacacggaactacatcgactccaaggaagatattctggtctatgctacaaagttgattaaagctgaaatgcctatttctttgagattgatggggttgcggatgtctcagctacatgatgagaaggacgatccatctacttcaacacaaaagacactagatatattctttcgttcatcaaacagtaactcaaatggcaatggaaccactgttcagagaatcactaattccccagggcaggataatgattctattagtctcacaaccaaggaagagtacttggcacctgatgctggaacaagtgtttccacaggccaacaggatttcttcctacatgatgagatctgttttattcccgaacaacaacggagtttagacaacgatactaaagaggctgtcctaagcgacccgttaggtggaacaaagtcagatgatgtgtcttccagtgcaaaggttacgcccactaagaagttggatgaacctgatcccttgatcagcccgaaggctgtgtcttcatcaagtaaacctgaccagcagtcatggattgatggctacatttgttccatctgtggatttgaactgcctccgggcttcgaggaggagaggctggaacattcagattttcacctggctgaaacactccagcaggaagaagcagtggacggcacaagacacatctcaaacgagagctgggtggctgaaagaccacgctctactgcacccacgcccaagaagaaactcaagtcttctaaagaaggaaagcatattcctattgactctttcttcacaaagtgtaataagagcccgtaaccgtaaggtaggacttgccggcaactctgtaactatgggcatgctagccaagtgttgtacgtgttaactttattcttgatgagagcaatatatgtaaatatcaccctcaactctcactaatagccaagtgttgttacagagttccacggtgtttccacatacgcaggccttcatgacaaaaaaaaaaaatggagagtgttttttttttctttctaa

SEQ ID NO: 52769 - DNA, 2385 bp, Zea Mays
ctccagtttagcgcgcgcgcgcgccgccgccggctccgtctctccgccccgagctccgcgtgtaatctcagacccagcctaagcaaaccaccagagtcagtaccccgccagcacccgagcccctgttctggtgattggtgaagaccttgtcgcagaccgcaacgatgtcggccgcggcagggacgccaccggaagacggaggggatcggccgtggcagtcttaccataccgcatacaccaacgccaaagctggaatggagggtgttgacaaagagaaggtgcagaaggtaatctacgaaatgagcaagggctcaaaatatttcgaaaatgagcagaggaaggaggcagccaccaaacaaaagattgaacatctccgtgcacaatgtgcagtattgactgataatgacatatcacattttcagaaggttgcagataagaaaatgttagagttggaagcttcacgagatctttcaaagatatggcttcacactgacatggatgccttttatgctgctgttgagacattggagaacccatccttgaagggaaaacccttggcggttggtagcatgtctatgatagctactgccagttatgaggcacgcaagtttggagtgcgtgcagcgatgcctggttttattggatgcaaactatgtcctgacttggtttttgtcccaccaaactttgagagatatactcattatagcgagctgacaagaaaagaggtatgatcccaacttcattgcaacaagtctagatgaagcatacctcaacataaccaatgtttgcattgagagaggcattacaggcgaggaggttgctattgaacttaggtctgccattcaccaggaaactggtctaacatgtagtgctggggttgctccaaaccgtatgattgcgaaggtttgctctgatattaacaagcccaatgggcagtttattttgccaaatgactgggaagctgtattgacatttgtatctacattgcctataagaaagataggtggcataggtaaggtaacagaacagatgttacatcaggttcttggaatcagtacatgtcaggagatgctgcaaaaggctgcttttttatgtgctcttttttcggaaagctcagctgatttctttctgtcggttggtctcgggttaggaggtacagaaaccccagaacaaaggcaaaggaaaagtatcagttgcgagcgaactttcacagcaacaaatgattcttctttgcttttcaaaaaattagctagccttgcagaaaatttatctgatgatttgcaaaaggagggtttcaagggaaaaacactaacactcaaactgaagactgcagattttgaggttcggacaagggcagtaacaacacggaactacatcgactccaaggaagatattctggtctatgctacaaagttgattaaagctgaaatgcctatttctttgagattgatggggttgcggatgtctcagctacatgatgagaaggacgatccatctacttcaacacaaaagacactagatatattctttcgttcatcaaacagtaactcaaatggcaatggaaccactgttcagagaatcactaattccccagggcaggataatgattctattagtctcacaaccaaggaagagtacttggcacctgatgctggaacaagtgtttccacaggccaacaggatttcttcctacatgatgagatctgttttattcccgaacaacaacggagtttagacaacgatactaaagaggctgtcctaagcgacccgttaggtggaacaaagtcagatgatgtgtcttccagtgcaaaggttacgcccactaagaagttggatgaacctgatcccttgatcagcccgaaggctgtgtcttcatcaagtaaacctgaccagcagtcatggattgatggctacatttgttccatctgtggatttgaactgcctccgggcttcgaggaggagaggctggaacattcagattttcacctggctgaaacactccagcaggaagaagcagtggacggcacaagacacatctcaaacgagagctgggtggctgaaagaccacgctctactgcacccacgcccaagaagaaactcaagtcttctaaagaaggaaagcatattcctattgactctttcttcacaaagtgtaataagagcccgtaaccgtaaggtaggacttgccggcaactctgtaactatgggcatgctagccaagtgttgtacgtgttaactttattcttgatgagagcaatatatgtaaatatcaccctcaactctcactaatagccaagtgttgttacagagttccacggtgtttccacatacgcaggccttcatgacaaaaaaaaaaaatggagagtgttttttttttctttctaa

SEQ ID NO: 52770 - DNA, 2081 bp, Zea Mays
ctccagtttagcgcgcgcgcgcgccgccgccggctccgtctctccgccccgagctccgcgtgtaatctcagacccagcctaagcaaaccaccagagtcagtaccccgccagcacccgagcccctgttctggtgattggtgaagaccttgtcgcagaccgcaacgatgtcggccgcggcagggacgccaccggaagacggaggggatcggccgtggcagtcttaccataccgcatacaccaacgccaaagctggaatggagggtgttgacaaagagaaggtgcagaaggtaatctacgaaatgagcaagggctcaaaatatttcgaaaatgagcagaggaaggaggcagccaccaaacaaaagattgaacatctccgtgcacaatgtgcagtattgactgataatgacatatcacattttcagaaggttgcagataagaaaatgttagagttggaagcttcacgagatctttcaaagatatggcttcacactgacatggatgccttttatgctgctgttgagacattggagaacccatccttgaagggaaaacccttggcggttggtagcatgtctatgatagctactgccagttatgaggtttgctctgatattaacaagcccaatgggcagtttattttgccaaatgactgggaagctgtattgacatttgtatctacattgcctataagaaagataggtggcataggtaaggtaacagaacagatgttacatcaggttcttggaatcagtacatgtcaggagatgctgcaaaaggctgcttttttatgtgctcttttttcggaaagctcagctgatttctttctgtcggttggtctcgggttaggaggtacagaaaccccagaacaaaggcaaaggaaaagtatcagttgcgagcgaactttcacagcaacaaatgattcttctttgcttttcaaaaaattagctagccttgcagaaaatttatctgatgatttgcaaaaggagggtttcaagggaaaaacactaacactcaaactgaagactgcagattttgaggttcggacaagggcagtaacaacacggaactacatcgactccaaggaagatattctggtctatgctacaaagttgattaaagctgaaatgcctatttctttgagattgatggggttgcggatgtctcagctacatgatgagaaggacgatccatctacttcaacacaaaagacactagatatattctttcgttcatcaaacagtaactcaaatggcaatggaaccactgttcagagaatcactaattccccagggcaggataatgattctattagtctcacaaccaaggaagagtacttggcacctgatgctggaacaagtgtttccacaggccaacaggatttcttcctacatgatgagatctgttttattcccgaacaacaacggagtttagacaacgatactaaagaggctgtcctaagcgacccgttaggtggaacaaagtcagatgatgtgtcttccagtgcaaaggttacgcccactaagaagttggatgaacctgatcccttgatcagcccgaaggctgtgtcttcatcaagtaaacctgaccagcagtcatggattgatggctacatttgttccatctgtggatttgaactgcctccgggcttcgaggaggagaggctggaacattcagattttcacctggctgaaacactccagcaggaagaagcagtggacggcacaagacacatctcaaacgagagctgggtggctgaaagaccacgctctactgcacccacgcccaagaagaaactcaagtcttctaaagaaggaaagcatattcctattgactctttcttcacaaagtgtaataagagcccgtaaccgtaaggtaggacttgccggcaactctgtaactatgggcatgctagccaagtgttgtacgtgttaactttattcttgatgagagcaatatatgtaaatatcaccctcaactctcactaatagccaagtgttgttacagagttccacggtgtttccacatacgcaggccttcatgacaaaaaaaaaaaatggagagtgttttttttttctttctaa

SEQ ID NO: 52771 - DNA, 2360 bp, Zea Mays
gtcgcgttctccagtttagcgcgcgcgcgcgccgccgccggctccgtctctccgccccgagctccgcgtgtaatctcagacccagcctaagcaaaccaccagagtcagtaccccgccagcacccgagcccctgttctggtgattggtgaagaccttgtcgcagaccgcaacgatgtcggccgcggcagggacgccaccggaagacggaggggatcggccgtggcagtcttaccataccgcatacaccaacgccaaagctggaatggagggtgttgacaaagagaaggtgcagaaggtaatctacgaaatgagcaagggctcaaaatatttcgaaaatgagcagaggaaggaggcagccaccaaacaaaagattgaacatctccgtgcacaatgtgcagtattgactgataatgacatatcacattttcagaaggttgcagataagaaaatgttagagttggaagcttcacgagatctttcaaagatatggcttcacactgacatggatgccttttatgctgctgttgagacattggagaacccatccttgaagggaaaacccttggcggttggtagcatgtctatgatagctactgccagttatgaggcacgcaagtttggagtgcgtgcagcgatgcctggttttattggatgcaaactatgtcctgacttggtttttgtcccaccaaactttgagagatatactcattatagcgagctgacaagaaaagttttccagaggtatgatcccaacttcattgcaacaagtctagatgaagcatacctcaacataaccaatgtttgcattgagagaggcattacaggcgaggaggttgctattgaacttaggtctgccattcaccaggaaactggtctaacatgtagtgctggggttgctccaaaccgtatgattgcgaaggtttgctctgatattaacaagcccaatgggcagtttattttgccaaatgactgggaagctgtattgacatttgtatctacattgcctataagaaagatctttgtatgcagataggtggcataggtaaggtaacagaacagatgttacatcaggttcttggaatcagtacatgtcaggagatgctgcaaaaggctgcttttttatgtgctcttttttcggaaagctcagctgatttctttctgtcggttggtctcgggttaggaggtacagaaaccccagaacaaaggcaaaggaaaagtatcagttgcgagcgaactttcacagcaacaaatgattcttctttgcttttcaaaaaattagctagccttgcagaaaatttatctgatgatttgcaaaaggagggtttcaagggaaaaacactaacactcaaactgaagactgcagattttgaggttcggacaagggcagtaacaacacggaactacatcgactccaaggaagatattctgggttgcggatgtctcagctacatgatgagaaggacgatccatctacttcaacacaaaagacactagatatattctttcgttcatcaaacagtaactcaaatggcaatggaaccactgttcagagaatcactaattccccagggcaggataatgattctattagtctcacaaccaaggaagagtacttggcacctgatgctggaacaagtgtttccacaggccaacaggatttcttcctacatgatgagatctgttttattcccgaacaacaacggagtttagacaacgatactaaagaggctgtcctaagcgacccgttaggtggaacaaagtcagatgatgtgtcttccagtgcaaaggttacgcccactaagaagttggatgaacctgatcccttgatcagcccgaaggctgtgtcttcatcaagtaaacctgaccagcagtcatggattgatggctacatttgttccatctgtggatttgaactgcctccgggcttcgaggaggagaggctggaacattcagattttcacctggctgaaacactccagcaggaagaagcagtggacggcacaagacacatctcaaacgagagctgggtggctgaaagaccacgctctactgcacccacgcccaagaagaaactcaagtcttctaaagaaggaaagcatattcctattgactctttcttcacaaagtgtaataagagcccgtaaccgtaaggtaggacttgccggcaactctgtaactatgggcatgctagccaagtgttgtacgtgttaactttattcttgatgagagcaatatatgtaaatatcaccctcaactctcactaatagccaagtgttgttacagagttccacggtgtttccacatacgcaggccttcatgacaaaaaaaaaaaatggagagtgttttttttttctttctaa

SEQ ID NO: 52772 - DNA, 2389 bp, Zea Mays
gtcgcgttctccagtttagcgcgcgcgcgcgccgccgccggctccgtctctccgccccgagctccgcgtgtaatctcagacccagcctaagcaaaccaccagagtcagtaccccgccagcacccgagcccctgttctggtgattggtgaagaccttgtcgcagaccgcaacgatgtcggccgcggcagggacgccaccggaagacggaggggatcggccgtggcagtcttaccataccgcatacaccaacgccaaagctggaatggagggtgttgacaaagagaaggtgcagaaggtaatctacgaaatgagcaagggctcaaaatatttcgaaaatgagcagaggaaggaggcagccaccaaacaaaagattgaacatctccgtgcacaatgtgcagtattgactgataatgacatatcacattttcagaaggttgcagataagaaaatgttagagttggaagcttcacgagatctttcaaagatatggcttcacactgacatggatgccttttatgctgctgttgagacattggagaacccatccttgaagggaaaacccttggcggttggtagcatgtctatgatagctactgccagttatgaggcacgcaagtttggagtgcgtgcagcgatgcctggttttattggatgcaaactatgtcctgacttggtttttgtcccaccaaactttgagagatatactcattatagcgagctgacaagaaaagttttccagaggtatgatcccaacttcattgcaacaagtctagatgaagcatacctcaacataaccaatgtttgcattgagagaggcattacaggcgaggaggttgctattgaacttaggtctgccattcaccaggaaactggtctaacatgtagtgctggggttgctccaaaccgtatgattgcgaaggtttgctctgatattaacaagcccaatgggcagtttattttgccaaatgactgggaagctgtattgacatttgtatctacattgcctataagaaagataggtggcataggtaaggtaacagaacagatgttacatcaggttcttggaatcagtacatgtcaggagatgctgcaaaaggctgcttttttatgtgctcttttttcggaaagctcagctgatttctttctgtcggttggtctcgggttaggaggtacagaaaccccagaacaaaggcaaaggaaaagtatcagttgcgagcgaactttcacagcaacaaatgattcttctttgcttttcaaaaaattagaaaatttatctgatgatttgcaaaaggagggtttcaagggaaaaacactaacactcaaactgaagactgcagattttgaggttcggacaagggcagtaacaacacggaactacatcgactccaaggaagatattctggtctatgctacaaagttgattaaagctgaaatgcctatttctttgagattgatggggttgcggatgtctcagctacatgatgagaaggacgatccatctacttcaacacaaaagacactagatatattctttcgttcatcaaacagtaactcaaatggcaatggaaccactgttcagagaatcactaattccccagggcaggataatgattctattagtctcacaaccaaggaagagtacttggcacctgatgctggaacaagtgtttccacaggccaacaggatttcttcctacatgatgagatctgttttattcccgaacaacaacggagtttagacaacgatactaaagaggctgtcctaagcgacccgttaggtggaacaaagtcagatgatgtgtcttccagtgcaaaggttacgcccactaagaagttggatgaacctgatcccttgatcagcccgaaggctgtgtcttcatcaagtaaacctgaccagcagtcatggattgatggctacatttgttccatctgtggatttgaactgcctccgggcttcgaggaggagaggctggaacattcagattttcacctggctgaaacactccagcaggaagaagcagtggacggcacaagacacatctcaaacgagagctgggtggctgaaagaccacgctctactgcacccacgcccaagaagaaactcaagtcttctaaagaaggaaagcatattcctattgactctttcttcacaaagtgtaataagagcccgtaaccgtaaggtaggacttgccggcaactctgtaactatgggcatgctagccaagtgttgtacgtgttaactttattcttgatgagagcaatatatgtaaatatcaccctcaactctcactaatagccaagtgttgttacagagttccacggtgtttccacatacgcaggccttcatgacaaaaaaaaaaaatggagagtgttttttttttctttctaa

SEQ ID NO: 52773 - DNA, 2415 bp, Zea Mays
gtcgcgttctccagtttagcgcgcgcgcgcgccgccgccggctccgtctctccgccccgagctccgcgtgtaatctcagacccagcctaagcaaaccaccagagtcagtaccccgccagcacccgagcccctgttctggtgattggtgaagaccttgtcgcagaccgcaacgatgtcggccgcggcagggacgccaccggaagacggaggggatcggccgtggcagtcttaccataccgcatacaccaacgccaaagctggaatggagggtgttgacaaagagaaggtgcagaaggtaatctacgaaatgagcaagggctcaaaatatttcgaaaatgagcagaggaaggaggcagccaccaaacaaaagattgaacatctccgtgcacaatgtgcagtattgactgataatgacatatcacattttcagaaggttgcagataagaaaatgttagagttggaagcttcacgagatctttcaaagatatggcttcacactgacatggatgccttttatgctgctgttgagacattggagaacccatccttgaagggaaaacccttggcggttggtagcatgtctatgatagctactgccagttatgaggcacgcaagtttggagtgcgtgcagcgatgcctggttttattggatgcaaactatgtcctgacttggtttttgtcccaccaaactttgagagatatactcattatagcgagctgacaagaaaagttttccagaggtatgatcccaacttcattgcaacaagtctagatgaagcatacctcaacataaccaatgtttgcattgagagaggcattacaggcgaggaggttgctattgaacttaggtctgccattcaccaggaaactggtctaacatgtagtgctggggttgctccaaaccgtatgattgcgaaggtttgctctgatattaacaagcccaatgggcagtttattttgccaaatgactgggaagctgtattgacatttgtatctacattgcctataagaaagatctttgtatgcagataggtggcataggtaaggtaacagaacagatgttacatcaggttcttggaatcagtacatgtcaggagatgctgcaaaaggctgcttttttatgtgctcttttttcggaaagctcagctgatttctttctgtcggttggtctcgggttaggaggtacagaaaccccagaacaaaggcaaaggaaaagtatcagttgcgagcgaactttcacagcaacaaatgattcttctttgcttttcaaaaaattagctagccttgcagaaaatttatctgatgatttgcaaaaggagggtttcaagggaaaaacactaacactcaaactgaagactgcagattttgaggttcggacaagggcagtaacaacacggaactacatcgactccaaggaagatattctggtctatgctacaaagttgattaaagctgaaatgcctatttctttgagattgatggggttgcggatgtctcagctacatgatgagaaggacgatccatctacttcaacacaaaagacactagatatattctttcgttcatcaaacagtaactcaaatggcaatggaaccactgttcagagaatcactaattccccagggcaggataatgattctattagtctcacaaccaaggaagagtacttggcacctgatgctggaacaagtgtttccacaggccaacaggatttcttcctacatgatgagatctgttttattcccgaacaacaacggagtttagacaacgatactaaagaggctgtcctaagcgacccgttaggtggaacaaagtcagatgatgtgtcttccagtgcaaaggttacgcccactaagaagttggatgaacctgatcccttgatcagcccgaaggctgtgtcttcatcaagtaaacctgaccagcagtcatggattgatggctacatttgttccatctgtggatttgaactgcctccgggcttcgaggaggagaggctggaacattcagattttcacctggctgaaacactccagcaggaagaagcagtggacggcacaagacacatctcaaacgagagctgggtggctgaaagaccacgctctactgcacccacgcccaagaagaaactcaagtcttctaaagaaggaaagcatattcctattgactctttcttcacaaagtgtaataagagcccgtaaccgtaaggtaggacttgccggcaactctgtaactatgggcatgctagccaagtgttgtacgtgttaactttattcttgatgagagcaatatatgtaaatatcaccctcaactctcactaatagccaagtgttgttacagagttccacggtgtttccacatacgcaggccttcatgacaaaaaaaaaaaatggagagtgttttttttttctttctaa

SEQ ID NO: 52774 - DNA, 2359 bp, Zea Mays
gtcgcgttctccagtttagcgcgcgcgcgcgccgccgccggctccgtctctccgccccgagctccgcgtgtaatctcagacccagcctaagcaaaccaccagagtcagtaccccgccagcacccgagcccctgttctggtgattggtgaagaccttgtcgcagaccgcaacgatgtcggccgcggcagggacgccaccggaagacggaggggatcggccgtggcagtcttaccataccgcatacaccaacgccaaagctggaatggagggtgttgacaaagagaaggtgcagaaggtaatctacgaaatgagcaagggctcaaaatatttcgaaaatgagcagaggaaggaggcagccaccaaacaaaagattgaacatctccgtgcacaatgtgcagtattgactgataatgacatatcacattttcagaaggttgcagataagaaaatgttagagttggaagcttcacgagatctttcaaagatatggcttcacactgacatggatgccttttatgctgctgttgagacattggagaacccatccttgaagggaaaacccttggcggttggtagcatgtctatgatagctactgccagttatgaggcacgcaagtttggagtgcgtgcagcgatgcctggttttattggatgcaaactatgtcctgacttggtttttgtcccaccaaactttgagagatatactcattatagcgagctgacaagaaaagttttccagaggtatgatcccaacttcattgcaacaagtctagatgaagcatacctcaacataaccaatgtttgcattgagagaggcattacaggcgaggaggttgctattgaacttaggtctgccattcaccaggaaactggtctaacatgtagtgctggggttgctccaaaccgtatgattgcgaaggtttgctctgatattaacaagcccaatgggcagtttattttgccaaatgactgggaagctgtattgacatttgtatctacattgcctataagaaaggttcttggaatcagtacatgtcaggagatgctgcaaaaggctgcttttttatgtgctcttttttcggaaagctcagctgatttctttctgtcggttggtctcgggttaggaggtacagaaaccccagaacaaaggcaaaggaaaagtatcagttgcgagcgaactttcacagcaacaaatgattcttctttgcttttcaaaaaattagctagccttgcagaaaatttatctgatgatttgcaaaaggagggtttcaagggaaaaacactaacactcaaactgaagactgcagattttgaggttcggacaagggcagtaacaacacggaactacatcgactccaaggaagatattctggtctatgctacaaagttgattaaagctgaaatgcctatttctttgagattgatggggttgcggatgtctcagctacatgatgagaaggacgatccatctacttcaacacaaaagacactagatatattctttcgttcatcaaacagtaactcaaatggcaatggaaccactgttcagagaatcactaattccccagggcaggataatgattctattagtctcacaaccaaggaagagtacttggcacctgatgctggaacaagtgtttccacaggccaacaggatttcttcctacatgatgagatctgttttattcccgaacaacaacggagtttagacaacgatactaaagaggctgtcctaagcgacccgttaggtggaacaaagtcagatgatgtgtcttccagtgcaaaggttacgcccactaagaagttggatgaacctgatcccttgatcagcccgaaggctgtgtcttcatcaagtaaacctgaccagcagtcatggattgatggctacatttgttccatctgtggatttgaactgcctccgggcttcgaggaggagaggctggaacattcagattttcacctggctgaaacactccagcaggaagaagcagtggacggcacaagacacatctcaaacgagagctgggtggctgaaagaccacgctctactgcacccacgcccaagaagaaactcaagtcttctaaagaaggaaagcatattcctattgactctttcttcacaaagtgtaataagagcccgtaaccgtaaggtaggacttgccggcaactctgtaactatgggcatgctagccaagtgttgtacgtgttaactttattcttgatgagagcaatatatgtaaatatcaccctcaactctcactaatagccaagtgttgttacagagttccacggtgtttccacatacgcaggccttcatgacaaaaaaaaaaaatggagagtgttttttttttctttctaa

SEQ ID NO: 52775 - DNA, 2197 bp, Zea Mays
cttctccacgattacgaacgaccccaactccctctggagtgctctggaccgccctccccaaccaacggacgacgcctccatccagaattattccagatcacgcctctctctctctctctctctctctctctctctctctctctctctccgcgtcgtcctcggtctcctcgctcgccgaccctgccccctactgaactgccgcgcgcgcgtcgtggagtagagatccctccgtccggccatgaagtgatcccgtggccttcttcatcgtctcttcattgatttcatcagcactgcgtgcatacaaggaggagaggagtccggccgctggcagcgaagatgtcgtcctctaactctccatgcgccgcgtgtaagctgctgcggcgcaagtgcacccagggatgcgtcttcgcgccctacttcccgccagacaacccagcgaagtttgctagtgtgcaccgtatctttggtgccagcaacgtctccaagctgctcaacgatcttccggcggtgcagcgggaggacgccgtcaactctctcgcatacgaggcggaggcgcgcatccgcgaccctgtctacggctgcgtctcccacatctccgtcctacaggtcaggatcaggcaggtgcgcgacgagctcgtcgccgcgcgcaaggaactggccgcctacattgggcccgccgcctttacgcctttcgtcgcgacgccgcagcagtaccaccaccagtatgccgcaggcgctggcggcggcgtgcctctcgcgacgggcatgggtctcgcagtcggcgtcgggccgcagccgcaccagcagcacggtcacccgcaccagcagcagatgatggcgcacgggcagcacctccaccaccagcaccatctgatggctgctgctgaggcgcagcagcagctcgctctggccgcgcaggtcgcgcgcgagcaggatgtcatgatgaggcaggcggtggtctacgcgcacgccgtgcccgggagcggcgccacggtggccgttgggccgcccgacgcggtgccgtacgagggcggcttcctcttccagcagcagcaccaccagcaaccgccgtcgcaggcgcagacgaccgtggcgctcacgtaccagatggagcagtccccgccgccgtcgtccccgggccagtctcactctcaccccgaggtgtcgcagcagaagaacacggatggcagcgacgagggcagcggtggcggcggtctcgttccgccgccggcctgatctgatgagtccgatggccgcgcctgcctctgattcgtgcttccttcggccttttcctttcttgtttggtgttcgttcgcccttgttcgttatgaattcttttcccctcgtcgatctccatcatgttcatatggcgtcgcgtcgcggcatcgtcgatctctcggatccatgcacgcctcccgaaggcaggctatagctggattattatatcaaggttcctcatgatcagttgccttccttgctcaagagttagggccaaaataaatgcaagacagaaggagtggtatgaaatggggccgggacagaggtgctcatcatatatatggatcagcgtaacacagagaaatcaatggtgggaaggtgagagaggcagacagacacagcagagagaagcatgcatggtgtgctgcagctgcagcgcaggacgacgacgacgacggcagcagctagcagcgagtggtgatgtgagatagagaaacaaaatgcatgcagcaaatagctttcttcgcttttttttttttgcaggcggatcggagggggagcggcaggcatgaattgatgaaggaattaacacaccaatgcaacttggaggagcgctcagctaaacatgtatcttcgttcacttgtgcatttatttggtgtcgttgaacatgtggatcttctttctttcttcacccctctcgttagtattcttcgcctttaatttcactcctttttccgtttccctttcacaatttctttctgccgtgagtacgtcttcagagagagagaaacggttctgcccgtattgcttgcattgtgtctataaataaatagaagtatttatttggacatgaatggatggagggcaaggagctacctattcatcattttagtttatattgtgttactatcgattttgtttgaattatcattcatgcctatgatagagagggccatcaggctcacttcacaattctat

SEQ ID NO: 52776 - DNA, 1452 bp, Zea Mays
cgagcccgccccagccgccattctcgcttcggggcgccgcgtccgcgtcgattcagtttccctcgagtttcagaaaccccgcccgccaatagccctcgcgtctgtagatctcgcgtcctcgatggaaagttcgcctccacgccattcatggcgccttcctcggtccccttccccatgaccatatcacgccattgtggaatcatggtatttgtcatcttcgtggaagttgaataaccgcatataatttctaggagcacccgggccactgccagtccgccatgcccaagccaccggccggcttcgtgctgaatgaatggggcaggtgcatcgccgctgcattcaagtgcatcttcatcatcgtgcggagttggcctgccgccggccaccaataccatcgcctcggtccacccaccagttgcaacgctggtcctgtgctctcaccatttgatagggagttcagtacaaagaagatatcaattatgaagaggattgctctaagtgctctcatcaaaatatatggttgctttttgtttcacctggcatcggacttcgataacatgcgtcctcacctgatcattgttggcgcactgaagatgatcaacatcattgcgcctagctggagagtcatccctgcaacaaacatgatcgacaaaatccgcaaagaccctcagctcaagaaaaagatctgtttcaatccgtacatgtacagaggaaacctcgcactgcaaataggctgcaaactcctttccgtcagcctagacatcaagaagagcctgcacgaggtgagatcttcgccatctgttaggccaccacatgcaacattggtagcatgaacgttcccgttggatcgtcgaccatgggacttctacagtaacatcggcacggacgacgtcgtcactgatcgttccgggagcaagctgctgcacaacctgaagaagatttgtctttttaagatgaaggttctgaagaacgtgatccaggtcgaggagatttctaaggtcttggaaatcagcggcgagcgcagcctcatcgataacttcgtcttctcctaccacgtgctaatgtgacacttttgcaacaatatcaatgccggacaacatgcatgctccttgggaggaattaaggggaagatgaagaactaaaaaaattaccagaatctaatttacgcacgccaagtcagaccaccgtgaaaaactctatctccacgtgaccaatcttctccatttttcagtttgcaagatactttttatattgattaaagttcaataccaataacactaatgtgagctcactgtggtgttcatctttttgcataaattttatgaaaagaaaacagaactctttctattttgccttctctgctatagtaaagatgtaccatttcatgtttattcgtcctctttttggttccttacggtcaattaaggattatacttttgagatgagttttct

SEQ ID NO: 52777 - DNA, 1405 bp, Zea Mays
gcaagcgccctctcccccgcagcaatcttgccgcgccctcgctccacgacaatcttggcaatgtccctcgctccgcgccaatctcgctcgctccgcggcgcccccatgctcgccctcccccacggcccccacggcaatctgcctcccccataagggcaccatcccgagcccgccccagccgccattctcgcttcggggcgccgcgtccgcgtcgattcagtttccctcgagtttcagaaaccccgcccgccaatagccctcgcgtctgtagatctcgcgtcctcgatggaaagagcacccgggccactgccagtccgccatgcccaagccaccggccggcttcgtgctgaatgaatggggcaggtgcatcgccgctgcattcaagtgcatcttcatcatcgtgcggagttggcctgccgccggccaccaataccatcgcctcggtccacccaccagttgcaacgctggtcctgtgctctcaccatttgatagggagttcagtacaaagaagatatcaattatgaagaggattgctctaagtgctctcatcaaaatatatggttgctttttgtttcacctggcatcggacttcgataacatgcgtcctcacctgatcattgttggcgcactgaagatgatcaacatcattgcgcctagctggagagtcatccctgcaacaaacatgatcgacaaaatccgcaaagaccctcagctcaagaaaaagatctgtttcaatccgtacatgtacagaggaaacctcgcactgcaaataggctgcaaactcctttccgtcagcctagacatcaagaagagcctgcacgagtaacatcggcacggacgacgtcgtcactgatcgttccgggagcaagctgctgcacaacctgaagaagatttgtctttttaagatgaagcgtgatccaggtcgaggagatttctaaggtcttggaaatcagcggcgagcgcagcctcatcgataacttcgtcttctcctaccacgtgtaataatcacggctaatgtgacacttttgcaacaatatcaatgccggacaacatgcatgctccttgggaggaattaaggggaagatgaagaactaaaaaaattaccagaatctaatttacgcacgccaagtcagaccaccgtgaaaaactctatctccacgtgaccaatcttctccatttttcagtttgcaagatactttttatattgattaaagttcaataccaataacactaatgtgagctcactgtggtgttcatctttttgcataaattttatgaaaagaaaacagaactctttctattttgccttctctgctatagtaaagatgtaccatttcatgtttattcgtcctctttttggttccttacggtcaattaaggattatacttttgagatgagttttct

SEQ ID NO: 52778 - DNA, 2458 bp, Zea Mays
cggcaatctccctcggcaagcgccctctcccccgcagcaatcttgccgcgccctcgctccacgacaatcttggcaatgtccctcgctccgcgccaatctcgctcgctccgcggcgcccccatgctcgccctcccccacggcccccacggcaatctgcctcccccataagggcaccatcccgagcccgccccagccgccattctcgcttcggggcgccgcgtccgcgtcgattcagtttccctcgagtttcagaaaccccgcccgccaatagccctcgcgtctgtagatctcgcgtcctcgatggaaagttcgcctccacgccattcatggcgccttcctcggtccccttccccatgaccatatcacgccattgtggaatcatggtatttgtcatcttcgtggaagttgaataaccgcatataatttctaggagcacccgggccactgccagtccgccatgcccaagccaccggccggcttcgtgctgaatgaatggggcaggtgcatcgccgctgcattcaagtgcatcttcatcatcgtgcggagttggcctgccgccggccaccaataccatcgcctcggtccacccaccagttgcaacgctggtcctgtgctctcaccatttgatagggagtgagggacgatgggatcaggtcgacctatgatgggcatgcctgctccgcctctctggcccgatctcacagtcatccccaaattcccatgtactactcttgctatcaatcggctgaagttgtatgatgactgttgttcattgaattttctttctgtcaatcgacccgattactcttatttctgactaaaaaaactcagactcaatgtcatgatatttgtctttgcattggttctttgtgaggggttatatataatttgagaaatttcaagatgtgatgattaccaggagtcagcaaaaaaggtattgttttcaggaagaatgttcttgtgaacaatcatcttcacagctaccccttccatgcccattaagaaacaagaaagaatcgcaacatttaggttctccagattttctaaagctcaataattggtaagcctacaacctttgtacagacatgacatggacatatcagtgaactgatgggagagtattaataattctggtttgctataatttctttaccttttatttcttttaggaattcagtccgaatatattcattgaaccaaagagaggatccatgtcggacgtggtggcttggtagatgtggaaatttttccaatagtgacccattttcctttcataattttcatttcatcactacacaaatttcatggattgcttactgactttggccaatatattttagatatgtccatagttttgtttttttcatcccatatctaagcttcagtaaaacaaaggttgtgttgttgtgcatatagattgcctggacataatcatacgatattcaggaaaaaatatttcacatattcagaagaatttgctcttgtttcttcatgtttcttttgcctccttgactcttagcatttggttttctgatttatgcaggttcagtacaaagaagatatcaattatgaagagacttcttcatgaattcatgaggaaacaagctcttcacctgcaggtgtacaccgaggaaatcagagtgcagagctctggtctttatctgccacggatacgaagccgagtgcagcatatccatcggagatgatcaacatcattgcgcctagctggagagtcatccctgcaacaaacatgatcgacaaaatccgcaaagaccctcagctcaagaaaaagaggaaacctcgcactgcaaataggctgcaaactcctttccgtcagcctagacatcaagaagagcctgcacgagtaacatcggcacggacgacgtcgtcactgatcgttccgggagcaagctgctgcacaacctgaagaagatttgtctttttaagatgaaggttctgaagaacgtgatccaggtcgaggagatttctaaggtcttggaaatcagcggcgagcgcagcctcatcgataacttcgtcttctcctaccacgtgtaataatcacggctaatgtgacacttttgcaacaatatcaatgccggacaacatgcatgctccttgggaggaattaaggggaagatgaagaactaaaaaaattaccagaatctaatttacgcacgccaagtcagaccaccgtgaaaaactctatctccacgtgaccaatcttctccatttttcagtttgcaagatactttttatattgattaaagttcaataccaataacactaatgtgagctcactgtggtgttcatctttttgcataaattttatgaaaagaaaacagaactctttctattttgccttctctgctatagtaaagatgtaccatttcatgtttattcgtcctctttttggttccttacggtcaattaaggattatacttttgagatgagttttct

SEQ ID NO: 52779 - DNA, 2375 bp, Zea Mays
cggcaatctccctcggcaagcgccctctcccccgcagcaatcttgccgcgccctcgctccacgacaatcttggcaatgtccctcgctccgcgccaatctcgctcgctccgcggcgcccccatgctcgccctcccccacggcccccacggcaatctgcctcccccataagggcaccatcccgagcccgccccagccgccattctcgcttcggggcgccgcgtccgcgtcgattcagtttccctcgagtttcagaaaccccgcccgccaatagccctcgcgtctgtagatctcgcgtcctcgatggaaagttcgcctccacgccattcatggcgccttcctcggtccccttccccatgaccatatcacgccattgtggaatcatggtatttgtcatcttcgtggaagttgaataaccgcatataatttctaggagcacccgggccactgccagtccgccatgcccaagccaccggccggcttcgtgctgaatgaatggggcaggtgcatcgccgctgcattcaagtgcatcttcatcatcgtgcggagttggcctgccgccggccaccaataccatcgcctcggtccacccaccagttgcaacgctggtcctgtgctctcaccatttgatagggagtgagggacgatgggatcaggtcgacctatgatgggcatgcctgctccgcctctctggcccgatctcacagtcatccccaaattcccatgtactactcttgctatcaatcggctgaagttgtatgatgactgttgttcattgaattttctttctgtcaatcgacccgattactcttatttctgactaaaaaaactcagactcaatgtcatgatatttgtctttgcattggttctttgtgaggggttatatataatttgagaaatttcaagatgtgatgattaccaggagtcagcaaaaaaggtattgttttcaggaagaatgttcttgtgaacaatcatcttcacagctaccccttccatgcccattaagaaacaagaaagaatcgcaacatttaggttctccagattttctaaagctcaataattggaattcagtccgaatatattcattgaaccaaagagaggatccatgtcggacgtggtggcttggtagatgtggaaatttttccaatagtgacccattttcctttcataattttcatttcatcactacacaaatttcatggattgcttactgactttggccaatatattttagatatgtccatagttttgtttttttcatcccatatctaagcttcagtaaaacaaaggttgtgttgttgtgcatatagattgcctggacataatcatacgatattcaggaaaaaatatttcacatattcagaagaatttgctcttgtttcttcatgtttcttttgcctccttgactcttagcatttggttttctgatttatgcaggttcagtacaaagaagatatcaattatgaagagacttcttcatgaattcatgaggaaacaagctcttcacctgcaggtgtacaccgaggaaatcagagtgcagagctctggtctttatctgccacggatacgaagccgagtgcagcatatccatcggagatgatcaacatcattgcgcctagctggagagtcatccctgcaacaaacatgatcgacaaaatccgcaaagaccctcagctcaagaaaaagatctgtttcaatccgtacatgtacagaggaaacctcgcactgcaaataggctgcaaactcctttccgtcagcctagacatcaagaagagcctgcacgagtaacatcggcacggacgacgtcgtcactgatcgttccgggagcaagctgctgcacaacctgaagaagatttgtctttttaagatgaaggttctgaagaacgtgatccaggtcgaggagatttctaaggtcttggaaatcagcggcgagcgcagcctcatcgataacttcgtcttctcctaccacgtgtaataatcacggctaatgtgacacttttgcaacaatatcaatgccggacaacatgcatgctccttgggaggaattaaggggaagatgaagaactaaaaaaattaccagaatctaatttacgcacgccaagtcagaccaccgtgaaaaactctatctccacgtgaccaatcttctccatttttcagtttgcaagatactttttatattgattaaagttcaataccaataacactaatgtgagctcactgtggtgttcatctttttgcataaattttatgaaaagaaaacagaactctttctattttgccttctctgctatagtaaagatgtaccatttcatgtttattcgtcctctttttggttccttacggtcaattaaggattatacttttgagatgagttttct

SEQ ID NO: 52780 - DNA, 1551 bp, Zea Mays
ctcggcaagcgccccctccctagcggcaatctccctcggcaagcgccctctcccccgcagcaatcttgccgcgccctcgctccacgacaatcttggcaatgtccctcgctccgcgccaatctcgctcgctccgcggcgcccccatgctcgccctcccccacggcccccacggcaatctgcctcccccataagggcaccatcccgagcccgccccagccgccattctcgcttcggggcgccgcgtccgcgtcgattcagtttccctcgagtttcagaaaccccgcccgccaatagccctcgcgtctgtagatctcgcgtcctcgatggaaagttcgcctccacgccattcatggcgccttcctcggtccccttccccatgaccatatcacgccattgtggaatcatggtatttgtcatcttcgtggaagttgaataaccgcatataatttctaggagcacccgggccactgccagtccgccatgcccaagccaccggccggcttcgtgctgaatgaatggggcaggtgcatcgccgctgcattcaagtgcatcttcatcatcgtgcggagttggcctgccgccggccaccaataccatcgcctcggtccacccaccagttgcaacgctggtcctgtgctctcaccatttgatagggagttcagtacaaagaagatatcaattatgaagaggattgctctaagtgctctcatcaaaatatatggttgctttttgtttcacctggcatcggacttcgataacatgcgtcctcacctgatcattgttggcgcactgaagatgatcaacatcattgcgcctagctggagagtcatccctgcaacaaacatgatcgacaaaatccgcaaagaccctcagctcaagaaaaagaggaaacctcgcactgcaaataggctgcaaactcctttccgtcagcctagacatcaagaagagcctgcacgagtaacatcggcacggacgacgtcgtcactgatcgttccgggagcaagctgctgcacaacctgaagaagatttgtctttttaagatgaaggttctgaagaacgtgatccaggtcgaggagatttctaaggtcttggaaatcagcggcgagcgcagcctcatcgataacttcgtcttctcctaccacgtgtaataatcacggctaatgtgacacttttgcaacaatatcaatgccggacaacatgcatgctccttgggaggaattaaggggaagatgaagaactaaaaaaattaccagaatctaatttacgcacgccaagtcagaccaccgtgaaaaactctatctccacgtgaccaatcttctccatttttcagtttgcaagatactttttatattgattaaagttcaataccaataacactaatgtgagctcactgtggtgttcatctttttgcataaattttatgaaaagaaaacagaactctttctattttgccttctctgctatagtaaagatgtaccatttcatgtttattcgtcctctttttggttccttacggtcaattaaggattatacttttgagatgagttttct

SEQ ID NO: 52781 - DNA, 1583 bp, Zea Mays
ctccgcctcggcaagcgccccctccctagcggcaatctccctcggcaagcgccctctcccccgcagcaatcttgccgcgccctcgctccacgacaatcttggcaatgtccctcgctccgcgccaatctcgctcgctccgcggcgcccccatgctcgccctcccccacggcccccacggcaatctgcctcccccataagggcaccatcccgagcccgccccagccgccattctcgcttcggggcgccgcgtccgcgtcgattcagtttccctcgagtttcagaaaccccgcccgccaatagccctcgcgtctgtagatctcgcgtcctcgatggaaagttcgcctccacgccattcatggcgccttcctcggtccccttccccatgaccatatcacgccattgtggaatcatggtatttgtcatcttcgtggaagttgaataaccgcatataatttctaggagcacccgggccactgccagtccgccatgcccaagccaccggccggcttcgtgctgaatgaatggggcaggtgcatcgccgctgcattcaagtgcatcttcatcatcgtgcggagttggcctgccgccggccaccaataccatcgcctcggtccacccaccagttgcaacgctggtcctgtgctctcaccatttgatagggagttcagtacaaagaagatatcaattatgaagaggattgctctaagtgctctcatcaaaatatatggttgctttttgtttcacctggcatcggacttcgataacatgcgtcctcacctgatcattgttggcgcactgaagatgatcaacatcattgcgcctagctggagagtcatccctgcaacaaacatgatcgacaaaatccgcaaagaccctcagctcaagaaaaagatctgtttcaatccgtacatgtacagaggaaacctcgcactgcaaataggctgcaaactcctttccgtcagcctagacatcaagaagagcctgcacgagtaacatcggcacggacgacgtcgtcactgatcgttccgggagcaagctgctgcacaacctgaagaagatttgtctttttaagatgaaggttctgaagaacgtgatccaggtcgaggagatttctaaggtcttggaaatcagcggcgagcgcagcctcatcgataacttcgtcttctcctaccacgtgtaataatcacggctaatgtgacacttttgcaacaatatcaatgccggacaacatgcatgctccttgggaggaattaaggggaagatgaagaactaaaaaaattaccagaatctaatttacgcacgccaagtcagaccaccgtgaaaaactctatctccacgtgaccaatcttctccatttttcagtttgcaagatactttttatattgattaaagttcaataccaataacactaatgtgagctcactgtggtgttcatctttttgcataaattttatgaaaagaaaacagaactctttctattttgccttctctgctatagtaaagatgtaccatttcatgtttattcgtcctctttttggttccttacggtcaattaaggattatacttttgagatgagttttct

SEQ ID NO: 52782 - DNA, 1440 bp, Zea Mays
atcttgcattctcgctgtccagcaaaatactcgaaaaccacctcgcaagacttggaaaccgcaacgcctcttcctccttgccaggacaggagtctcaactctcaaccaagtggagagtggaccgaccatggccaccgccgccgacatccgcgtctccatcggctaccagacccgcttcgggctccgcctcgccgccgcgctctcctccccacccccatcccccgccagcaactccgccttctccccgctctccctccacgtcgcgctcagcctcctcgccgccggcgcgggtggcgccacgcgcgaccagctcgccgccgccctcggaggcgacgcgcccgccggggccgacggcctgcacgcgctcgccgagcaggtggtgcagctcgtgctcgccgacggctccggcgccggcggcccgcgcgtcgccttcgccgacggcgtcttcgtcgactcctcgctgaagctcaagccggccttcgaggagatcgccgtgggaaagtacagggccgacacccagtccgtcgacttccagaaaaaggctgctgaagctgctggtcaagtgaactcatgggtagaaaaaattacttctggtctcatcaaagagatcctgcccccaggttctgttgaccacaccaccaggcttgttcttggtaatgcgctctattttaaaggagcttggactgagaagtttgatgcatctaaaacaaaagatagcgagttccaccttcttgatgggagctcagtccaagcacctttcatgtccagtacagacaaacaatatatcgtggcttacaacaacttgaaggtgcttaagcttccataccagcaaggtgcggacaagaggcagttctccatgtacattcttcttccagatgcaaaagatgccatctggagcttggctgaaaagctgagctctgaaccagagttcctggagaaccatgtcccaatgcacaaggttccagtcggacagttcaaagtccccaagttcaagatatcctttggatttgaggcatctgagttgctcaaaggtctcgggctccagcttccgtttagtgctgaagcggacctgtcggggttagttgattcaccagagggacggaacttgtctgtttcgtccgtattccacaagtcatttgtcgaagtgaacgaggaaggaacggaggccgctgccgcatctgctgcaacagttgtgctccggtcgttcacgatgcctcaggatttcgtcgcagatcaccctttcatgttcctgatccgcgaagacttgactggtgtggtgctgtttgtcggccacgtggtgaatcccctccttgctccatagtgtgttgttcagaagtgcgtcggggtgaggatgacctccttgaagcggatgatgttggggtggcgcagggagcggtggttgatgatctcccgctgcacgttctcgtcaatctgcagcgg

SEQ ID NO: 52783 - DNA, 1382 bp, Zea Mays
gaaagaggcatgttgttgtcagatgattaaaatatggtatactctgcgaaatgctgaatacaggctttcttttgaaagaaatcttgaactgtctgaagaagttgcagaatgccaaaaaagtgatgtcattgaagataatcatcatgacatcaatttgggtacacctgtcactatttttagattagcagaagaagacatgccccaggaccctgaaaaaactgatgacgaatcatcatatgaaaatatgggagaagagctcggcgacttaaccctgcaggcagaagagtatattattcagatgcaatctcgtttggatgccatgaaaaaagagctacatgatctcaggagaaagaattctgctctgcagatgcaacggtttgttggggaggaaaaaaacgacttgctggactatttgagatcactaacaccagagaaggttgctgaactatcagagtcttcatgtcccggcgtgcaagaagcaatccattctgtggttcatggtctgctggctactctttcccccaagatacactcaaaggcccctccaccgctagataacacttctggaggggtcttaaaccttgggggcgaggatgatgactgtgcagaacttgtggagaatgcttccctcccatttcagcccctaatatctgttccccgtgattatcttgcacgcttgctcttctggtattgtgaagctgacttaataggcattgttatgttcatatatcatgtagcaactgaacaccgacattttcaattgtttaggtgcatgctgctgggtcactacatccggggtctggagtaccggttagagcttgctcagcttctgcgaatatccagcgacgtgggttctttctctggtggtgatgatcatgttgtttgagggtaccacgtttactggtattcctcaccgggaagaatggaaagatctggccaagcaatgcagaggtggccgttacactgcgttccctctctgaaatgatgccccaagcccccaatacaggtggcgctgctgagctatatattagttgtagttcctgtaaattcagaaaacagtcactcgggtcgggtgtaaagctagtgttacatatgcacgtgaagcactttctttttttcttcctttgatgttgtgccgtataaaaaaggtttggtggttagttggtgtttatctactggtagcatgataggcttccttgtattctagttgtatgtatctggtggttgtgattgatgtccagcgtccatttagcttgtgtggcttcttgattcgaataaagtttaacttattttttggaactcacgagcacatactttcattggaattatatttacattgttgtccaatgtccatttagcttgtgtgacttcttgattcgagc

SEQ ID NO: 52784 - DNA, 1430 bp, Zea Mays
tcaacttgtaaaaaatgaacaaaactcaactgaaatccatgctctggaacttgatccaggacatagagcctctggaccttagtgtcattcagaaagatgttgctcctgaaacgaagctctttggaatcccttcttcaaattattggtatcttcaattatgactgggtatactctgcgaaatgctgaatacaggctttcttttgaaagaaatcttgaactgtctgaagaagttgcagaatgccaaaaaagtgatgtcattgaagataatcatcatgacatcaatttgggtacacctgtcactatttttagattagcagaagaagacatgccccaggaccctgaaaaaactgatgacgaatcatcatatgaaaatatgggagaagagctcggcgacttaaccctgcaggcagaagagtatattattcagatgcaatctcgtttggatgccatgaaaaaagagctacatgatctcaggagaaagaattctgctctgcagatgcaacggtttgttggggaggaaaaaaacgacttgctggactatttgagatcactaacaccagagaaggttgctgaactatcagagtcttcatgtcccggcgtgcaagaagcaatccattctgtggttcatggtctgctggctactctttcccccaagatacactcaaaggcccctccaccgctagataacacttctggaggggtcttaaaccttgggggcgaggatgatgactgtgcagaacttgtggagaatgcttccctcccatttcagcccctaatatctgttccccgtgattatcttgcacgcttgctcttctggtgcatgctgctgggtcactacatccggggtctggagtaccggttagagcttgctcagcttctgcgaatatccagcgacgtgggttctttctctggtggtgatgatcatgttgtttgagggtaccacgtttactggtattcctcaccgggaagaatggaaagatctggccaagcaatgcagaggtggccgttacactgcgttccctctctgaaatgatgccccaagcccccaatacaggtggcgctgctgagctatatattagttgtagttcctgtaaattcagaaaacagtcactcgggtcgggtgtaaagctagtgttacatatgcacgtgaagcactttctttttttcttcctttgatgttgtgccgtataaaaaaggtttggtggttagttggtgtttatctactggtagcatgataggcttccttgtattctagttgtatgtatctggtggttgtgattgatgtccagcgtccatttagcttgtgtggcttcttgattcgaataaagtttaacttattttttggaactcacgagcacatactttcattggaattatatttacattgttgtccaatgtccatttagcttgtgtgacttcttgattcgagc

SEQ ID NO: 52785 - DNA, 1682 bp, Zea Mays
acccaacaccccagtatcctgaattcctgaatcctgatgcggtttagcgcaccgaggtagaccgagcgagacagccagccagcggggcaagctgaaaaacctatcttctatcaccacctcggagcccgagtggaaggggaaggcaggaatcgccccgcacgcgcccccatccgcctgccggcgacggcccacatgccgaccgcctacagcctccgcgcgccgccctccaccgcgcagcagcgcctcaggctgcccccgccgccgctgccgctttgcccggcgggtggaggggccgcccgccggaggagggttgtcggggtagcgtccgcgtccgcgtcgcccttcgacgagctgtacgcgcgggggaggcccgcacatggaccctccaagaaatccatgctctggaacttgatccaggacatagagcctctggaccttagtgtcattcagaaagatgttgctcctgaaacgaagctctttggaatcccttcttcaaattattggtatcttcaattatgactgggtatactctgcgaaatgctgaatacaggctttcttttgaaagaaatcttgaactgtctgaagaagttgcagaatgccaaaaaagtgatgtcattgaagataatcatcatgacatcaatttgggtacacctgtcactatttttagattagcagaagaagacatgccccaggaccctgaaaaaactgatgacgaatcatcatatgaaaatatgggagaagagctcggcgacttaaccctgcaggcagaagagtatattattcagatgcaatctcgtttggatgccatgaaaaaagagctacatgatctcaggagaaagaattctgctctgcagatgcaacggtttgttggggaggaaaaaaacgacttgctggactatttgagatcactaacaccagagaaggttgctgaactatcagagtcttcatgtcccggcgtgcaagaagcaatccattctgtggttcatggtctgctggctactctttcccccaagatacactcaaaggcccctccaccgctagataacacttctggaggggtcttaaaccttgggggcgaggatgatgactgtgcagaacttgtggagaatgcttccctcccatttcagcccctaatatctgttccccgtgattatcttgcacgcttgctcttctggtgcatgctgctgggtcactacatccggggtctggagtaccggttagagcttgctcagcttctgcgaatatccagcgacgtgggttctttctctggtggtgatgatcatgttgtttgagggtaccacgtttactggtattcctcaccgggaagaatggaaagatctggccaagcaatgcagaggtggccgttacactgcgttccctctctgaaatgatgccccaagcccccaatacaggtggcgctgctgagctatatattagttgtagttcctgtaaattcagaaaacagtcactcgggtcgggtgtaaagctagtgttacatatgcacgtgaagcactttctttttttcttcctttgatgttgtgccgtataaaaaaggtttggtggttagttggtgtttatctactggtagcatgataggcttccttgtattctagttgtatgtatctggtggttgtgattgttgtccaatgtccatttagcttgtgtgacttcttgattcgagc

SEQ ID NO: 52786 - DNA, 2412 bp, Zea Mays
acccaacaccccagtatcctgaattcctgaatcctgatgcggtttagcgcaccgaggtagaccgagcgagacagccagccagcggggcaagctgaaaaacctatcttctatcaccacctcggagcccgagtggaaggggaaggcaggaatcgccccgcacgcgcccccatccgcctgccggcgacggcccacatgccgaccgcctacagcctccgcgcgccgccctccaccgcgcagcagcgcctcaggctgcccccgccgccgctgccgctttgcccggcgggtggaggggccgcccgccggaggagggttgtcggggtagcgtccgcgtccgcgtcgcccttcgacgagctgtacgcgcgggggaggcccgcacatggaccctccaagaaatccatgctctggaacttgatccaggacatagagcctctggaccttagtgtcattcagaaagatgttgctcctgaaacggtagatgcaatgaagaggactatttcgggcatgttgggtctgcttccatctgatcagttccgtgtcattgtagaagctctttggaatcccttcttcaaattattggtatcttcaattatgactgggtatactctgcgaaatgctgaatacaggctttcttttgaaagaaatcttgaactgtctgaagaagttgcagaatgccaaaaaagtgatgtcattgaagataatcatcatgacatcaatttgggtacacctgtcactatttttagattagcagaagaagacatgccccaggaccctgaaaaaactgatgacgaatcatcatatgaaaatatgggagaagagctcggcgacttaaccctgcaggcagaagagtatattattcagatgcaatctcgtttggatgccatgaaaaaagtaactacagtctgttgctttattagccaacccgtttcatttactactatgctacgttatttgacattatatttaccgcagctatgcatttatttattagttcataaattcaaattataaatgagtgatgcgtataccagaggaagatcaggaatagcatgggagtatgctcattatacacaggctagagttaacacttctgtaattcagttgaacttacccactatatgtttgtgctatctgaacttgtgcacgtcagcttttccatatttatggaacacaatattttgcacactgtacatacaattttgttttatgtatcatatctgactaaaaaaaagaactccagtttctaatcggacaagtactcagggcaggtgtttatatgtactctgggctgaagtgtggatgaagaaataaatctaaatcaattgtacctctatttcgtgtagttggacctgtaataaaacatttgtcattttgaatctgacaacttgtgttgcgtgatatatttcaactttccaggcttattgcttttattgacattgcaggagctacatgatctcaggagaaagaattctgctctgcagatgcaacggtttgttggggaggaaaaaaacgacttgctggactatttgagatcactaacaccagagaaggttgctgaactatcagagtcttcatgtcccggcgtgcaagaagcaatccattctgtggttcatggtctgctggctactctttcccccaagatacactcaaaggcccctccaccgctagataacacttctggaggggtcttaaaccttgggggcgaggatgatgactgtgcagaacttgtggagaatgcttccctcccatttcagcccctaatatctgttccccgtgattatcttgcacgcttgctcttctggtgcatgctgctgggtcactacatccggggtctggagtaccggttagagcttgctcagcttctgcgaatatccagcgacgtgggttctttctctggtggtgatgatcatgttgtttgagggtaccacgtttactggtattcctcaccgggaagaatggaaagatctggccaagcaatgcagaggtggccgttacactgcgttccctctctgaaatgatgccccaagcccccaatacaggtggcgctgctgagctatatattagttgtagttcctgtaaattcagaaaacagtcactcgggtcgggtgtaaagctagtgttacatatgcacgtgaagcactttctttttttcttcctttgatgttgtgccgtataaaaaaggtttggtggttagttggtgtttatctactggtagcatgataggcttccttgtattctagttgtatgtatctggtggttgtgattgatgtccagcgtccatttagcttgtgtggcttcttgattcgaataaagtttaacttattttttggaactcacgagcacatactttcattggaattatatttacattgttgtccaatgtccatttagcttgtgtgacttcttgattcgagc

SEQ ID NO: 52787 - DNA, 2592 bp, Zea Mays
attgatggagaatcaagtagctccatgaacttgagattaggcatttagacttggcaaatcttgagaattatggagaaacaagagtgaggtacacagcactgatctgttgttaactgatcgggtgcgggcgtaaaacaagtcggcccaagtcccaacaacggatcggaagcgatccccattccacatccaccaaatggccgacgccgacgctgccgccgtccccgttgatggccccgcccgcaccaccgtgctggactcgctcggcgaggacatcacccgcatcgtctaccccgtctccgcctgcatgctcctcgtcgtgctcctggtctccctcctctcctcgccctcctccccgtcgcccttctccgcctccatcgcggccgccaccggcggcgtctccggaggggacgacatacccacggcgctcatcaccgccctcaccttcgtcgtcgccgtcacggccgccaccttcctgctcgcgctcctcttctacctccgctgcacgccctgcctccgcgcctacctcggcttctccgcgctctccgtcctcctcgtcctcggcggccaggtcgcgctcctcctcctctcccgcctccgcctcccgctcgacgccgtctccttcgcgctcctcctgcccaacgccgcgggggcgctcgcgctcgccgcgctggtcccggcctccgtccccatcgcgctccaccaggccgcgctcgtcgccgtcgccgtactcaccgccttctggttcacgctgctgcccgagtggaccacctgggcgctgctcgtcgccatggccatctacgacctcgcggcagtgctgctccctggtggccccttgagggtgctgctcgagctggccatacagaggaacgaggagatcccggccttggtctacgaggccagaccggtggatccccgccatggccggaattggcgcttgtggagggaagggaggcaacctggcgcggatttggatgccagttccacggttgaggtgattggggaggtacttcagcctgactctggaaacagttcggcatcccaagttcatgaacctgccactcttgctggtgatattagtaattcaaggcccagggtgacattggcggctgctttgagctcctctgattcttctactgtcgcacaagttggggaagtttcagcattgcaggagcatagagttgctgttgctgaaatgatggtacctttgatccagccacgccctcagagatctgaagaagaggtggaagatgaagatggcattggattaagctcatctggggcgatcaagcttgggttgggggacttcatattctacagcgttttggtcggcagggcagcgatgtatgactacatgacagtgtatgcctgctaccttgccatcattgcagggcttggcatcactctgctcctgctggcattcttccgcaaggcattgccggccctaccagtgtccattgccctcggcgttctgttttacgtgctcacaagaacactgcttgaggaatttgtcgtgcagtgctccacaaatcttgtgatgttttaatatgcacgcaacattgcttattgctgtaccattgtagttcatgatcggcacctttaccaatgattagctcgtaattttctgcaagtgttaattttactggtccgtgcactgatttattatatgaagatatttggaattcctgtcatattttccactactaatcttgttctgtatgccccaacttaggtacatgcccatctgtttatattgttacatgtgagttttttaggggagtaacatctgtgattttcaaataaaataataggaacattttgtgtgcattttatatatcatggaaattttctcgaactgtctaaccataagtccatgaatatgtcttttctagaggaaccgttctttattttttgttcgtgaacaaaaaagtttgacagactgcacataggtaatgaagatggatttgttttcagtctgctgtaacttttcttaaaattgagcacccaggtgccttttcagcaccatttaactgagcccttatctcactgaaaaaaaactactgtgctacattgttccacaaaatgatcctgagaactgctttggtagcccagttcaatattagggtgtctcacttcctgatttcccatatgcattctgctactaatgatttcttcatggccttacatagcatcctggaacatagaaacaaagctactgttggcattgggtctgacagtggaggcaacaaaagatactgtatcagtgtttgcagcttcatgttcacacaacggatgtgcttaaaggagggaggttgatgcggactggcagcttgctgtttctcctattcttcaaggaatgaggatgcatcatttgttctctatacattcatatttctcatttttgcagagttatgtttaaacctgggtgcctcgtcagaagtctaaacccttataaatcttgttatatttactccccaaatagtacggttttgaatggatcttgatttattattatttttcagacatataactaactcatattcagattcacttcacatatatagcttaagagtgcatttgcattttttatggagg

SEQ ID NO: 52788 - DNA, 800 bp, Zea Mays
cttcctgtgaacttgccttaggatatttcgaggactcgggcttgagtatgacatgtcggggctgacaggggatacgatggatagtcataggctcatagcacttgctggacaccaaggctatgacaagcaaaatgctcttgttggagaattattccttaattacttttgtgaaggaaagtatattggtgacaagcaggttttgctggacgctgcaagaaaggtgggcatagaaggggccgaagaactgtttcaagaccctaccaaaggagtcgatgaggttcaggaagaactcaagaagtattcatctggcatctccggggtaccacattttgtgatcaatgataaatatcaactcagtggtggccagcctccaaatgtattcatgagggcgtttgagatggctgcaaaagatggagcttaatggcatttaaaaggagctcctccagtagtcttcgcatatgttaaaaaggaataggagccgaatttaacaataaagttccagcacagctcatcgctgatttgcgaaaaatatgtggaatcagttgtatttccgtagttctgatatggtgataattagtggtgaagatggtgtggatgttcactttcgaataaaattctaggcgatcggatatggcatatgggttagaatgccccatcatcagagcccggtctgtatttacatttggttcgataggatgtgtgcaagatatcagaaaacaacaaagttcagatttgatattcgaaaggaataaaaaaaaagctagcatacacagctgcatttagattgattgttaccattt

SEQ ID NO: 52789 - DNA, 1366 bp, Zea Mays
ccgaggttcttggaaggattggacgtacaggaacggcagagaaagacagagcgcctcacgtgcctaccgtggaccaggtccaggggtgggttggcaggttgctgagactgagagcacgggaccgtgaaggcgtgaaccgagcccacccaccaaccaaattccgcgagaccgcgactgcttctccatccttccacgaactagacgagggaagagcgctgaagctgtggaggaaaacgaaggatctccccgtgcttgtgtatgccaggtcgcctgctctccgtccgcatcccgtccctcgcgaaactcggcgctcccagcaggtgtgcaaaatccatggcttcagacactggcaagaagctcatccagatcgatgtgagctcggacacagtatgcccttggtgctttgtcggcaaaaagaacctcgagaaagcgatggagcaaagcagggacaagtttgacttcgaggtccgctggcatccgttctttctaaaccctgatgcgcctaaggagggcgtcaggaaatctgacttctacaaggcgaagtttggtcctgttcagtatgagcgtgtcatttctcgcatggccgagatatttcgaggactcgggcttgagtatgacatgtcggggctgacaggggatacgatggatagtcataggctcatagcacttgctggacaccaaggctatgacaagcaaaatgctcttgttggagaattattccttaattacttttgtgaaggaaagtatattggtgacaagcaggttttgctggacgctgcaagaaaggtgggcatagaaggggccgaagaactgtttcaagaccctaccaaaggagtcgatgaggttcaggaagaactcaagaagtattcatctggcatctccggggtaccacattttgtgatcaatgataaatatcaactcagtggtggccagcctccaaatgtattcatgagggcgtttgagatggctgcaaaagatggagcttaatggcatttaaaaggagctcctccagtagtcttcgcatatgttaaaaaggaataggagccgaatttaacaataaagttccagcacagctcatcgctgatttgcgaaaaatatgtggaatcagttgtatttccgtagttctgatatggtgataattagtggtgaagatggtgtggatgttcactttcgaataaaattctaggcgatcggatatggcatatgggttagaatgccccatcatcagagcccggtctgtatttacatttggttcgataggatgtgtgcaagatatcagaaaacaacaaagttcagatttgatattcgaaaggaataaaaaaaaagctagcatacacagctgcatttagattgattgttaccattt

SEQ ID NO: 52790 - DNA, 1095 bp, Zea Mays
ccgaggttcttggaaggattggacgtacaggaacggcagagaaagacagagcgcctcacgtgcctaccgtggaccaggtccaggggtgggttggcaggttgctgagactgagagcacgggaccgtgaaggcgtgaaccgagcccacccaccaaccaaattccgcgagaccgcgactgcttctccatccttccacgaactagacgagggaagagcgctgaagctgtggaggaaaacgaaggatctccccgtgcttgtgtatgccaggtcgcctgctctccgtccgcatcccgtccctcgcgaaactcggcgctcccagatatttcgaggactcgggcttgagtatgacatgtcggggctgacaggggatacgatggatagtcataggctcatagcacttgctggacaccaaggctatgacaagcaaaatgctcttgttggagaattattccttaattacttttgtgaaggaaagtatattggtgacaagcaggttttgctggacgctgcaagaaaggtgggcatagaaggggccgaagaactgtttcaagaccctaccaaaggagtcgatgaggttcaggaagaactcaagaagtattcatctggcatctccggggtaccacattttgtgatcaatgataaatatcaactcagtggtggccagcctccaaatgtattcatgagggcgtttgagatggctgcaaaagatggagcttaatggcatttaaaaggagctcctccagtagtcttcgcatatgttaaaaaggaataggagccgaatttaacaataaagttccagcacagctcatcgctgatttgcgaaaaatatgtggaatcagttgtatttccgtagttctgatatggtgataattagtggtgaagatggtgtggatgttcactttcgaataaaattctaggcgatcggatatggcatatgggttagaatgccccatcatcagagcccggtctgtatttacatttggttcgataggatgtgtgcaagatatcagaaaacaacaaagttcagatttgatattcgaaaggaataaaaaaaaagctagcatacacagctgcatttagattgattgttaccattt

SEQ ID NO: 52791 - DNA, 1410 bp, Zea Mays
ccgaggttcttggaaggattggacgtacaggaacggcagagaaagacagagcgcctcacgtgcctaccgtggaccaggtccaggggtgggttggcaggttgctgagactgagagcacgggaccgtgaaggcgtgaaccgagcccacccaccaaccaaattccgcgagaccgcgactgcttctccatccttccacgaactagacgagggaagagcgctgaagctgtggaggaaaacgaaggatctccccgtgcttgtgtatgccaggtcgcctgctctccgtccgcatcccgtccctcgcgaaactcggcgctcccagcaggtgtgcaaaatccatggcttcagacactggcaagaagctcatccagatcgatgtgagctcggacacagtatgcccttggtgctttgtcggcaaaaagaacctcgagaaagcgatggagcaaagcagggacaagtttgacttcgaggtttcgctccccctcttcagatccccgtcatgatcccggtttcagaattcttgtttacgcgggtgccaaccctgtgtctgtctgcttgctttgcttggaaggtccgctggcatccgttctttctaaaccctgatgcgcctaaggagggcgtcaggaaatctgacttctacaaggcgaagtttggtcctgttcagtatgagcgtgtcatttctcgcatggccgagatatttcgaggactcgggcttgagtatgacatgtcggggctgacaggggatacgatggatagtcataggctcatagcacttgctggacaccaaggctatgacaagcaaaatgctcttgttggagaattattccttaattacttttgtgaaggaaagtatattggtgacaagcaggttttgctggacgctgcaagaaaggtgggcatagaaggggccgaagaactgtttcaagaccctaccaaaggagtcgatgagatcaatgataaatatcaactcagtggtggccagcctccaaatgtattcatgagggcgtttgagatggctgcaaaagatggagcttaatggcatttaaaaggagctcctccagtagtcttcgcatatgttaaaaaggaataggagccgaatttaacaataaagttccagcacagctcatcgctgatttgcgaaaaatatgtggaatcagttgtatttccgtagttctgatatggtgataattagtggtgaagatggtgtggatgttcactttcgaataaaattctaggcgatcggatatggcatatgggttagaatgccccatcatcagagcccggtctgtatttacatttggttcgataggatgtgtgcaagatatcagaaaacaacaaagttcagatttgatattcgaaaggaataaaaaaaaagctagcatacacagctgcatttagattgattgttaccattt

SEQ ID NO: 52792 - DNA, 1407 bp, Zea Mays
ccgaggttcttggaaggattggacgtacaggaacggcagagaaagacagagcgcctcacgtgcctaccgtggaccaggtccaggggtgggttggcaggttgctgagactgagagcacgggaccgtgaaggcgtgaaccgagcccacccaccaaccaaattccgcgagaccgcgactgcttctccatccttccacgaactagacgagggaagagcgctgaagctgtggaggaaaacgaaggatctccccgtgcttgtgtatgccaggtcgcctgctctccgtccgcatcccgtccctcgcgaaactcggcgctcccaggtgtgcaaaatccatggcttcagacactggcaagaagctcatccagatcgatgtgagctcggacacagtatgcccttggtgctttgtcggcaaaaagaacctcgagaaagcgatggagcaaagcagggacaagtttgacttcgaggtttcgctccccctcttcagatccccgtcatgatcccggtttcagaattcttgtttacgcgggtgccaaccctgtgtctgtctgcttgctttgcttggaaggtccgctggcatccgttctttctaaaccctgatgcgcctaaggagggcgtcaggaaatctgacttctacaaggcgaagtttggtcctgttcagtatgagcgtgtcatttctcgcatggccgagatatttcgaggactcgggcttgagtatgacatgtcggggctgacaggggatacgatggatagtcataggctcatagcacttgctggacaccaaggctatgacaagcaaaatgctcttgttggagaattattccttaattacttttgtgaaggaaagtatattggtgacaagcaggttttgctggacgctgcaagaaaggtgggcatagaaggggccgaagaactgtttcaagaccctaccaaaggagtcgatgagatcaatgataaatatcaactcagtggtggccagcctccaaatgtattcatgagggcgtttgagatggctgcaaaagatggagcttaatggcatttaaaaggagctcctccagtagtcttcgcatatgttaaaaaggaataggagccgaatttaacaataaagttccagcacagctcatcgctgatttgcgaaaaatatgtggaatcagttgtatttccgtagttctgatatggtgataattagtggtgaagatggtgtggatgttcactttcgaataaaattctaggcgatcggatatggcatatgggttagaatgccccatcatcagagcccggtctgtatttacatttggttcgataggatgtgtgcaagatatcagaaaacaacaaagttcagatttgatattcgaaaggaataaaaaaaaagctagcatacacagctgcatttagattgattgttaccattt

SEQ ID NO: 52793 - DNA, 1083 bp, Zea Mays
cttcaagatttcacctcctacgtgccgaatggctcctgtgtctcacaacaatgattccgattcgagtgatagtgacgacaacacaatcatactggccactcttcttaccctatgcatcgaagctaccaggcgtaggcgcaggcagtcttctatccctcgccgcgtgatcgctagggatcattttgctagggagaaccttatccgccatcactacttcggccctaaccccgtgtatccagctcacatgtttcgccgaaggtttcgcatgagtcggccattgttcctccgtattttgcaaggcctccagcagcaggatagttacttcactcaacaggtcgacgctacaggcctcgccggtcttggaccacttcaaaaaccattcggcacccctgggaggaaaagaagatctatttcacgcagatgcaggaaagtcaccggaaagatatcgagcgcgcattcagtgtgcttcaagcacggtgggcagtgctacgtggtcttgcttacagacgggatcgtaaccgtctaaccgagatcatcactgcttgcataataatgcacaacatgatcattgaagatgaaggggagtttgctgccaacaccgactttggagacaatgcttctgccactgcacattgcgaactcatacaagagggaaggtcggattgggtcatcgatcactttgatctacgtcgccaggaacgattttgcaatcttcaaaatgatcttgtcgagcatttgtggaccaaacgtgggagtatgtgatgaaacttgaaccttagtcctttaaatgatgtggctccgtagtgtatgttccatgtgtgtggtggtcattgtgttatgtttcatgtgtgtggtagtgggtgtgctatgttccatgcgtgtcttagtttgagttaggggttctgtggtcacgggcaatgagtacgaattcatttactcttagtggtcaaatgtgtactcttcagtatgaaatcaaatgtggcaccatctatgcaagagaaatgagcatgtcatgaaagttgttgtacatgcctactattcagagcgaccatgaccacagaacccctaactaaagatatgaag

SEQ ID NO: 52794 - DNA, 860 bp, Zea Mays
ggttccctggtccatatagcacacacaaaaagtttggcaactacgctattgaaacagctatatcaccacagtacatgtgccttgacaccgaaatcaaaacatgcatagccaactcaagtcaactggacatatacctcctgatgactatctgcttgcaagacaatgacaacatgtgcaataaaaaagatgacaatgtaaccatgcaagtacaaaatctaaaaaataagcaattaagcaaccaagtaaacttacaagcgcacaaatatcaggtgctatcctcgtgcatgtagcacatcagtgaaacagatacctacgaatgccaataccgtggcagctgtgtgcgtgtgctttctactcaaagggattctctgatacatctagcacgcacaactacgcgattgcaacaggtatagagcttcagaccctcaatccctagttagggaaacaccaacagccaactcaaaactcaactgggcgtacatcttcctatgttgatctaagtgaccacagattcaccacagatgcaacaaataaaaccatgaaatgactaaaccagatcacgggaatggaattagggacggttctagcaacaaccgcacgagataagccgagcgcaagagctggtcaaaggcagaaacgaagtgaagaaaatttcgacggttgccacacctttcgagcggagcggcaggcggccgcgaggcgatggtggcggccgtagaggaaaaagacgagtgtgctggtggctccgctagggtttcttatatggccgtcttatatagctcatgcgtgggctggctgactgggttcggataagctgcgaagtggccgcttttgggcctaaaatcccatcgtgggcttta

SEQ ID NO: 52795 - DNA, 2201 bp, Zea Mays
tgattgttaaattaattcttgatagcattactaaacaaaacaatgatatatacatgtacaaagtgttcccgttgcaacgcacgggtatatacctagtagaagataagaagagaacctatatataatgaaccgtatgagcgttttataggagggatgctagttgctggtcgctggagtcggtctaaagaaagaatggaggggacgttgctgctgctgctgcttggcctgctcctcgtgctacccctgctcctcgtcaaactcgttgtcgtcaacaagtacttcccggccgccccatggcagcccgggaagccgcctctgcgtctgcctccggggccacggcagctgccggtgatcggcagcctccaccacctcctcgcgtcgcgccacggcggcctccttcaccgcgccatgcgcgagctgtccatccagcacggcccggtgatgctgctccggctgggcgccgtgcccacgctggtggtgtcctcggccgaggcggccagggaggtgctgaagacccacgacgcggcgttcgccagccggcaccagacgccgacgctggacgtgttcagcctcggcggccgcgacatcctcttctccccctacggcgagctgtggcgccagctccggcggatctgcgtgctggagctcttctcggcgcgccgcgtgcagtcgttccgccgcatccgtgaggaggaggccgcggggctgctccggtccgtggccgactcctgcgccggcggcagcgcggtggtggacatcggcgagcgggcctgccgcgccatgaacgacaccgtggtgcggtcggccgtcggcgggcggtgcgcgcggcgggacgagttcctgcgcgagctccacagggccgtggtgctcacctccggcttcaacctggccgacctgtacccgtcgtcgcggctggtgcgccgcctcagccgcgcgctgcgggagaccgagcggtgcaaccggaacgtccgcgacattatgggcgacatcatccgcgagcagctgcagaccgccgccggcgacggcgggcggggagaacgggaggaggaggagaaggacaacaacctactggccgtgctgctgaggctgcagagggacggcggcgacgacgcgcagtgcccgctcaccaccgacgtcatctccaccgtcgtcctggagatcttctcggcggggagcgagacctcggcgacgaccctggagtgggcgctgtcggagctgacgaggaacccgcgggtgatgcgcagggcccaggccgaaatgcgggaggccttcagggggcagcggaggctcggcgaggccgacacggcgaggctgaggtacctgccgctggtggtgaaggagacgctgcggctgcacgtgcccgtgccgttcctgctgccgcgggagtgccgcgaggcgtgccgggtgatgggctacgacgtggcccggggcaccaaggtgctggtgaacgcgtgggcgatcgcgagggacgccgcgtactggggcgaccccgaggcgttccggccggagcggttcgagggtggcggcggcgccgtcgacttcagaggcgccgacatggagttcatcccgttcggcgccggcaggcggatgtgccccggcatgtcgctggggctcgtcaacatggagctggcgctcgcgggcctcctctaccacttcgactggacgctcccggacggcgacgggaaggtgctcgacatgagcgaggcgttcgggatcaccgtgaagaggaagtccaagctcgtgctgcgcgccacgccgcgtgttccattctcgatcaggactgcggcagcaccaggcaggcacgtgtggcggtcgccggcggatcaggacagcggcagcacgccagcaccagacaccagtgcgcgctcgtgtcctgagtcttgagtcctgactggcaacgacgatattgttgtgaaaatacacgtttgatcatggataatattgttagagaatgctagtgggcttggcctatattgttagcgaagccgcgataatcttgtagaggctagcggtttagcatgtactccatcttttttttatttatcatattttagtaaaaaatgaaactagcggagaacaaatgtttgaggcagtatatttatgtaaattaaatataaagaagattctcttctttatagcgtataaaaataaccttttctaggggttgatttgatgataaagtgatcacgggtagggatggc

SEQ ID NO: 52796 - DNA, 1040 bp, Zea Mays
tccaagaaggttgtcaagaaactttttagagatgatggcacaggagatgacgatgctgctggttccgcagacgttgatgctgagtaacgttgcagtgcttttggacacgagcaccaccagctatggaggcccgcttttgggaactgaggatcgcttttgggaactatcccagttcatctaggttgttgttagaacttcccccctactgtgtagggcgtatggttttatgcttgtaagatatggacagcgctatgctgtgtgcttgactgcaagatatgccttttgttgcttggtcatagctatgctatgcgtgcaatcctgcgaggaccatactcgcgatgtgtaaagcatgcctatatagtctaggcctgaacaaaccagaaacgttgcttcctttggtgcttctactatttctttttgtcgttctgtgctactaccagccatgtatttgtcgttactatgtaaagcatgcctatatagtctatttgttgttctgtgctactgccatccatctattatgtgctactaccagccatctctttatcttatagtacaggaaataaacgccggagcagctcctatgttccgttgaagaacgaagacaatccaattctggatgatgagtgagaaagatactaagttcgttattccgtgagtacgttgatgctccctgcttacggcagtaaggattatgcaaaagtatggctcctttttcccttgattgatgcggggatttgtcaggaactaggcaagaaagtgtgcttcagctatgcagttcagcagcgtgcttcccctagagggaaactccagacgacttattacacataacggtgttggtacttgttcattgcgttttttgtcgtcctactgatgttgcatatggcaacacagatacataatttaatctcactccggatgttgaccagagaaatggttgagacagatctcatcaagcaggttagtaatttcttagattaataaaatgtgtgctgagagaaaaaaagaatatatcattcagagtctgctggttctggttataa

SEQ ID NO: 52797 - DNA, 732 bp, Zea Mays
ctcctcttctgtgcctcttatgtggatctcgaagtacgcagtcgtgctccgcggtgcctgtgcccatagggttaggtgagggttagtcaccggattctaaaatcccacaaatccgcgccctgccttgcctcgatgcgtgctccgcatccgtcccgtcgccactgcttttgcaacagcgccggctcgctgtgcttctgtccttcgccatagcgcccatgccgctgcttttcattttactacatatatggagcaccttcactcgtctcttcctctttccctccgcctggtactcggcgcaagtgcctttctcctcctcgactccgtcgccgtgatctgctacgtagcagaagggcaggcacgcgcagatcctctggctgtcgtcggcctcttctgcagctgttccagggaaacagcatacatgcccagatctatcctccgttgtgccaacagttcagtgcgctgctcgatgagggaaggatatacaacttgaagtatttcttagtcaggaaagctaacagattctacaaaccggtagaaaattgcaacatgatcagctttacaaagtggactacggttgaggttatcctccagatcccccctgcttttctggtttgcacatataacctcactcccatagaccagctccaaccgcgcgtggactacaaggaatatttcactgatgtgctcggtgttgtcagcgtgatctcccaggtttcatcagtacgcacaagg

SEQ ID NO: 52798 - DNA, 3294 bp, Zea Mays
aacaatccgtggtatccagagtcagtctagaccgccatacggaggttgggcgtccgacgcgcgccggcggtgcttccagagcccctgcccccctgccgcgcgtccccctccgacttcacccgtgagtcttcttcctcccggtcatgccccttcttccctgagtaggaggcgacagatcagaatcctcctagctcgtgcggcaccgtgcgaggagcacggttcggctccggtgcccccacgcgtggaaggagcgcgggcgaggtgttggcggctccggcggcgcggtgtgcaaggcgagagcgtctccgggctgaggccaccgaaggtcgagcgcgcaggagggctatctgcttccgcgtgcggagctcttatctcagcacgacccacccctcccgacgggatagagtattgaagtacacaagtgcatatgcagctggatttggagtggtaaagacgggaaccgaagagctggtggattagaggtgtggggagatgtaccgtgggggccttgaccgcttcaagaaggcacagaccttggagcccttctcagtgaagtctgagtcaggcaccaagaaggcacctgcagctgcaggaacagctaaagcactggctccgttgacactgccactggattctaattttgtgccaggtcagaaccaccaaagtcctcaaggcaccatctcaagggtggctgggcaagatggtgatgctccagggcatgttgggacacaggtcggtggagggcagtcgacgtggcaacctccagactgggcgattgagccgcgcccaggggtctactatcttgatgtggtgaaagatggggaggtcattgacaggatcaatctggacaacaggaggcatctattcgggaggcaggttcctgcttgtgacttcgtgttggaccatcagtctgtgtcgcgtcagcatgctgctgttattccacacaggaatggaaggtatgatcatttggcaacaaataatggcaatgtatattccagtgtagaagcaacggtattgtgcaattacaaggaactaaggaagggaacaacatctacagccctggcatacccacattgccaaaaaaaactaaatttgctggctttgcttaatgctcactactaatggtcagcctcatgtatttattgagccaatcaaactcacatcaatttgcgtgcccacctacctgattgccatctgctcaaccaccctaatctcttcagataagattgcatgtttatctatacatgctcattaccattcaacaatttggcaattctgtttccttggaactctggagtcagcagttagcaaggataatcaacaaaaaaacatcatcgagtgattagtcaaagcacaccgaagcagcatcattcccatctcctcactgaattgtccttgtgattctgaacttggagatgaagagggtatctgcagttgaggcggcacaccttgagcagcaccgacgctttctgcctcagctctagtgcaacaaccacttcaccatgacaagtagaggcttcatggtcaacccagtctcaatggcagcaggtgcacactcttttggatccatacgccataccgtccacaacatcgacagcgcctgtcttgtgcatgcctctgaaactctcatcagcaagtggacaacattgggtattgtccacagacaacccttaagagccttcctcccctctggaactgcagacagggcatccaagatgtccaaggccgtctcgatacactctgttgctaactccggcagtaattcccccagctgttgtaccgcacctacactaacaatcatactcctcgctggcctgtgcactgcacaggttgaattcagcacctcgagctttgcgaccacaatctgtatgcctcttgtcccggatgaggcacatgacaccaaacaagaggctctgacccgctaccatctgtttgtctctggccaaaaccccctctcatccataaggactacacacatttgaggtgtggcgacatgggcttggtacagctatggcatagggccctcttgagctcgcggcgccacagggacctatctgcaaatgcagcagcgtctatctctggggcaggcagggtgccagttgggcaaagcaggaaggtagcagggcacacgtaggaaggtgtggtttttctgttgtttattgggaaaaagaaactggtgtggaagggcggacaagctggagaggcattccgaaggggtgtgtggaccatctatgttatcgacttaggatcggttcatggcacctttgttgcgaatgagagattaacaaaagacaacccagttgaacttgaagttggtcagtcacttcgctttgctgcatctaccagaacctatatcctgcgaaagaacgcagctgctctattcccaactcctagccttccatcggatgttagtttgccatctcctccggaccccaatgatgaagatgctgttgtggcatacaatacagtacttaaccgatatggtataagtaaatctgacatattatccagttccaaagattcttcaggaggcgcctctagtgcaaatgatggtaaacatgcagttgaaaggctcttaaagagaggtaaaaagcgcagagtgtcatttagagatcaggttggtggagaacttatccaagtggttgggatttcagatggtgcagatgttgaaactgaaccgggccccataggtgtaaaggaaggcagtcttgttgggaagtatgaatctcttgtacaggttactgtcataccaaagggaaaggagcaagcatcacgaaaagaatgtacctctacctcaccgagtggggtaacagataagctacaagaggtgcttaaaaaagtaaagagcgcaacaagacctggaatctacgatgacctttatggggattctgttccagcaaaagtgggctcatcttgggcatacaaatcagatgatcaacctgttgaggagaagacgcgtggcatgaatttaaacatgaattcagccgatgacagtgacgacttgtttggtgactagtgattcagaattgtcagtggatacaaaaaaatatatattcttcagaattttgtggcagggttgtttcatttgctagatgctttttttttcttagtttatacatgattgtaccctgctgcaaatcaaggtatgttcttttgcctaatgttagcaacctaaggacatgctttcttgtagtgatgctcttggtgagtttaaccttgtttgcccctattttttcttaatcactttggtgattttttacctccgctgtttcctttagccaaccagctgttata

SEQ ID NO: 52799 - DNA, 3908 bp, Zea Mays
aacaatccgtggtatccagagtcagtctagaccgccatacggaggttgggcgtccgacgcgcgccggcggtgcttccagagcccctgcccccctgccgcgcgtccccctccgacttcacccgtgagtcttcttcctcccggtcatgccccttcttccctgagtaggaggcgacagatcagaatcctcctagctcgtgcggcaccgtgcgaggagcacggttcggctccggtgcccccacgcgtggaaggagcgcgggcgaggtgttggcggctccggcggcgcggtgtgcaaggcgagagcgtctccgggctgaggccaccgaaggtcgagcgcgcaggagggctatctgcttccgcgtgcggagctcttatctcagcacgacccacccctcccgacgggatagagtattgaagtacacaagtgcatatgcagctggatttggagtggtaaagacgggaaccgaagagctggtggattagaggtgtggggagatgtaccgtgggggccttgaccgcttcaagaaggcacagaccttggagcccttctcagtgaagtctgagtcaggcaccaagaaggcacctgcagctgcaggaacagctaaagcactggctccgttgacactgccactggattctaattttgtgccaggtcagaaccaccaaagtcctcaaggcaccatctcaagggtggctgggcaagatggtgatgctccagggcatgttgggacacaggtcggtggagggcagtcgacgtggcaacctccagactgggcgattgagccgcgcccaggggtctactatcttgatgtggtgaaagatggggaggtcattgacaggatcaatctggacaacaggaggcatctattcgggaggcaggttcctgcttgtgacttcgtgttggaccatcagtctgtgtcgcgtcagcatgctgctgttattccacacaggaatggaaggttagaatcctcatgtccgatcacttgcaattctattatatgttcttatgtattccatgtttagtaaggcacatttctttggactttatttattccacgaatgtcaaattttatagcatctccgccatctcacaattaacttcttttgtgacttgtgagtaccaacaggccaataaatgtgcctgccttttatagtttgatgtgttcatgcatcataccacgcatgaaaatcaaccttgttatcataggcaaaatcattttcagtggagtaccactgaatgcacacatggaaaatgaaatcgatcttagttgtcaactaggtctttgcccgtgtgtcgcaacaggagataaaaaacaatcaacatgctaagttgctaacatggtggtttgagatcaccaaacactataacacacctaactgtactaattcaagatacattgaaatacatgagtatcatcttacatatcgatatctactcaagcataaatagagaacattcaaatacataattctatgtcaaaggaaatcaagtattcagcaggatcgaggaccaatgttttccttgttaaacaacatatgatgtttcacacccccatatacaaacttctctcaggtatgatcatttggcaacaaataatggcaatgtatattccagtgtagaagcaacggtattgtgcaattacaaggaactaaggaagggaacaacatctacagccctggcatacccacattgccaaaaaaaactaaatttgctggctttgcttaatgctcactactaatggtcagcctcatgtatttattgagccaatcaaactcacatcaatttgcgtgcccacctacctgattgccatctgctcaaccaccctaatctcttcagataagattgcatgtttatctatacatgctcattaccattcaacaatttggcaattctgtttccttggaactctggagtcagcagttagcaaggataatcaacaaaaaaacatcatcgagtgattagtcaaagcacaccgaagcagcatcattcccatctcctcactgaattgtccttgtgattctgaacttggagatgaagagggtatctgcagttgaggcggcacaccttgagcagcaccgacgctttctgcctcagctctagtgcaacaaccacttcaccatgacaagtagaggcttcatggtcaacccagtctcaatggcagcaggtgcacactcttttggatccatacgccataccgtccacaacatcgacagcgcctgtcttgtgcatgcctctgaaactctcatcagcaagtggacaacattgggtattgtccacagacaacccttaagagccttcctcccctctggaactgcagacagggcatccaagatgtccaaggccgtctcgatacactctgttgctaactccggcagtaattcccccagctgttgtaccgcacctacactaacaatcatactcctcgctggcctgtgcactgcacaggttgaattcagcacctcgagctttgcgaccacaatctgtatgcctcttgtcccggatgaggcacatgacaccaaacaagaggctctgacccgctaccatctgtttgtctctggccaaaaccccctctcatccataaggactacacacatttgaggtgtggcgacatgggcttggtacagctatggcatagggccctcttgagctcgcggcgccacagggacctatctgcaaatgcagcagcgtctatctctggggcaggcagggtgccagttgggcaaagcaggaaggtagcagggcacacgtaggaaggtgtggtttttctgttgtttattgggaaaaagaaactggtgtggaagggcggacaagctggagaggcattccgaaggggtgtgtggaccatctatgttatcgacttaggatcggttcatggcacctttgttgcgaatgagagattaacaaaagacaacccagttgaacttgaagttggtcagtcacttcgctttgctgcatctaccagaacctatatcctgcgaaagaacgcagctgctctattcccaactcctagccttccatcggatgttagtttgccatctcctccggaccccaatgatgaagatgctgttgtggcatacaatacagtacttaaccgatatggtataagtaaatctgacatattatccagttccaaagattcttcaggaggcgcctctagtgcaaatgatggtaaacatgcagttgaaaggctcttaaagagaggtaaaaagcgcagagtgtcatttagagatcaggttggtggagaacttatccaagtggttgggatttcagatggtgcagatgttgaaactgaaccgggccccataggtgtaaaggaaggcagtcttgttgggaagtatgaatctcttgtacaggttactgtcataccaaagggaaaggagcaagcatcacgaaaagaatgtacctctacctcaccgagtggggtaacagataagctacaagaggtgcttaaaaaagtaaagagcgcaacaagacctggaatctacgatgacctttatggggattctgttccagcaaaagtgggctcatcttgggcatacaaatcagatgatcaacctgttgaggagaagacgcgtggcatgaatttaaacatgaattcagccgatgacagtgacgacttgtttggtgactagtgattcagaattgtcagtggatacaaaaaaatatatattcttcagaattttgtggcagggttgtttcatttgctagatgctttttttttcttagtttatacatgattgtaccctgctgcaaatcaaggtatgttcttttgcctaatgttagcaacctaaggacatgctttcttgtagtgatgctcttggtgagtttaaccttgtttgcccctattttttcttaatcactttggtgattttttacctccgctgtttcctttagccaaccagctgttata

SEQ ID NO: 52800 - DNA, 2053 bp, Zea Mays
ctcctattttcctatccaacaaatgcgtattgtcgaggccaaggccaaggccaagcaacaatccgtggtatccagagtcagtctagaccgccatacggaggttgggcgtccgacgcgcgccggcggtgcttccagagcccctgcccccctgccgcgcgtccccctccgacttcacccgtgagtcttcttcctcccggtcatgccccttcttccctgagtaggaggcgacagatcagaatcctcctagctcgtgcggcaccgtgcgaggagcacggttcggctccggtgcccccacgcgtggaaggagcgcgggcgaggtgttggcggctccggcggcgcggtgtgcaaggcgagagcgtctccgggctgaggccaccgaaggtcgagcgcgcaggagggctatctgcttccgcgtgcggagctcttatctcagcacgacccacccctcccgacgggatagagctggatttggagtggtaaagacgggaaccgaagagctggtggattagaggtgtggggagatgtaccgtgggggccttgaccgcttcaagaaggcacagaccttggagcccttctcagtgaagtctgagtcaggcaccaagaaggcacctgcagctgcaggaacagctaaagcactggctccgttgacactgccactggattctaattttgtgccaggtcagaaccaccaaagtcctcaaggcaccatctcaagggtggctgggcaagatggtgatgctccagggcatgttgggacacaggtcggtggagggcagtcgacgtggcaacctccagactgggcgattgagccgcgcccaggggtctactatcttgatgtggtgaaagatggggaggtcattgacaggatcaatctggacaacaggaggcatctattcgggaggcaggttcctgcttgtgacttcgtgttggaccatcagtctgtgtcgcgtcagcatgctgctgttattccacacaggaatggaagcatctatgttatcgacttaggatcggttcatggcacctttgttgcgaatgagagattaacaaaagacaacccagttgaacttgaagttggtcagtcacttcgctttgctgcatctaccagaacctatatcctgcgaaagaacgcagctgctctattcccaactcctagccttccatcggatgttagtttgccatctcctccggaccccaatgatgaagatgctgttgtggcatacaatacagtacttaaccgatatggtataagtaaatctgacatattatccagttccaaagattcttcaggaggcgcctctagtgcaaatgatggtaaacatgcagttgaaaggctcttaaagagaggtaaaaagcgcagagtgtcatttagagatcaggttggtggagaacttatccaagtggttgggatttcagatggtgcagatgttgaaactgaaccgggccccataggtgtaaaggaaggcagtcttgttgggaagtatgaatctcttgtacaggttactgtcataccaaagggaaaggagcaagcatcacgaaaagaatgtacctctacctcaccgagtggggtaacagataagctacaagaggtgcttaaaaaagtaaagagcgcaacaagacctggaatctacgatgacctttatggggattctgttccagcaaaagtgggctcatcttgggcatacaaatcagatgatcaacctgttgaggagaagacgcgtggcatgaatttaaacatgaattcagccgatgacagtgacgacttgtttggtgactagtgattcagaattgtcagtggatacaaaaaaatatatattcttcagaattttgtggcagggttgtttcatttgctagatgctttttttttcttagtttatacatgattgtaccctgctgcaaatcaaggtatgttcttttgcctaatgttagcaacctaaggacatgctttcttgtagtgatgctcttggtgagtttaaccttgtttgcccctattttttcttaatcactttggtgattttttacctccgctgtttcctttagccaaccagctgttata

SEQ ID NO: 52801 - DNA, 2015 bp, Zea Mays
cttcctcctattttcctatccaacaaatgcgtattgtcgaggccaaggccaaggccaagcaacaatccgtggtatccagagtcagtctagaccgccatacggaggttgggcgtccgacgcgcgccggcggtgcttccagagcccctgcccccctgccgcgcgtccccctccgacttcacccgtgagtcttcttcctcccggtcatgccccttcttccctgagtaggaggcgacagatcagaatcctcctagctcgtgcggcaccgtgcgaggagcacggttcggctccggtgcccccacgcgtggaaggagcgcgggcgaggtgttggcggctccggcggcgcggtgtgcaaggcgagagcgtctccgggctgaggccaccgaaggtcgagcgcgcaggagggctatctgcttccgcgtgcggagctcttatctcagcacgacccacccctcccgacgggatagagtattgaagtacacaagtgcatatgcagctggatttggagtggtaaagacgggaaccgaagagctggtggattagaggtgtggggagatgtaccgtgggggccttgaccgcttcaagaaggcacagaccttggagcccttctcagtgaagtctgagtcaggcaccaagaaggcacctgcagctgcaggaacagctaaagcactggctccgttgacactgccactggattctaattttgtgccaggtcagaaccaccaaagtcctcaaggcaccatctcaagggtggctgggcaagatggtgatgctccagggcatgttgggacacaggtcggtggagggcagtcgacgtggcaacctccagactgggcgattgagccgcgcccaggggtctactatcttgatgtggtgaaagatggggaggtcattgacaggatcaatctggacaacaggaggcatctattcgggaggcaggttcctgcttgtgacttcgtgttggaccatcagtctgtgtcgcgtcagcatgctgctgttattccacacaggaatggaagcatctatgttatcgacttaggatcggttcatggcacctttgttgcgaatgagagattaacaaaagacaacccagttgaacttgaagttggtcagtcacttcgctttgctgcatctaccagaacctatatcctgcgaaagaacgcagctgctctattcccaactcctagccttccatcggatgttagtttgccatctcctccggaccccaatgatgaagatgctgttgtggcatacaatacagtacttaaccgatatggtataagtaaatctgacatattatccagttccaaagattcttcaggaggcgcctctagtgcaaatgatggtaaacatgcagttgaaaggctcttaaagagagatggtgcagatgttgaaactgaaccgggccccataggtgtaaaggaaggcagtcttgttgggaagtatgaatctcttgtacaggttactgtcataccaaagggaaaggagcaagcatcacgaaaagaatgtacctctacctcaccgagtggggtaacagataagctacaagaggtgcttaaaaaagtaaagagcgcaacaagacctggaatctacgatgacctttatggggattctgttccagcaaaagtgggctcatcttgggcatacaaatcagatgatcaacctgttgaggagaagacgcgtggcatgaatttaaacatgaattcagccgatgacagtgacgacttgtttggtgactagtgattcagaattgtcagtggatacaaaaaaatatatattcttcagaattttgtggcagggttgtttcatttgctagatgctttttttttcttagtttatacatgattgtaccctgctgcaaatcaaggtatgttcttttgcctaatgttagcaacctaaggacatgctttcttgtagtgatgctcttggtgagtttaaccttgtttgcccctattttttcttaatcactttggtgattttttacctccgctgtttcctttagccaaccagctgttata

SEQ ID NO: 52802 - DNA, 980 bp, Zea Mays
tctggagctgtaatgcattttgtttaattgactatatgattggaaatgggcagcatcccgaagtttttcatttggtacaaaattttaatttggaggacaagtatcctccattttctcttctgaagggatacattcagaaggccaagcagacttttgtggagatgtttaaaaagagtcaaacacacgagtccttggaattatatggctgcatggcgccctgggtagcacgaacactggacatccaggccacattatgctgtagacagaaatttgaggccgctattcttctgttgacagatttttttaggaactgggctataccaaaggaactatggattgcacattatctagctgagcagaaactcactgattctaagcaacgcagtgctatcatggcagaaattaaatatttgatgagtggatatgaaaagaaacaaaggtcagaaaatctctcaacatgggcttcacagcatccgccaacggaatctaaaaggaggaacaggaagcgcaaggaggaggagcaggagcaccatgaagcacaatacaaccagcagcagcaggaacagaatgaaaacaagttaattcaaggaaagcggcatcagctgcatcaagaaaatatggcgcaagtgacacagcagcagcagcagcatatgcaaccgacaacaaggccagctactcttaagcttccgacgcctgctattcctctggttctgaatgcagctcagatccaaaactttgcgcgtccagcttacgccgctgtgcctggagttcacaattaccctgcccagccaggttggtctgcagctcaaggaagtccattcgtaccacagttcatgtcaccgcagtatatgggcctgccatttaatccctttggccttcatcctacttgctatcccagacgcagatagcgtagagagttctggcgttccgcgtccatttgctgagtgaaactgtggtgaagcgtacaagttatatgaaac

SEQ ID NO: 52803 - DNA, 873 bp, Zea Mays
cggattgtctggagctgtaatgcattttgtttaattgactatatgattggaaatgggcagcatcccgaagtttttcatttggtacaaaattttaatttggaggacaagtatcctccattttctcttctgaagggatacattcagaaggccaagcagacttttgtggagatgtttaaaaagagtcaaacacacgagtccttgaactgggctataccaaaggaactatggattgcacattatctagctgagcagaaactcactgattctaagcaacgcagtgctatcatggcagaaattaaatatttgatgagtggatatgaaaagaaacaaaggtcagaaaatctctcaacatgggcttcacagcatccgccaacggaatctaaaaggaggaacaggaagcgcaaggaggaggagcaggagcaccatgaagcacaatacaaccagcagcagcaggaacagaatgaaaacaagttaattcaaggaaagcggcatcagctgcatcaagaaaatatggcgcaagtgacacagcagcagcagcagcatatgcaaccgacaacaaggccagctactcttaagcttccgacgcctgctattcctctggttctgaatgcagctcagatccaaaactttgcgcgtccagcttacgccgctgtgcctggagttcacaattaccctgcccagccaggttggtctgcagctcaaggaagtccattcgtaccacagttcatgtcaccgcagtatatgggcctgccatttaatccctttggccttcatcctacttgctatcccagacgcagatagcgtagagagttctggcgttccgcgtccatttgctgagtgaaactgtggtgaagcgtacaagttatatgaaac

SEQ ID NO: 52804 - DNA, 2231 bp, Zea Mays
tatataaatcttttcagagaagactcgaatacagaggatgaatttagaattgatggagatagttttagggagacaaaaggaggacaaaggccttcgatgctgtaaattgtaaatttactcgctcccgtgaccgacgtttctgacccagcccatggggacggcggcgccggcgatgatgccgacggaggaccttgaggcagccatcgccgagctccctgccaagaagggcgtcctgcgcgaggccttccacaccctcgccgcctgctcgccctacccgctccccttcacctgggaggacctcgatgcccacgtgtcctccgtccaatcctccatctcgcgccggttcagccagctgcgggcgctcgaggctgcgggcacagcacgcagtagtaagaataaggaagaggataacgaggtggaagaagaggatgaggtggtggaggaagaggaagaagaagaggaagtggaagaggagatggtggaggaagatgaagaggaagaggaggaggaagatgaggaagagggggaggaagaacaggaggaggaagaggaagaggaggtggtggaggaagagggggaggaggaagagggggaagaagaacaggaggaggaagaggccgacgacgagattgacaatcaaaaggaggaagatagagagggcggcgaggataacaagcgggatgctgacgaagagacgctgactaccaaggtctctgcagggcaaggcaaagagactgaaggtgaggaggagcttgatgggtatgcacagggggatggagaggagcagggtactgaagaggaggagatggtcgaagagacgactaagaaacagcttagagggcttcctgcagatgggagaaaggaatttgtagaggcatgcaagagaatggatgcagagacgctggtcgagttcgtgatctgtttcagcatctctagtaagaagttgctgtccgcaatgcaccatgccccagatccggcggcacttgtccttcaagtggtcaagctactcgtatccaacaagaacttcagacacaacagagcaggccaagctggtggcgaaggattggaagaaaatgattgacaacacagtgtgttgtagggaacttgacacgctgtctaggggtcttctccaatttcttatcgcatataacattgtatctgaattcaatatccatgatatcatcagtatatttgctatggttcgcaaaggttacaagaataacaacattgccaagctttgcgaggatcttgggcttgcagacagggccacaggtttaattgactatatgattggaaatgggcagcatcccgaagtttttcatttggtacaaaattttaatttggaggacaagtatcctccattttctcttctgaagggatacattcagaaggccaagcagacttttgtggagatgtttaaaaagagtcaaacacacgagtccttggaattatatggctgcatggcgccctgggtagcacgaacactggacatccaggccacattatgctgtagacagaaatttgaggccgctattcttctgttgacagatttttttaggaactgggctataccaaaggaactatggattgcacattatctagctgagcagaaactcactgattctaagcaacgcagtgctatcatggcagaaattaaatatttgatgagtggatatgaaaagaaacaaaggtcagaaaatctctcaacatgggcttcacagcatccgccaacggaatctaaaaggaggaacaggaagcgcaaggaggaggagcaggagcaccatgaagcacaatacaaccagcagcagcaggaacagaatgaaaacaagttaattcaaggaaagcggcatcagctgcatcaagaaaatatggcgcaagtgacacagcagcagcagcagcatatgcaaccgacaacaaggccagctactcttaagcttccgacgcctgctattcctctggttctgaatgcagctcagatccaaaactttgcgcgtccagcttacgccgctgtgcctggagttcacaattaccctgcccagccaggttggtctgcagctcaaggaagtccattcgtaccacagttcatgtcaccgcagtatatgggcctgccatttaatccctttggccttcatcctacttgctatcccagacgcagatagcgtagagagttctggcgttccgcgtccatttgctgagtgaaactgtggtgaagcgtacaagttatatgaaac

SEQ ID NO: 52805 - DNA, 2278 bp, Zea Mays
tatataaatcttttcagagaagactcgaatacagaggatgaatttagaattgatggagatagttttagggagacaaaaggaggacaaaggccttcgatgctgtaaattgtaaatttactcgctcccgtgaccgacgtttctgacccagcccatggggacggcggcgccggcgatgatgccgacggaggaccttgaggcagccatcgccgagctccctgccaagaagggcgtcctgcgcgaggccttccacaccctcgccgcctgctcgccctacccgctccccttcacctgggaggacctcgatgcccacgtgtcctccgtccaatcctccatctcgcgccggttcagccagctgcgggcgctcgaggctgcgggcacagcacgcagtagtaagaataaggaagaggataacgaggtggaagaagaggatgaggtggtggaggaagaggaagaagaagaggaagtggaagaggagatggtggaggaagatgaagaggaagaggaggaggaagatgaggaagagggggaggaagaacaggaggaggaagaggaagaggaggtggtggaggaagagggggaggaggaagagggggaagaagaacaggaggaggaagaggccgacgacgagattgacaatcaaaaggaggaagatagagagggcggcgaggataacaagcgggatgctgacgaagagacgctgactaccaaggtctctgcagggcaaggcaaagagactgaaggtgaggaggagcttgatgggtatgcacagggggatggagaggagcagggtactgaagaggaggagatggtcgaagagacgactaagaaacagcttagagggcttcctgcagatgggagaaaggaatttgtagaggcatgcaagagaatggatgcagagacgctggtcgagttcgtgatctgtttcagcatctctagtaagaagttgctgtccgcaatgcaccatgccccagatccggcggcacttgtccttcaagtggtcaagctactcgtatccaacaagaacttcagacacaacagagcaggccaagctggtggcgaaggattggaagaaaatgattgacaacacagtgtgttgtagggaacttgacacgctgtctaggggtcttctccaatttcttatcgcatataacattgtatctgaattcaatatccatgatatcatcagtatatttgctatggttcgcaaaggttacaagaataacaacattgccaagctttgcgaggatcttgggcttgcagacagggccacaggtttaattgactatatgattggaaatgggcagcatcccgaagtttttcatttggtacaaaattttaatttggaggacaagtatcctccattttctcttctgaagggatacattcagaaggccaagcagacttttgtggagatgtttaaaaagagtcaaacacacgagtccttggaattatatggctgcatggcgccctgggtagcacgaacactggacatccaggccacattatgctgtagacagaaatttgaggccgctattcttctgttgacagatttttttagggtgggaatgcatacctcttccaggatgctgaggtcattctttcccataactgggctataccaaaggaactatggattgcacattatctagctgagcagaaactcactgattctaagcaacgcagtgctatcatggcagaaattaaatatttgatgagtggatatgaaaagaaacaaaggtcagaaaatctctcaacatgggcttcacagcatccgccaacggaatctaaaaggaggaacaggaagcgcaaggaggaggagcaggagcaccatgaagcacaatacaaccagcagcagcaggaacagaatgaaaacaagttaattcaaggaaagcggcatcagctgcatcaagaaaatatggcgcaagtgacacagcagcagcagcagcatatgcaaccgacaacaaggccagctactcttaagcttccgacgcctgctattcctctggttctgaatgcagctcagatccaaaactttgcgcgtccagcttacgccgctgtgcctggagttcacaattaccctgcccagccaggttggtctgcagctcaaggaagtccattcgtaccacagttcatgtcaccgcagtatatgggcctgccatttaatccctttggccttcatcctacttgctatcccagacgcagatagcgtagagagttctggcgttccgcgtccatttgctgagtgaaactgtggtgaagcgtacaagttatatgaaac

SEQ ID NO: 52806 - DNA, 1901 bp, Zea Mays
tatataaatcttttcagagaagactcgaatacagaggatgaatttagaattgatggagatagttttagggagacaaaaggaggacaaaggccttcgatgctgtaaattgtaaatttactcgctcccgtgaccgacgtttctgacccagcccatggggacggcggcgccggcgatgatgccgacggaggaccttgaggcagccatcgccgagctccctgccaagaagggcgtcctgcgcgaggccttccacaccctcgccgcctgctcgccctacccgctccccttcacctgggaggacctcgatgcccacgtgtcctccgtccaatcctccatctcgcgccggttcagccagctgcgggcgctcgaggctgcgggcacagcacgcagtagtaagaataaggaagaggataacgaggtggaagaagaggatgaggtgggggaagaagaacaggaggaggaagaggccgacgacgagattgacaatcaaaaggaggaagatagagagggcggcgaggataacaagcgggatgctgacgaagagacgctgactaccaaggtctctgcagggcaaggcaaagagactgaaggtgaggaggagcttgatgggtatgcacagggggatggagaggagcagggtactgaagaggaggagatggtcgaagagacgactaagaaacagcttagagggcttcctgcagatgggagaaaggaatttgtagaggcatgcaagagaatggatgcagagacgctggtcgagttcgtgatctgtttcagcatctctagtaagaagttgctgtccgcaatgcaccatgccccagatccggcggcacttgtccttcaagtggtcaagctactcgtatccaacaagaacttcagacacaacagagcaggccaagctggtggcgaaggattggaagaaaatgattgacaacacagtgtgttgtagggaacttgacacgctgtctaggggtcttctccaatttcttatcgcatataacattgtatctgaattcaatatccatgatatcatcagtatatttgctatggttcgcaaaggttacaagaataacaacattgccaagctttgcgaggatcttgggcttgcagacagggccacaggtttaattgactatatgattggaaatgggcagcatcccgaagtttttcatttggtacaaaattttaatttggaggacaagtatcctccattttctcttctgaagggatacattcagaaggccaagcagacttttgtggagatgtttaaaaagagtcaaacacacgagtccttgaactgggctataccaaaggaactatggattgcacattatctagctgagcagaaactcactgattctaagcaacgcagtgctatcatggcagaaattaaatatttgatgagtggatatgaaaagaaacaaaggaagcgcaaggaggaggagcaggagcaccatgaagcacaatacaaccagcagcagcaggaacagaatgaaaacaagttaattcaaggaaagcggcatcagctgcatcaagaaaatatggcgcaagtgacacagcagcagcagcagcatatgcaaccgacaacaaggccagctactcttaagcttccgacgcctgctattcctctggttctgaatgcagctcagatccaaaactttgcgcgtccagcttacgccgctgtgcctggagttcacaattaccctgcccagccaggttggtctgcagctcaaggaagtccattcgtaccacagttcatgtcaccgcagtatatgggcctgccatttaatccctttggccttcatcctacttgctatcccagacgcagatagcgtagagagttctggcgttccgcgtccatttgctgagtgaaactgtggtgaagcgtacaagttatatgaaac

SEQ ID NO: 52807 - DNA, 1140 bp, Zea Mays
gcgagtggcggggagaggaggcggcggcggcaagggcgcgacgggggaggatgatgtcgctgcagcctgcaggagttgtgttctctggccttgagagaaaggagtcgccaattttagtgggctcctgttgtgtttttcggtccattcctcccaaggcccagcatctgccagtcgcatgccgtgacgcacaaaacccacggcggcacggctccattccgcgtccgcactctctatataaagtgtccctctcttccctccaagccctagacgcaccccttcctcgtttcgccgcctccgccgacaccgactgcctacctcagctgccgtcgccatgggcagaaggcctgctagatgctatcgccagatcaagaacaagccgtaccctaagtccaggtactgccgtggtgtccctgaccccaagatcaggatctacgatgtcgggatgaagaggaagggtgttgatgagttcccctactgtgtgcaccttgtctcttgggagaaggagaatgtctccagtgaggcgctcgaggctgcccgcattgcctgcaacaagtacatgaccaagtctgcaggaaaggatgccttccaccttagggtccgggttcacccgttccatgtcctccgtatcaacaagatgctttcctgtgccggggctgataggctccagactggaatgaggggtgcctttggcaagcctcagggcacctgtgctagggtggacattggtcaggtcctcctttccgtgcgatgcaaggacaacaatgctgcccatgccagcgaagctctgcgtcgcgctaagttcaagttccctggccgccaaaagatcattgagagcagaaagtggggcttcaccaagttcagccgcgctgactacctgaagtacaagagcgagggcagaattgttcctgatggtgtcaacgcaaagctgctcggcaaccacggcagacttgagaagcgtgctcctgggaaggctttcctcgatgccgttgcttaacagcgtgaaactggacttcagagagaatattgggacgagagtgcgcggcggagttgtacattttttttgtttttcttctaaaataggatttaggattaggtgttttggatttgttggagttgctctcaggtttaattatttttaat

SEQ ID NO: 52808 - DNA, 1327 bp, Zea Mays
gcgagtggcggggagaggaggcggcggcggcaagggcgcgacgggggaggatgatgtcgctgcagcctgcaggagttgtgttctctggccttgagagaaaggagtcgccaattttagtgggctcctgttgtgtttttcggtccattcctcccaaggcccagcatctgccagtcgcatgccgtgacgcacaaaacccacggcggcacggctccattccgcgtccgcactctctatataaagtgtccctctcttccctccaagccctagacgcaccccttcctcgtttcgccgcctccgccgacaccgactgcctacctcagctgccgtcgccatgggcagaaggcctgctagatgctatcgccagatcaagaacaagccgtaccctaagtccaggtactgccgtggtgtccctgaccccaagatcaggatctacgatgtcgggatgaagaggaagggtgttgatgagttcccctactgtgtgcaccttgtctcttgggagaaggagaatgtctccagtgaggcgctcgaggctgcccgcattgcctgcaacaagtacatgaccaagtctgcaggaaaggatgccttccaccttagggtccgggttcacccgttccatgtcctccgtatcaacaagatgctttcctgtgccggggctgataggctccagactggaatgaggggtgcctttggcaagcctcagggcacctgtgctagggtggacattggtcaggtcctcctttccgtgcgatgcaaggacaacaatgctgcccatgccagcgaagctctgcgtcgcgctaagttcaagttccctggccgccaaaagatcattgagagcagaaagtggggcttcaccaagttcagccgcgctgactacctgaagtacaagagcgagggcagaattgttcctgatggtgtcaacgcaaagctgctcggcaaccacggcagacttgagaagcgtgctcctgggaaggctttcctcgatgccgttgcttaagtgcggatgcgaatcctgacgttttgctttagcgtatcttactttgcttcgtggaacatgaatttcaagtgttttgagggtattacagtgccttatgtgaacttgcctatcttgtgctgaacatcggaataatacgtatttgtgtgccatcgcctttccggagctcaccaaacagtcgttcctgcagcagcgtgaaactggacttcagagagaatattgggacgagagtgcgcggcggagttgtacattttttttgtttttcttctaaaataggatttaggattaggtgttttggatttgttggagttgctctcaggtttaattatttttaat

SEQ ID NO: 52809 - DNA, 1182 bp, Zea Mays
ttcatttgcagcccatgccggcccagctcagcggattacgagaacccgccgccgctccgccccataggtaggttttgtttgggatctcaccgtttcttcctcgtctccgtctctacacggcggcgccgccgccgccagctgctgccaggagccaagcccaagcctgagcttaaaccatgccgattggttctcttttcgtgtcgaggctggccaggtctagccatgccctccccgctgccgccgccgcggccatctctcaggcgcccaggccccagcacatcgcatctcctatattctccggccttggagcagcggctcgtgatttcagctcaagggctctatggaagggagcattcgtcgatgccttcctggctagaataaagaagaacagagaaaacatgaatgggaagaagatttggtctcgtaggtcttctattttgccggaatttgttggttccactgtgctcatttacaatgggaaaagtcatgtccggtgcaagatcactgaagggaaggttggccataaatttggagagtttgcttttacacggagacgaaggccccatcgaacaataacaggaaagggaaatcaaggaaagggcagaaagtaaaagtagaaatgtgcatgaaaggtgggtttaaggacagcttgatgacggcgtagctgacgaacaagcacttgaatcaccagaattcatgatctggactgttttttcttagaccaataaccgcaggaaaatccgacgcctgtgttcaagaccacactcgcatctaggaaggagcatggtacaagcctcacgtcttctttacagatgttgaacaacgtcaagcatccacttaattcaacaattggttggaaccagaagccactcattacaacaggtctggaaattggaaccaacggctagaggaactttgtgccaacagcccaccagaggaattttggttgacatggagtagctatgaactgtagaaaagttattatggatcgcggcctgtgaaaatgtataagttgtttgaatatctattcccatatatgtatttctgaatatctaggtgagttttcccgttacgagtctaggcacttatgtaccaatgcaatccttgggcaaccgggcccacgcaacagacactggacataaacacgtaaaaggtacaattacgctttctctacattggtta

SEQ ID NO: 52810 - DNA, 1303 bp, Zea Mays
ttcatttgcagcccatgccggcccagctcagcggattacgagaacccgccgccgctccgccccataggtaggttttgtttgggatctcaccgtttcttcctcgtctccgtctctacacggcggcgccgccgccgccagctgctgccaggagccaagcccaagcctgagcttaaaccatgccgattggttctcttttcgtgtcgaggctggccaggtctagccatgccctccccgctgccgccgccgcggccatctctcaggcgcccaggccccagcacatcgcatctcctatattctccggccttggagcagcggctcgtgatttcagctcaagggctctatggaagggagcattcgtcgatgccttcctggctagaataaagaagaacagagaaaacatgaatgggaagaagatttggtctcgtaggtcttctattttgccggaatttgttggttccactgtgctcatttacaatgggaaaagtcatgtccggtgcaagatcactgaagggaaggttggccataaatttggagagtttgcttttacacggagacgaaggccccatcgaacaataacaggaaagggaaatcaaggaaagggcagaaagtaaaagtagaaatgtgcatgaaaggtgaggtgggtttaaggacagcttgatgacggcgtagctgacgaacaagcacttgaatcaccagaattcatgatctggactgttttttcttagaccaataaccgcaggaaaatgttagctcatcttacttagggccgacgcctgtgttcaagaccacactcgcatctaggaaggagcatggtacaagcctcacgtcttctttacagatgtgtatgtactacttggattcctttacagtggaaccccagtttaataattatttgtgaaagattacactttatgatccaactggattcgaatagcagtgaacaacgtcaagcatccacttaattcaacaattggttggaaccagaagccactcattacaacaggtctggaaattggaaccaacggctagaggaactttgtgccaacagcccaccagaggaattttggttgacatggagtagctatgaactgtagaaaagttattatggatcgcggcctgtgaaaatgtataagttgtttgaatatctattcccatatatgtatttctgaatatctaggtgagttttcccgttacgagtctaggcacttatgtaccaatgcaatccttgggcaaccgggcccacgcaacagacactggacataaacacgtaaaaggtacaattacgctttctctacattggtta

SEQ ID NO: 52811 - DNA, 1169 bp, Zea Mays
ttcatttgcagcccatgccggcccagctcagcggattacgagaacccgccgccgctccgccccataggtaggttttgtttgggatctcaccgtttcttcctcgtctccgtctctacacggcggcgccgccgccgccagctgctgccaggagccaagcccaagcctgagcttaaaccatgccgattggttctcttttcgtgtcgaggctggccaggtctagccatgccctccccgctgccgccgccgcggccatctctcaggcgcccaggccccagcacatcgcatctcctatattctccggccttggagcagcggctcgtgatttcagctcaagggctctatggaagggagcattcgtcgatgccttcctggctagaataaagaagaacagagaaaacatgaatgggaagaagatttggtctcgtaggtcttctattttgccggaatttgttggttccactgtgctcatttacaatgggaaaagtcatgtccggtgcaagatcactgaagggaaggttggccataaatttggagagtttgcttttacacggagacgaaggccccatcgaacaataacaggaaagggaaatcaaggaaagggcagaaagtaaaagtagaaatgtgcatgaaagccgacgcctgtgttcaagaccacactcgcatctaggaaggagcatggtacaagcctcacgtcttctttacagatgtgtatgtactacttggattcctttacagtggaaccccagtttaataattatttgtgaaagattacactttatgatccaactggattcgaatagcagtgaacaacgtcaagcatccacttaattcaacaattggttggaaccagaagccactcattacaacaggtctggaaattggaaccaacggctagaggaactttgtgccaacagcccaccagaggaattttggttgacatggagtagctatgaactgtagaaaagttattatggatcgcggcctgtgaaaatgtataagttgtttgaatatctattcccatatatgtatttctgaatatctaggtgagttttcccgttacgagtctaggcacttatgtaccaatgcaatccttgggcaaccgggcccacgcaacagacactggacataaacacgtaaaaggtacaattacgctttctctacattggtta

SEQ ID NO: 52812 - DNA, 1326 bp, Zea Mays
ctttcttcatttgcagcccatgccggcccagctcagcggattacgagaacccgccgccgctccgccccataggtaggttttgtttgggatctcaccgtttcttcctcgtctccgtctctacacggcggcgccgccgccgccagctgctgccaggagccaagcccaagcctgagcttaaaccatgccgattggttctcttttcgtgtcgaggctggccaggtctagccatgccctccccgctgccgccgccgcggccatctctcaggcgcccaggccccagcacatcgcatctcctatattctccggccttggagcagcggctcgtgatttcaggtaaatatacctagtagtttcagctcaagggctctatggaagggagcattcgtcgatgccttcctggctagaataaagaagaacagagaaaacatgaatgggaagaagatttggtctcgtaggtcttctattttgccggaatttgttggttccactgtgctcatttacaatgggaaaagtcatgtccggtgcaagatcactgaagggaaggttggccataaatttggagagtttgcttttacacggagacgaaggccccatcgaacaataacaggaaagggaaatcaaggaaagggcagaaagtaaaagtagaaatgtgcatgaaaggtgggtttaaggacagcttgatgacggcgtagctgacgaacaagcacttgaatcaccagaattcatgatctggactgttttttcttagaccaataaccgcaggaaaatgttagctcatcttacttagggccgacgcctgtgttcaagaccacactcgcatctaggaaggagcatggtacaagcctcacgtcttctttacagatgtgtatgtactacttggattcctttacagtggaaccccagtttaataattatttgtgaaagattacactttatgatccaactggattcgaatagcagtgaacaacgtcaagcatccacttaattcaacaattggttggaaccagaagccactcattacaacaggtctggaaattggaaccaacggctagaggaactttgtgccaacagcccaccagaggaattttggttgacatggagtagctatgaactgtagaaaagttattatggatcgcggcctgtgaaaatgtataagttgtttgaatatctattcccatatatgtatttctgaatatctaggtgagttttcccgttacgagtctaggcacttatgtaccaatgcaatccttgggcaaccgggcccacgcaacagacactggacataaacacgtaaaaggtacaattacgctttctctacattggtta

SEQ ID NO: 52813 - DNA, 1237 bp, Zea Mays
cgaaataccctaaaccctgggctccatttctttcttcatttgcagcccatgccggcccagctcagcggattacgagaacccgccgccgctccgccccataggtaggttttgtttgggatctcaccgtttcttcctcgtctccgtctctacacggcggcgccgccgccgccagctgctgccaggagccaagcccaagcctgagcttaaaccatgccgattggttctcttttcgtgtcgaggctggccaggtctagccatgccctccccgctgccgccgccgcggccatctctcaggcgcccaggccccagcacatcgcatctcctatattctccggccttggagcagcggctcgtgatttcagctcaagggctctatggaagggagcattcgtcgatgccttcctggctagaataaagaagaacagagaaaacatgaatgggaagaagatttggtctcgtaggtcttctattttgccggaatttgttggttccactgtgctcatttacaatgggaaaagtcatgtccggtgcaagatcactgaagggaaggttggccataaatttggagagtttgcttttacacggagacgaaggccccatcgaacaataacaggaaagggaaatcaaggaaagggcagaaagtaaaagtagaaatgtgcatgaaaggtgggtttaaggacagcttgatgacggcgtagctgacgaacaagcacttgaatcaccagaattcatgatctggactgttttttcttagaccaataaccgcaggaaaatgttagctcatcttacttagggccgacgcctgtgttcaagaccacactcgcatctaggaaggagcatggtacaagcctcacgtcttctttacagatgttgaacaacgtcaagcatccacttaattcaacaattggttggaaccagaagccactcattacaacaggtctggaaattggaaccaacggctagaggaactttgtgccaacagcccaccagaggaattttggttgacatggagtagctatgaactgtagaaaagttattatggatcgcggcctgtgaaaatgtataagttgtttgaatatctattcccatatatgtatttctgaatatctaggtgagttttcccgttacgagtctaggcacttatgtaccaatgcaatccttgggcaaccgggcccacgcaacagacactggacataaacacgtaaaaggtacaattacgctttctctacattggtta

SEQ ID NO: 52814 - DNA, 936 bp, Zea Mays
ttcatttgcagcccatgccggcccagctcagcggattacgagaacccgccgccgctccgccccataggtaggttttgtttgggatctcaccgtttcttcctcgtctccgtctctacacggcggcgccgccgccgccagctgctgccaggagccaagcccaagcctgagcttaaaccatgccgattggttctcttttcgtgtcgaggctggccaggtctagccatgccctccccgctgccgccgccgcggccatctctcaggcgcccaggccccagcacatcgcatctcctatattctccggccttggagcagcggctcgtgatttcagctcaagggctctatggaagggagcattcgtcgatgccttcctggctagaataaagaagaacagagaaaacatgaatgggaagaagatttggtctcgtaggtcttctattttgccggaatttgttggttccactgtgctcatttacaatgggaaaagtcatgtccggtgcaagatcactgaagggaaggttggccataaatttggagagtttgcttttacacggagacgaaggccccatcgaacaataacaggaaagggaaatcaaggaaagggcagaaagtaaaagtagaaatgtgcatgaaaggtgggtttaaggacagcttgatgacggcgtagctgacgaacaagcacttgaatcaccagaattcatgatctggactgttttttcttagaccaataaccgcaggaaaatgttagctcatcttacttagggggagactatgaaggagatcaggttgacaggcaatcccaacgcagcaggtgtcctggccgcagtggctggcgggacgcggagggcttggctgagttaggattcgttatgtgagagcaactatacaattgtggttatttgccgtactggttaattttattttatttttaccagtttt

SEQ ID NO: 52815 - DNA, 715 bp, Zea Mays
ttcatttgcagcccatgccggcccagctcagcggattacgagaacccgccgccgctccgccccataggtaggttttgtttgggatctcaccgtttcttcctcgtctccgtctctacacggcggcgccgccgccgccagctgctgccaggagccaagcccaagcctgagcttaaaccatgccgattggttctcttttcgtgtcgaggctggccaggtctagccatgccctccccgctgccgccgccgcggccatctctcaggcgcccaggccccagcacatcgcatctcctatattctccggccttggagcagcggctcgtgatttcagctcaagggctctatggaagggagcattcgtcgatgccttcctggctagaataaagaagaacagagaaaacatgaatgggaagaagatttggtctcgtaggtcttctattttgccggaatttgttggttccactgtgctcatttacaatgggaaaagtcatgtccggtgcaagatcactgaagggaaggttggccataaatttggagagtttgcttttacacggagacgaaggccccatcgaacaataacaggaaagggaaatcaaggaaagggcagaaagtaaaagtagaaatgtgcatgaaaggaaaaacattcttctggtgctaatttgggctctggcacaataatctgggttgtttgtatttagctttaggcctaactggtgag

SEQ ID NO: 52816 - DNA, 3192 bp, Zea Mays
ccagtcgttgccgcttggccgcctgctcagtgctcaccacacacgtccaaccgcacccagacacccatccttatatacgcgcgcagcttaacgtacgcggtgacgccgccagcagctcgctctcgcaccgaccgtcccagaaatatctcgtcggcggtcagttgagctgcgagcaaccatcaaccaatcaaggacgacgacgcacggatcgatggccacgctctcctcctgcagccgcctgagtagcggcaccggcgccgcggctatccgccggcagccgaagccgacccgtgcaggagtcctgttcaccagccggcggggctcctccgcgagcgttcgcacggccgccgccgctgccactgcggcgccggccgccgtagagcagcagaacacgggggtgtcggtgtcgctgccgacgtgggcggagttcgagctcgggcgggcgccggtgtactggaagaccagcaacggcctgccgtcctccccgggcgaggggctgaccctgttctacaacccggcggcgagcaagatggccccgaacgacgtgttcggcgtggcgttcaacggcggcttcaaccagcccatcatgtgcggcggcgagccgaggcagatgacgctgcaggtccgcgggaaagccgacccgcccatctacaccatcaggatacgcgtgccgcagcacgccacaagcttgatcttctccttcaccaacggggccgagtgggacgggccgtacaccctcaagttcagggtcccgaagccatggcagaagaagccgctgagcttcttcaacgagggcctggcggacgagctcaacagggagggcgcctgcgacctggccatctacccggacgagaacatcgccatcaccagctgcgccatggacggctacctcgacgaggggggggatcggtgcaagctggatatcgtgagcgggtgcacggaccccagctccgacatgttcgacccgctggccaccgtcgacgacggctcctgcccactcgagtctgattccgaggaatgaaggagcttcagttcgatccttttttttgtggggggcaaggaaacgtggtccatacatcttatcagtgcaagtttgtgatcatgtgatacatgaagcatatacgtgtacgtatttcaccagactacctgcaccggtgagcaagatgatctcctacttgcaccaccattagagcagtggatatgatctcatacttgcgcgttgcactagtagagttgtggatacttaggatccatcattgcaaactctgatacaaaccagtgtaagctgagctgcatggattgcagatctgtatacctacggctcatgcagctataccgtcctggattgtaccacacaatcaatattatcaaatgtaagatacgacttggagggaagcttataaagacttccccgtgaatggaagagcaatcggttcatgaatcatcggagcacagctctcaaccattggcataaacaacactgatcacatccagtgtcagatattaggcacacaaagcacgcatttggctacgctgcaactgcatgtctgaaactgaaacaaacaaaaacaagcatagcgcaaccaacaaccatgctagcattacggttccagagttcaaggcaaccacagacgttaagttaacatagcatcatttcgtcttggttcattcgctacagtatccactcatagtggcaacgaagacttgtaactacaggaaagacccactgcaccacataccctttccatgccaagtagatccgcgtcttcagtctccaccaacctggcgtttccaggagtcctccacaatgagctcgtctactccccagtcttcatagctgttttaaaacaaagtaattaaagatgactacattgtaaaagtattcataaaaaagaagtatgtgcttttccatggaatctcaccttccatcaggtaagtaccgtctgatcgtgaagggtatcttgcgcgctctcagctccttcattgcaatctaaaattggtcagtttcaccctcaagctcaaccatgactggagcattcatgctgcaaaaagactaaggttagtattaggttggaagataggttttttacatgttcaacactcaaaattattaaccttatctgcaaggctcgtgtacccaggatgcgcgcacgttcgtacttcgtcatgtattttgttgttttgcgttcacgcttggtcttttcctgttccttatcttcaccctcaccacctatgacgtcatcaggggcatcttcgttgttctcaggctcttcttcagctccttcctgttcaacagaggtacattggttgtattggccatataatatcttcctataaagcatagaagttgaataaaagtataaaacaatagtaatgtgcctgcacctcaatctccggttctgggggctcatcctcatacctgtataacaaaaagaacaataagattgtaaatccaatgatacaaccatgtgaaacttagtgtataagtaaaaagtgacatttgagtgatcagaagaaccacaaagaagtggtggtcaccgttttttgtctaccaacataaataccccttagtttctctaatgtaaatatttacatgaaacaccaagctaagtgattaaagccacctgacaagaatttgatccaataatttatcacatagttctaaccaaccaacttaccctatattattgccacagttcgaaggaaggtgacaaatatatacaagtggcactcttaaattcctaaaatagatgacgaacaaaaggtgcaggtatctcccttcactggaggggagatgtccgataccaaggagaggagatgcgtgataccgaaaccacataggggagctgtcatcctaactcaaggataaactcggtcaatcaactaaccatcgcaggcaccttttattgacgaaaaccgatatgaataattccaacaaaaccgcccagctttcatccctaaaaacgctcctccacccccgaccgccactctcacaagcagcgataaatcaatcacaatcgacccattgctacatataaaccaagagaaagagagaagatgcgctccgtcgaggctgagcgcggattaacggagattatgcctgtacaaataaaacctaataattctccgctaaccattgcgcgcccaaacgaaacaagcaccagagggggggaggatgagggagagatcgac

SEQ ID NO: 52817 - DNA, 1521 bp, Zea Mays
gacgttctttagaatcggggctcggacactgtttttatttgactggcactgtacagtccaaaaaatcagatctttttacctaaatccgtttagtccgaaaacacagacttagaccgggctggccggtctgcccaaattttcagtactaggtgggggtgggggaggagtacacaaggaaccgaggtccaagtaggctgctgcttcttccggttggtcctgccctccttgctgacctcggagcggagcggagcagagcaaggaaccggcaggagggaaggaaaggtccatggcggggagatcgacgtacgacaaccccttcgaggagggcgcagccgcggccgaggtcaaccctttcgcggaccaagctaaacgaggaggaccgacggctcagtccagctattctggcggcgctttctacacgacgcagtcgcaacgcccggctcctcctagcacacgcctttcgccgcttgctcctgaacctgctggcttctacaatgacttcgctactccagtggatatccccatggacgacacaaacaacaaggacaggaagacaagggagaaggagcttctggccaaggaggccgagttgaacaggcgtgagaaggaaataaaaaggcgagaagacgccgcagcacgagctggcgttgtgttggaagagaaaaactggccaccgtttttccccatcatccataacgatattggcaacgagatacctgtccatctgcaaagtacactgtatgtcgcattcgcgtcactcttagggttggtcgtgtgcctgttttggaacataatctgcgttacggctgcctgggcaaaagggtcaggtcctaaaatatggtttctcgcaatcatatacttcattcttggatgccccggcgcctactacctttggtaccggccactataccgtgccatgaggaacgagagcgctcttaaatttggatggtttttcctattctacttggttcacatcgccttctgcgtgtacgcagctgtttctccttcgattctcttcgtggggaaatcgttgaccgggattttcccagcaatcagtttgataggcgacagcgtgattgtcgggatcttctacttcattggctttgcactgttctgcctagagtctttgctaagcatgtgtgtcattcagcgtgtttacctctacttccgaggaagtgggaaggaagcggagatgaggcgggaagcagcacgcagtgctgcgagggcagcattttgacgaaccgtgtgtgtatatatagcacggcgtgtgttttgttcatagtttgaagtgtctgtagatcaacatacatatgtagagtagcgttggtgtactgtaaatcttcagaatttttcttaccagtatttgagccctaatacaaataataaaattgtaatgatgatctcactcaaccttttaggaaaaaaatatatacttacattgtcaagggttgtactcatacccactcgcaaagatcttttttcccctaataccagcaaataataagttcttcaaaatttggg

SEQ ID NO: 52818 - DNA, 136 bp, Zea Mays
ccgctgaatttaagcatataaataagcggaggagaagatacttacgaggattcccctagtaacggcgagcgaaccgggagcagcccagcttgagaatcgggcggcctcgccgcccgaattgtagtctggagaggcg

SEQ ID NO: 52819 - DNA, 968 bp, Zea Mays
cacgaccggcagcggggcagccacctcacccttggcgccggcgcgggcggctttcttgctcacgcagctgcccatgaccgacgtgccacacacccgccgccggcacccggcagtgcgaagcagcagcggaaaggagacggagagtggaatggcgtggctagcaaagaaatggcgctagctgggcggatgggaggaggtcctggtcaatgggccgggtggcgctcagcgatcagttgaatgcaatgcaactgcagctgcatatgcatgttcgtcgtgaggtggagggaatcggatcgtgaattgaaggcctattaatctcggggtcaaccacctcgattcctccctcccctctctcctctcgatgcagccagccaccacactgtgcacctgcacctgcagtcctgctcctgctcttgctctcggctcattaaactggagccaattcgccggccactgactgatatatcgagctggcgccatcactgcactaactcccagcagccgcgggccgatatcgccccactcactactactggccctgctgctgggcctcgcttggacggctgctgccgggccgctgtcccctctccctgcgacgagagattggatctccgagaggggactcatctgctaggattcatgtttggaggtacgacagatggagaagggtcgacagtggcatcgatgacgcatggtggcgcgagtgaagaggagagggcggcggagacgagaggctaggggtggcggggtcgctggaaagagaagggagataagggacgagagattatctaaataataatatccattgaatttgaatgagcaagggagagagataaaacaatttaaatcgttggttttaatggtgtgttaagtctgggtgcaatttatttgatggatttggtgaaggttatgagtgtgagagtgatttggttactgtgaatcatatagtggtataaacaagttttgat

SEQ ID NO: 52820 - DNA, 2702 bp, Zea Mays
tacaaacaatttatgctgaaggaaaagtttctataatcaagaaggttgtttgtctcaaggcctgccgggaattacatgctgttggcgctctcacagattatctcttgcccgaatcgagtgttccatgtgaagatgaacctgatattgttgtggacaaatacaaaaatgggcaacctgactactttccagagcaattagtggataattggtcgtccttttctcgtcgtggcttttattattgctacatggtatcactggaaggttgttctaaaactactccagctgagatagtattagctgtaaagtgcgacatgggatctgacttcatctcgaactcattcaaattgtggggtgtgcaagattatttgagttttaccatgagatatgttggcatcattcatctaaatcaggaacaggtaattgccgcgagaagattccagacaacaattctttctttgcttattagtaatgacctttcggaggtcagcaattatattaagaacttacttgaaatgccagcatctcctggagctgtgtatctacttctgccagtagtttctggaaaaattgattggcgtagcatcaaattctcagcctcggaaatgcctgaagctactaacatggatatgcgacactgctatccttgtaaagatactggtatagtgcagacaaaagatggcactttctgctcgtgcatgcttcgaaattctattgtctgtacaccacataatggcatgttttatgctgtttgtggctttcttgacttgaatgctaattcgcttctacatagaagtgatggcagtttccttagctacaaaacctattttaaggaaaggtacaaccttgatttaagatgtgaagatcaagctctcttggaagctcgtaaacttgtggaagtgcggaactttctccacaagtgtaactataaaaaagaaaaagaaagaagtggtaagagtgtggttgaattgccacccgaactgtgcatagttgtcatgtcaccaatgtccgcaattactttgcgcagcttcacatttattccttctataatgtatcggatccagtgtatgctcctttctatgaatttgaaaatgcaattgggtccaagcatgcagcagtttgatattccagcactaaagattctggaagcacttacaacaaagaattgccaagaggaattttcgcaggaatcattagagacacttggggactcttttctcaagtatattacaacccaacacttttttgtcaaatacaaacatcagcatgaaggcatgctaaccaagatgaagaaaaacgtgatctcgaatgcagctttatgtcagctggcttgcagtaacaatcttgtgggatacattcgaagcgaagctttcaatcctaaaacatggatcgttccaggggttggctatgacatatgtgataggagtctgaggaagctgaaaagtaagagaattgcggattcagttgaggccttaatcggggcgtatctcagtactgctggtgagcaggcagcatatattttcttaaaatctttaggaatggatatagagtttcacaaaatgccaattgagagggtaatcacaatcaaagcagaagagttcattaatgttaaaagtttggagctattgcttgactatagtttcaatgatccttcattgttgatggaagcactgacacatggttcatatcagattgctggcactactccatgttatcagcggctggagtttcttggggatgctgtattagatcatatttttactgattatttctaccatcagtaccctgaatgcactcctgaactgctgacagatctgagatctgcttctgtgaacaatagctgctatgctcatgcagcagtaaaagcaggattacataagcatgttcttcactcgtcatcagcactgcacaaaaggatggccgactacctggacaagtttgagcagtcattttcaggtccatcacatggttgggaagcaggcatcagtctgcccaaggtgatgtggttgaatctatcgctggtgcaatttacatcgacgccaagcatgacaaaggggtcgtttggagaagcatgaaacggatactggaacctcttgtgacacccgacacccttcagaatgaccctgtgaaagagctccaggaattctgtgatagcaaaggttacactttggagtacacggtaactcgtgacaacggtgtatcctcggtggtcgcagaagtgcggaccgaagggactacgtacaaggccactcggacaggcttctctaagcttgacgccaaaaagttggcagccagttccgtgctccgtgatttgaaggctgcggacacaaagcagtactctgcaaatggtatcagttgcacttaaacttcatagctctatggtatatacttttgtacaaaatcgtcgaatcagtaaggtgtgcaggtgcctaggcacgctaccctacttttactgcatctacgtctacggccacactaaagcagtacgtgcaacaatgttttgttttggtcatgtctcttgagagtgaaagtgtagcgttatttttattttgattcgcatttttgggataggcctggtggtgcaccagggcaccaagcgagtatgtggtccgtagggtttttagattactcttgtttcgagatgattggattaaattcttgtagagctgattggatggttcaatatcttggtttttagaatggtc

SEQ ID NO: 52821 - DNA, 4480 bp, Zea Mays
gaggacgcgaaacgaatcggatcccttccccttgccgagtcaaaaagcgtagcgaagcaagcgcaacgcaatcgtgtggcgattgcagggcgtgtgccgtggaggagagcggcagcgcaaccgtcaccaccaccaaacccctccgcattctctcgtgcacgcagcacgcgtccctaaacctccctctcccttccgctttttgtaatcctcgtcgccatgacccgcgccgccgccgaagccgccggggaggtggtggtggaggaggatctgccgccatcctgcgacccgcagacacaggcgagatggtaccagctggaggcgctggagcgcgcgctggccgggaacacgcttgtgttcctcgagacgggcgccggcaagacgctcattgcggtgttgcttctccgccgcttcgcacaccgcatccgctcctccccgccgccctccttcgccgtcttcctcgtccccaccgtcgtgctcgtgaaccagcaggcgggcgtcatcaaggagcacacggacctccgcgtcgcccagttctacggcgacatgggcgtcgacttctggaacgcggacacctggcgcggcaggatcgacggggccgaggtgctcgtcatgacgccacaaatccttcttgataacctccgccacagcatcttcaggctgcgggacatcccgctcctcatcttcgacgagtgccaccgcgccaccgggaattccccgtacgcctgcattcttaagatttggcgcttgacaaatattcagaagaaatatctgagtttgagaatctcatgaatgcgaaggtgtacactgttgccagtgaatcagcactattgcaatacattccaattgcgactacaaagatagttgagtacgatgattatatcgtaacgtctgagttatatagtcatactatccgttgcttgaacaaattggaaacaaagcatttagaaatcctgaaggggaaactgcatggttcacctttggaaaattcagagaaaagaataaaaaaattaaatgcaatgttcttatattgcatatctgatcttggagtatggctggcagcaaaggctgctgagattctacaatcaaataaggaaagctgtgtgtccttttggggcgaagaattggatgaaaaacttgaaggatttgttagaaactatgtcagagatgtatatagtgatctttcagaaattatattgaagatgacaaagaggggcgtacaacgacatattggtgaggacttcgctgaggatctgcaagatgggttattaacatccaaagtttattttcttatcaaatctcttatggggtataggcatatgcaagatttgagatgcattgtttttgtcgaaagagttattacaagcattgtgttggaggcccttctgtcaactattaatcaaatgtctggatggagtgttagatacatggcatcagggcgtaattgtggtttgcaacatcagagtaggaataagcatgtggaaatcgttgattcatttcggagtggaaaggtgcatctgattattgccacacaaattttggaggagggactagatgtgccaagttgtaacttgataatccgttttgatcaggcagcaactgtacgcagctttatacagtcacgtggtcgagctaggatgcaacattctgactatgttttactagttagaaggggagatgtcaatgctctttctaagacacagaagtttctgaaaagtggacaaatcatgcgggaagaatctcagagattggaatctacttgttgtcagcctcttctaaacacactatgcaatgaagaattttatggtgttgaatctactggagcaattgtgactttgaactctagtattcaattgattaactttttctgctcaaagctaccatcggatgagtattttaaacctctaccaagattcaaaattgacaaggcattaggtacatgtacgctgcatcttccaatgagcagtcctgtacaaacaatttatgctgaaggaaaagtttctataatcaagaaggttgtttgtctcaaggcctgccgggaattacatgctgttggcgctctcacagattatctcttgcccgaatcgagtgttccatgtgaagatgaacctgatattgttgtggacaaatacaaaaatgggcaacctgactactttccagagcaattagtggataattggtcgtccttttctcgtcgtggcttttattattgctacatggtatcactggaaggttgttctaaaactactccagctgagatagtattagctgtaaagtgcgacatgggatctgacttcatctcgaactcattcaaattgtggggtgtgcaagattatttgagttttaccatgagatatgttggcatcattcatctaaatcaggaacagcatctcctggagctgtgtatctacttctgccagtagtttctggaaaaattgattggcgtagcatcaaattctcagcctcggaaatgcctgaagctactaacatggatatgcgacactgctatccttgtaaagatactggtatagtgcagacaaaagatggcactttctgctcgtgcatgcttcgaaattctattgtctgtacaccacataatggcatgttttatgctgtttgtggctttcttgacttgaatgctaattcgcttctacatagaagtgatggcagtttccttagctacaaaacctattttaaggaaaggtacaaccttgatttaagatgtgaagatcaagctctcttggaagctcgtaaacttgtggaagtgcggaactttctccacaagtgtaactataaaaaagaaaaagaaagaagtggtaagagtgtggttgaattgccacccgaactgtgcatagttgtcatgtcaccaatgtccgcaattactttgcgcagcttcacatttattccttctataatgtatcggatccagtgtatgctcctttctatgaatttgaaaatgcaattgggtccaagcatgcagcagtttgatattccagcactaaagattctggaagcacttacaacaaagaattgccaagaggaattttcgcaggaatcattagagacacttggggactcttttctcaagtatattacaacccaacacttttttgtcaaatacaaacatcagcatgaaggcatgctaaccaagatgaagaaaaacgtgatctcgaatgcagctttatgtcagctggcttgcagtaacaatcttgtgggatacattcgaagcgaagctttcaatcctaaaacatggatcgttccaggggttggctatgacatatgtgataggagtctgaggaagctgaaaagtaagagaattgcggattcagttgaggccttaatcggggcgtatctcagtactgctggtgagcaggcagcatatattttcttaaaatctttaggaatggatatagagtttcacaaaatgccaattgagagggtaatcacaatcaaagcagaagagttcattaatgttaaaagtttggagctattgcttgactatagtttcaatgatccttcattgttgatggaagcactgacacatggttcatatcagattgctggcactactccatgttatcagatctgagatctgcttctgtgaacaatagctgctatgctcatgcagcagtaaaagcaggattacataagcatgttcttcactcgtcatcagcactgcacaaaaggatggccgactacctggacaagtttgagcagtcattttcaggtccatcacatggttgggaagcaggcatcagtctgcccaaggttctaggtgatgtggttgaatctatcgctggtgcaatttacatcgacgccaagcatgacaaaggggtcgtttggagaagcatgaaacggatactggaacctcttgtgacacccgacacccttcagaatgaccctgtgaaagagctccaggaattctgtgatagcaaaggttacactttggagtacacggtaactcgtgacaacggtgtatcctcggtggtcgcagaagtgcggaccgaagggactacgtacaaggccactcggacaggcttctctaagcttgacgccaaaaagttggcagccagttccgtgctccgtgatttgaaggctgcggacacaaagcagtactctgcaaatggtatcagttgcacttaaacttcatagctctatggtatatacttttgtacaaaatcgtcgaatcagtaaggtgtgcaggtgcctaggcacgctaccctacttttactgcatctacgtctacggccacactaaagcagtacgtgcaacaatgttttgttttggtcatgtctcttgagagtgaaagtgtagcgttatttttattttgattcgcatttttgggataggcctggtggtgcaccagggcaccaagcgagtatgtggtccgtagggtttttagattactcttgtttcgagatgattggattaaattcttgtagagctgattggatggttcaatatcttggtttttagaatggtc

SEQ ID NO: 52822 - DNA, 4687 bp, Zea Mays
gaggacgcgaaacgaatcggatcccttccccttgccgagtcaaaaagcgtagcgaagcaagcgcaacgcaatcgtgtggcgattgcagggcgtgtgccgtggaggagagcggcagcgcaaccgtcaccaccaccaaacccctccgcattctctcgtgcacgcagcacgcgtccctaaacctccctctcccttccgctttttgtaatcctcgtcgccatgacccgcgccgccgccgaagccgccggggaggtggtggtggaggaggatctgccgccatcctgcgacccgcagacacaggcgagatggtaccagctggaggcgctggagcgcgcgctggccgggaacacgcttgtgttcctcgagacgggcgccggcaagacgctcattgcggtgttgcttctccgccgcttcgcacaccgcatccgctcctccccgccgccctccttcgccgtcttcctcgtccccaccgtcgtgctcgtgaaccagcaggcgggcgtcatcaaggagcacacggacctccgcgtcgcccagttctacggcgacatgggcgtcgacttctggaacgcggacacctggcgcggcaggatcgacggggccgaggtgctcgtcatgacgccacaaatccttcttgataacctccgccacagcatcttcaggctgcgggacatcccgctcctcatcttcgacgagtgccaccgcgccaccgggaattccccgtacgcctgcattcttaaggagttttatcatccgcaactgaattctaggccatcagattccattccaactatatttgggatgaccgcttctttaattgcaagaaatttggcgcttgacaaatattcagaagaaatatctgagtttgagaatctcatgaatgcgaaggtgtacactgttgccagtgaatcagcactattgcaatacattccaattgcgactacaaagatagttgagtacgatgattatatcgtaacgtctgagttatatagtcatactatccgttgcttgaacaaattggaaacaaagcatttagaaatcctgaaggggaaactgcatggttcacctttggaaaattcagagaaaagaataaaaaaattaaatgcaatgttcttatattgcatatctgatcttggagtatggctggcagcaaaggctgctgagattctacaatcaaataaggaaagctgtgtgtccttttggggcgaagaattggatgaaaaacttgaaggatttgttagaaactatgtcagagatgtatatagtgatctttcagaaattatattgaagatgacaaagaggggcgtacaacgacatattggtgaggacttcgctgaggatctgcaagatgggttattaacatccaaagtttattttcttatcaaatctcttatggggtataggcatatgcaagatttgagatgcattgtttttgtcgaaagagttattacaagcattgtgttggaggcccttctgtcaactattaatcaaatgtctggatggagtgttagatacatggcatcagggcgtaattgtggtttgcaacatcagagtaggaataagcatgtggaaatcgttgattcatttcggagtggaaaggtgcatctgattattgccacacaaattttggaggagggactagatgtgccaagttgtaacttgataatccgttttgatcaggcagcaactgggagatgtcaatgctctttctaagacacagaagtttctgaaaagtggacaaatcatgcgggaagaatctcagagattggaatctacttgttgtcagcctcttctaaacacactatgcaatgaagaattttatggtgttgaatctactggagcaattgtgactttgaactctagtattcaattgattaactttttctgctcaaagctaccatcggatgagtattttaaacctctaccaagattcaaaattgacaaggcattaggtacatgtacgctgcatcttccaatgagcagtcctgtacaaacaatttatgctgaaggaaaagtttctataatcaagaaggttgtttgtctcaaggcctgccgggaattacatgctgttggcgctctcacagattatctcttgcccgaatcgagtgttccatgtgaagatgaacctgatattgttgtggacaaatacaaaaatgggcaacctgactactttccagagcaattagtggataattggtcgtccttttctcgtcgtggcttttattattgctacatggtatcactggaaggttgttctaaaactactccagctgagatagtattagctgtaaagtgcgacatgggatctgacttcatctcgaactcattcaaattgtggggtgtgcaagattatttgagttttaccatgagatatgttggcatcattcatctaaatcaggaacaggtaattgccgcgagaagattccagacaacaattctttctttgcttattagtaatgacctttcggaggtcagcaattatattaagaacttacttgaaatgccagcatctcctggagctgtgtatctacttctgccagtagtttctggaaaaattgattggcgtagcatcaaattctcagcctcggaaatgcctgaagctactaacatggatatgcgacactgctatccttgtaaagatactggtatagtgcagacaaaagatggcactttctgctcgtgcatgcttcgaaattctattgtctgtacaccacataatggcatgttttatgctgtttgtggctttcttgacttgaatgctaattcgcttctacatagaagtgatggcagtttccttagctacaaaacctattttaaggaaaggtacaaccttgatttaagatgtgaagatcaagctctcttggaagctcgtaaacttgtggaagtgcggaactttctccacaagtgtaactataaaaaagaaaaagaagtggtaagagtgtggttgaattgccacccgaactgtgcatagttgtcatgtcaccaatgtccgcaattactttgcgcagcttcacatttattccttctataatgtatcggatccagtgtatgctcctttctatgaatttgaaaatgcaattgggtccaagcatgcagcagtttgatattccagcactaaagattctggaagcacttacaacaaagaattgccaagaggaattttcgcaggaatcattagagacacttggggactcttttctcaagtatattacaacccaacacttttttgtcaaatacaaacatcagcatgaaggcatgctaaccaagatgaagaaaaacgtgatctcgaatgcagctttatgtcagctggcttgcagtaacaatcttgtgggatacattcgaagcgaagctttcaatcctaaaacatggatcgttccaggggttggctatgacatatgtgataggagtctgaggaagctgaaaagtaagagaattgcggattcagttgaggccttaatcggggcgtatctcagtactgctggtgagcaggcagcatatattttcttaaaatctttaggaatggatatagagtttcacaaaatgccaattgagagggtaatcacaatcaaagcagaagagttcattaatgttaaaagtttggagctattgcttgactatagtttcaatgatccttcattgttgatggaagcactgacacatggttcatatcagattgctggcactactccatgttatcagcggctggagtttcttggggatgctgtattagatcatatttttactgattatttctaccatcagtaccctgaatgcactcctgaactgctgacagatctgagatctgcttctgtgaacaatagctgctatgctcatgcagcagtaaaagcaggattacataagcatgttcttcactcgtcatcagcactgcacaaaaggatggccgactacctggacaagtttgagcagtcattttcaggtccatcacatggttgggaagcaggcatcagtctgcccaaggttctaggtgatgtggttgaatctatcgctggtgcaatttacatcgacgccaagcatgacaaaggggtcgtttggagaagcatgaaacggatactggaacctcttgtgacacccgacacccttcagaatgaccctgtgaaagagctccaggaattctgtgatagcaaaggttacactttggagtacacggtaactcgtgacaacggtgtatcctcggtggtcgcagaagtgcggaccgaagggactacgtacaaggccactcggacaggcttctctaagcttgacgccaaaaagttggcagccagttccgtgctccgtgatttgaaggctgcggacacaaagcagtactctgcaaatggtatcagttgcacttaaacttcatagctctatggtatatacttttgtacaaaatcgtcgaatcagtaaggtgtgcaggtgcctaggcacgctaccctacttttactgcatctacgtctacggccacactaaagcagtacgtgcaacaatgttttgttttggtcatgtctcttgagagtgaaagtgtagcgttatttttattttgattcgcatttttgggataggcctggtggtgcaccagggcaccaagcgagtatgtggtccgtagggtttttagattactcttgtttcgagatgattggattaaattcttgtagagctgattggatggttcaatatcttggtttttagaatggtc

SEQ ID NO: 52823 - DNA, 4684 bp, Zea Mays
gaggacgcgaaacgaatcggatcccttccccttgccgagtcaaaaagcgtagcgaagcaagcgcaacgcaatcgtgtggcgattgcagggcgtgtgccgtggaggagagcggcagcgcaaccgtcaccaccaccaaacccctccgcattctctcgtgcacgcagcacgcgtccctaaacctccctctcccttccgctttttgtaatcctcgtcgccatgacccgcgccgccgccgaagccgccggggaggtggtggtggaggaggatctgccgccatcctgcgacccgcagacacaggcgagatggtaccagctggaggcgctggagcgcgcgctggccgggaacacgcttgtgttcctcgagacgggcgccggcaagacgctcattgcggtgttgcttctccgccgcttcgcacaccgcatccgctcctccccgccgccctccttcgccgtcttcctcgtccccaccgtcgtgctcgtgaaccagcaggcgggcgtcatcaaggagcacacggacctccgcgtcgcccagttctacggcgacatgggcgtcgacttctggaacgcggacacctggcgcggcaggatcgacggggccgaggtgctcgtcatgacgccacaaatccttcttgataacctccgccacagcatcttcaggctgcgggacatcccgctcctcatcttcgacgagtgccaccgcgccaccgggaattccccgtacgcctgcattcttaaggagttttatcatccgcaactgaattctaggccatcagattccattccaactatatttgggatgaccgcttctttaattgcaagaaatttggcgcttgacaaatattcagaagaaatatctgagtttgagaatctcatgaatgcgaaggtgtacactgttgccagtgaatcagcactattgcaatacattccaattgcgactacaaagatacatttagaaatcctgaaggggaaactgcatggttcacctttggaaaattcagagaaaagaataaaaaaattaaatgcaatgttcttatattgcatatctgatcttggagtatggctggcagcaaaggctgctgagattctacaatcaaataaggaaagctgtgtgtccttttggggcgaagaattggatgaaaaacttgaaggatttgttagaaactatgtcagagatgtatatagtgatctttcagaaattatattgaagatgacaaagaggggcgtacaacgacatattggtgaggacttcgctgaggatctgcaagatgggttattaacatccaaagtttattttcttatcaaatctcttatggggtataggcatatgcaagatttgagatgcattgtttttgtcgaaagagttattacaagcattgtgttggaggcccttctgtcaactattaatcaaatgtctggatggagtgttagatacatggcatcagggcgtaattgtggtttgcaacatcagagtaggaataagcatgtggaaatcgttgattcatttcggagtggaaaggtgcatctgattattgccacacaaattttggaggagggactagatgtgccaagttgtaacttgataatccgttttgatcaggcagcaactgtacgcagctttatacagtcacgtggtcgagctaggatgcaacattctgactatgttttactagttagaaggggagatgtcaatgctctttctaagacacagaagtttctgaaaagtggacaaatcatgcgggaagaatctcagagattggaatctacttgttgtcagcctcttctaaacacactatgcaatgaagaattttatggtgttgaatctactggagcaattgtgactttgaactctagtattcaattgattaactttttctgctcaaagctaccatcggatgagtattttaaacctctaccaagattcaaaattgacaaggcattaggtacatgtacgctgcatcttccaatgagcagtcctgtacaaacaatttatgctgaaggaaaagtttctataatcaagaaggttgtttgtctcaaggcctgccgggaattacatgctgttggcgctctcacagattatctcttgcccgaatcgagtgttccatgtgaagatgaacctgatattgttgtggacaaatacaaaaatgggcaacctgactactttccagagcaattagtggataattggtcgtccttttctcgtcgtggcttttattattgctacatggtatcactggaaggttgttctaaaactactccagctgagatagtattagctgtaaagtgcgacatgggatctgacttcatctcgaactcattcaaattgtggggtgtgcaagattatttgagttttaccatgagatatgttggcatcattcatctaaatcaggaacaggtaattgccgcgagaagattccagacaacaattctttctttgcttattagtaatgacctttcggaggtcagcaattatattaagaacttacttgaaatgccagcatctcctggagctgtgtatctacttctgccagtagtttctggaaaaattgattggcgtagcatcaaattctcagcctcggaaatgcctgaagctactaacatggatatgcgacactgctatccttgtaaagatactggtatagtgcagacaaaagatggcactttctgctcgtgcatgcttcgaaattctattgtctgtacaccacataatggcatgttttatgctgtttgtggctttcttgacttgaatgctaattcgcttctacatagaagtgatggcagtttccttagctacaaaacctattttaaggaaaggtacaaccttgatttaagatgtgaagatcaagctctcttggaagctcgtaaacttgtggaagtgcggaactttctccacaagtgtaactataaaaaagaaaaagaaagaagtggtaagagtgtggttgaattgccacccgaactgtgcatagttgtcatgtcaccaatgtccgcaattactttgcgcagcttcacatttattccttctataatgtatcggatccagtgtatgctcctttctatgaatttgaaaatgcaattgggtccaagcatgcagcagtttgatattccagcactaaagattctggaagcacttacaacaaagaattgccaagaggaattttcgcaggaatcattagagacacttggggactcttttctcaagtatattacaacccaacacttttttgtcaaatacaaacatcagcatgaaggcatgctaaccaagatgaagaaaaacgtgatctcgaatgcagctttatgtcagctggcttgcagtaacaatcttgtgggatacattcgaagcgaagctttcaatcctaaaacatggatcgttccaggggttggctatgacatatgtgataggagtctgaggaagctgaaaagtaagagaattgcggattcagttgaggccttaatcggggcgtatctcagtactgctggtgagcaggcagcatatattttcttaaaatctttaggaatggatatagagtttcacaaaatgccaattgagagggtaatcacaatcaaagcagaagagttcattaatgttaaaagtttggagctattgcttgactatagtttcaatgatccttcattgttgatggaagcactgacacatggttcatatcagattgctggcactactccatgttatcagcggctggagtttcttggggatgctgtattagatcatatttttactgattatttctaccatcagtaccctgaatgcactcctgaactgctgacagatctgagatctgcttctgtgaacaatagctgctatgctcatgcagcagtaaaagcaggattacataagcatgttcttcactcgtcatcagcactgcacaaaaggatggccgactacctggacaagtttgagcagtcattttcaggtccatcacatggttgggaagcaggcatcagtctgcccaaggttctaggtgatgtggttgaatctatcgctggtgcaatttacatcgacgccaagcatgacaaaggggtcgtttggagaagcatgaaacggatactggaacctcttgtgacacccgacacccttcagaatgaccctgtgaaagagctccaggaattctgtgatagcaaaggttacactttggagtacacggtaactcgtgacaacggtgtatcctcggtggtcgcagaagtgcggaccgaagggactacgtacaaggccactcggacaggcttctctaagcttgacgccaaaaagttggcagccagttccgtgctccgtgatttgaaggctgcggacacaaagcagtactctgcaaatggtatcagttgcacttaaacttcatagctctatggtatatacttttgtacaaaatcgtcgaatcagtaaggtgtgcaggtgcctaggcacgctaccctacttttactgcatctacgtctacggccacactaaagcagtacgtgcaacaatgttttgttttggtcatgtctcttgagagtgaaagtgtagcgttatttttattttgattcgcatttttgggataggcctggtggtgcaccagggcaccaagcgagtatgtggtccgtagggtttttagattactcttgtttcgagatgattggattaaattcttgtagagctgattggatggttcaatatcttggtttttagaatggtc

SEQ ID NO: 52824 - DNA, 4747 bp, Zea Mays
ggaaagcccaccaccgtccccgcgagagccaccgaggtagtcacgattcgaatcctctggcgtggatgggatcaggaaggaggacgcgaaacgaatcggatcccttccccttgccgagtcaaaaagcgtagcgaagcaagcgcaacgcaatcgtgtggcgattgcagggcgtgtgccgtggaggagagcggcagcgcaaccgtcaccaccaccaaacccctccgcattctctcgtgcacgcagcacgcgtccctaaacctccctctcccttccgctttttgtaatcctcgtcgccatgacccgcgccgccgccgaagccgccggggaggtggtggtggaggaggatctgccgccatcctgcgacccgcagacacaggcgagatggtaccagctggaggcgctggagcgcgcgctggccgggaacacgcttgtgttcctcgagacgggcgccggcaagacgctcattgcggtgttgcttctccgccgcttcgcacaccgcatccgctcctccccgccgccctccttcgccgtcttcctcgtccccaccgtcgtgctcgtgaaccagcaggcgggcgtcatcaaggagcacacggacctccgcgtcgcccagttctacggcgacatgggcgtcgacttctggaacgcggacacctggcgcggcaggatcgacggggccgaggtgctcgtcatgacgccacaaatccttcttgataacctccgccacagcatcttcaggctgcgggacatcccgctcctcatcttcgacgagtgccaccgcgccaccgggaattccccgtacgcctgcattcttaaggagttttatcatccgcaactgaattctaggccatcagattccattccaactatatttgggatgaccgcttctttaattgcaagaaatttggcgcttgacaaatattcagaagaaatatctgagtttgagaatctcatgaatgcgaaggtgtacactgttgccagtgaatcagcactattgcaatacattccaattgcgactacaaagatagttgagtacgatgattatatcgtaacgtctgagttatatagtcatactatccgttgcttgaacaaattggaaacaaagcatttagaaatcctgaaggggaaactgcatggttcacctttggaaaattcagagaaaagaataaaaaaattaaatgcaatgttcttatattgcatatctgatcttggagtatggctggcagcaaaggctgctgagattctacaatcaaataaggaaagctgtgtgtccttttggggcgaagaattggatgaaaaacttgaaggatttgttagaaactatgtcagagatgtatatagtgatctttcagaaattatattgaagatgacaaagaggggcgtacaacgacatattggtgaggacttcgctgaggatctgcaagatgggttattaacatccaaagtttattttcttatcaaatctcttatggggtataggcatatgcaagatttgagatgcattgtttttgtcgaaagagttattacaagcattgtgttggaggcccttctgtcaactattaatcaaatgtctggatggagtgttagatacatggcatcagggcgtaattgtggtttgcaacatcagagtaggaataagcatgtggaaatcgttgattcatttcggagtggaaaggtgcatctgattattgccacacaaattttggaggagggactagatgtgccaagttgtaacttgataatccgttttgatcaggcagcaactgtacgcagctttatacagtcacgtggtcgagctaggatgcaacattctgactatgttttactagttagaaggggagatgtcaatgctctttctaagacacagaagtttctgaaaagtggacaaatcatgcgggaagaatctcagagattggaatctacttgttgtcagcctcttctaaacacactatgcaatgaagaattttatggtgttgaatctactggagcaattgtgactttgaactctagtattcaattgattaactttttctgctcaaagctaccatcggatgagtattttaaacctctaccaagattcaaaattgacaaggcattaggtacatgtacgctgcatcttccaatgagcagtcctgtacaaacaatttatgctgaaggaaaagtttctataatcaagaaggttgtttgtctcaaggcctgccgggaattacatgctgttggcgctctcacagattatctcttgcccgaatcgagtgttccatgtgaagatgaacctgatattgttgtggacaaatacaaaaatgggcaacctgactactttccagagcaattagtggataattggtcgtccttttctcgtcgtggcttttattattgctacatggtatcactggaaggttgttctaaaactactccagctgagatagtattagctgtaaagtgcgacatgggatctgacttcatctcgaactcattcaaattgtggggtgtgcaagattatttgagttttaccatgagatatgttggcatcattcatctaaatcaggaacaggtaattgccgcgagaagattccagacaacaattctttctttgcttattagtaatgacctttcggaggtcagcaattatattaagaacttacttgaaatgccagcatctcctggagctgtgtatctacttctgccagtagtttctggaaaaattgattggcgtagcatcaaattctcagcctcggaaatgcctgaagctactaacatggatatgcgacactgctatccttgtaaagatactggtatagtgcagacaaaagatggcactttctgctcgtgcatgcttcgaaattctattgtctgtacaccacataatggcatgttttatgctgtttgtggctttcttgacttgaatgctaattcgcttctacatagaagtgatggcagtttccttagctacaaaacctattttaaggaaaggtacaaccttgatttaagatgtgaagatcaagctctcttggaagctcgtaaacttgtggaagtgcggaactttctccacaagtgtaactataaaaaagaaaaagaaagaagtggtaagagtgtggttgaattgccacccgaactgtgcatagttgtcatgtcaccaatgtccgcaattactttgcgcagcttcacatttattccttctataatgtatcggatccagtgtatgctcctttctatgaatttgaaaatgcaattgggtccaagcatgcagcagtttgatattccagcactaaagattctggaagcacttacaacaaagaattgccaagaggaattttcgcaggaatcattagagacacttggggactcttttctcaagtatattacaacccaacacttttttgtcaaatacaaacatcagcatgaaggcatgctaaccaagatgaagaaaaacgtgatctcgaatgcagctttatgtcagctggcttgcagtaacaatcttgtgggatacattcgaagcgaagctttcaatcctaaaacatggatcgttccaggggttggctatgacatatgtgataggagtctgaggaagctgaaaagtaagagaattgcggattcagttgaggccttaatcggggcgtatctcagtactgctggtgagcaggcagcatatattttcttaaaatctttaggaatggatatagagtttcacaaaatgccaattgagagggtaatcacaatcaaagcagaagagttcattaatgttaaaagtttggagctattgcttgactatagtttcaatgatccttcattgttgatggaagcactgacacatggttcatatcagattgctggcactactccatgttatcagatctgagatctgcttctgtgaacaatagctgctatgctcatgcagcagtaaaagcaggattacataagcatgttcttcactcgtcatcagcactgcacaaaaggatggccgactacctggacaagtttgagcagtcattttcaggtccatcacatggttgggaagcaggcatcagtctgcccaaggttctaggtgatgtggttgaatctatcgctggtgcaatttacatcgacgccaagcatgacaaaggggtcgtttggagaagcatgaaacggatactggaacctcttgtgacacccgacacccttcagaatgaccctgtgaaagagctccaggaattctgtgatagcaaaggttacactttggagtacacggtaactcgtgacaacggtgtatcctcggtggtcgcagaagtgcggaccgaagggactacgtacaaggccactcggacaggcttctctaagcttgacgccaaaaagttggcagccagttccgtgctccgtgatttgaaggctgcggacacaaagcagtactctgcaaatggtatcagttgcacttaaacttcatagctctatggtatatacttttgtacaaaatcgtcgaatcagtaaggtgtgcaggtgcctaggcacgctaccctacttttactgcatctacgtctacggccacactaaagcagtacgtgcaacaatgttttgttttggtcatgtctcttgagagtgaaagtgtagcgttatttttattttgattcgcatttttgggataggcctggtggtgcaccagggcaccaagcgagtatgtggtccgtagggtttttagattactcttgtttcgagatgattggattaaattcttgtagagctgattggatggttcaatatcttggtttttagaatggtc

SEQ ID NO: 52825 - DNA, 4841 bp, Zea Mays
ggaaagcccaccaccgtccccgcgagagccaccgaggtagtcacgattcgaatcctctggcgtggatgggatcaggaaggaggacgcgaaacgaatcggatcccttccccttgccgagtcaaaaagcgtagcgaagcaagcgcaacgcaatcgtgtggcgattgcagggcgtgtgccgtggaggagagcggcagcgcaaccgtcaccaccaccaaacccctccgcattctctcgtgcacgcagcacgcgtccctaaacctccctctcccttccgctttttgtaatcctcgtcgccatgacccgcgccgccgccgaagccgccggggaggtggtggtggaggaggatctgccgccatcctgcgacccgcagacacaggcgagatggtaccagctggaggcgctggagcgcgcgctggccgggaacacgcttgtgttcctcgagacgggcgccggcaagacgctcattgcggtgttgcttctccgccgcttcgcacaccgcatccgctcctccccgccgccctccttcgccgtcttcctcgtccccaccgtcgtgctcgtgaaccagcaggcgggcgtcatcaaggagcacacggacctccgcgtcgcccagttctacggcgacatgggcgtcgacttctggaacgcggacacctggcgcggcaggatcgacggggccgaggtgctcgtcatgacgccacaaatccttcttgataacctccgccacagcatcttcaggctgcgggacatcccgctcctcatcttcgacgagtgccaccgcgccaccgggaattccccgtacgcctgcattcttaaggagttttatcatccgcaactgaattctaggccatcagattccattccaactatatttgggatgaccgcttctttaattgcaagaaatttggcgcttgacaaatattcagaagaaatatctgagtttgagaatctcatgaatgcgaaggtgtacactgttgccagtgaatcagcactattgcaatacattccaattgcgactacaaagatagttgagtacgatgattatatcgtaacgtctgagttatatagtcatactatccgttgcttgaacaaattggaaacaaagcatttagaaatcctgaaggggaaactgcatggttcacctttggaaaattcagagaaaagaataaaaaaattaaatgcaatgttcttatattgcatatctgatcttggagtatggctggcagcaaaggctgctgagattctacaatcaaataaggaaagctgtgtgtccttttggggcgaagaattggatgaaaaacttgaaggatttgttagaaactatgtcagagatgtatatagtgatctttcagaaattatattgaagatgacaaagaggggcgtacaacgacatattggtgaggacttcgctgaggatctgcaagatgggttattaacatccaaagtttattttcttatcaaatctcttatggggtataggcatatgcaagatttgagatgcattgtttttgtcgaaagagttattacaagcattgtgttggaggcccttctgtcaactattaatcaaatgtctggatggagtgttagatacatggcatcagggcgtaattgtggtttgcaacatcagagtaggaataagcatgtggaaatcgttgattcatttcggagtggaaaggtgcatctgattattgccacacaaattttggaggagggactagatgtgccaagttgtaacttgataatccgttttgatcaggcagcaactgtacgcagctttatacagtcacgtggtcgagctaggatgcaacattctgactatgttttactagttagaaggggagatgtcaatgctctttctaagacacagaagtttctgaaaagtggacaaatcatgcgggaagaatctcagagattggaatctacttgttgtcagcctcttctaaacacactatgcaatgaagaattttatggtgttgaatctactggagcaattgtgactttgaactctagtattcaattgattaactttttctgctcaaagctaccatcggatgagtattttaaacctctaccaagattcaaaattgacaaggcattaggtacatgtacgctgcatcttccaatgagcagtcctgtacaaacaatttatgctgaaggaaaagtttctataatcaagaaggttgtttgtctcaaggcctgccgggaattacatgctgttggcgctctcacagattatctcttgcccgaatcgagtgttccatgtgaagatgaacctgatattgttgtggacaaatacaaaaatgggcaacctgactactttccagagcaattagtggataattggtcgtccttttctcgtcgtggcttttattattgctacatggtatcactggaaggttgttctaaaactactccagctgagatagtattagctgtaaagtgcgacatgggatctgacttcatctcgaactcattcaaattgtggggtgtgcaagattatttgagttttaccatgagatatgttggcatcattcatctaaatcaggaacaggtaattgccgcgagaagattccagacaacaattctttctttgcttattagtaatgacctttcggaggtcagcaattatattaagaacttacttgaaatgccagcatctcctggagctgtgtatctacttctgccagtagtttctggaaaaattgattggcgtagcatcaaattctcagcctcggaaatgcctgaagctactaacatggatatgcgacactgctatccttgtaaagatactggtatagtgcagacaaaagatggcactttctgctcgtgcatgcttcgaaattctattgtctgtacaccacataatggcatgttttatgctgtttgtggctttcttgacttgaatgctaattcgcttctacatagaagtgatggcagtttccttagctacaaaacctattttaaggaaaggtacaaccttgatttaagatgtgaagatcaagctctcttggaagctcgtaaacttgtggaagtgcggaactttctccacaagtgtaactataaaaaagaaaaagaaagaagtggtaagagtgtggttgaattgccacccgaactgtgcatagttgtcatgtcaccaatgtccgcaattactttgcgcagcttcacatttattccttctataatgtatcggatccagtgtatgctcctttctatgaatttgaaaatgcaattgggtccaagcatgcagcagtttgatattccagcactaaagattctggaagcacttacaacaaagaattgccaagaggaattttcgcaggaatcattagagacacttggggactcttttctcaagtatattacaacccaacacttttttgtcaaatacaaacatcagcatgaaggcatgctaaccaagatgaagaaaaacgtgatctcgaatgcagctttatgtcagctggcttgcagtaacaatcttgtgggatacattcgaagcgaagctttcaatcctaaaacatggatcgttccaggggttggctatgacatatgtgataggagtctgaggaagctgaaaagtaagagaattgcggattcagttgaggccttaatcggggcgtatctcagtactgctggtgagcaggcagcatatattttcttaaaatctttaggaatggatatagagtttcacaaaatgccaattgagagggtaatcacaatcaaagcagaagagttcattaatgttaaaagtttggagctattgcttgactatagtttcaatgatccttcattgttgatggaagcactgacacatggttcatatcagattgctggcactactccatgttatcagcggctggagtttcttggggatgctgtattagatcatatttttactgattatttctaccatcagtaccctgaatgcactcctgaactgctgacagatctgagatctgcttctgtgaacaatagctgctatgctcatgcagcagtaaaagcaggattacataagcatgttcttcactcgtcatcagcactgcacaaaaggatggccgactacctggacaagtttgagcagtcattttcaggtccatcacatggttgggaagcaggcatcagtctgcccaaggttctaggtgatgtggttgaatctatcgctggtgcaatttacatcgacgccaagcatgacaaaggggtcgtttggagaagcatgaaacggatactggaacctcttgtgacacccgacacccttcagaatgaccctgtgaaagagctccaggaattctgtgatagcaaaggttacactttggagtacacggtaactcgtgacaacggtgtatcctcggtggtcgcagaagtgcggaccgaagggactacgtacaaggccactcggacaggcttctctaagcttgacgccaaaaagttggcagccagttccgtgctccgtgatttgaaggctgcggacacaaagcagtactctgcaaatggtatcagttgcacttaaacttcatagctctatggtatatacttttgtacaaaatcgtcgaatcagtaaggtgtgcaggtgcctaggcacgctaccctacttttactgcatctacgtctacggccacactaaagcagtacgtgcaacaatgttttgttttggtcatgtctcttgagagtgaaagtgtagcgttatttttattttgattcgcatttttgggataggcctggtggtgcaccagggcaccaagcgagtatgtggtccgtagggtttttagattactcttgtttcgagatgattggattaaattcttgtagagctgattggatggttcaatatcttggtttttagaatggtc

SEQ ID NO: 52826 - DNA, 4770 bp, Zea Mays
ggaaagcccaccaccgtccccgcgagagccaccgaggtagtcacgattcgaatcctctggcgtggatgggatcaggaaggaggacgcgaaacgaatcggatcccttccccttgccgagtcaaaaagcgtagcgaagcaagcgcaacgcaatcgtgtggcgattgcagggcgtgtgccgtggaggagagcggcagcgcaaccgtcaccaccaccaaacccctccgcattctctcgtgcacgcagcacgcgtccctaaacctccctctcccttccgctttttgtaatcctcgtcgccatgacccgcgccgccgccgaagccgccggggaggtggtggtggaggaggatctgccgccatcctgcgacccgcagacacaggcgagatggtaccagctggaggcgctggagcgcgcgctggccgggaacacgcttgtgttcctcgagacgggcgccggcaagacgctcattgcggtgttgcttctccgccgcttcgcacaccgcatccgctcctccccgccgccctccttcgccgtcttcctcgtccccaccgtcgtgctcgtgaaccagcaggcgggcgtcatcaaggagcacacggacctccgcgtcgcccagttctacggcgacatgggcgtcgacttctggaacgcggacacctggcgcggcaggatcgacggggccgaggtgctcgtcatgacgccacaaatccttcttgataacctccgccacagcatcttcaggctgcgggacatcccgctcctcatcttcgacgagtgccaccgcgccaccgggaattccccgtacgcctgcattcttaaggagttttatcatccgcaactgaattctaggccatcagattccattccaactatatttgggatgaccgcttctttaattgcaagaaatttggcgcttgacaaatattcagaagaaatatctgagtttgagaatctcatgaatgcgaaggtgtacactgttgccagtgaatcagcactattgcaatacattccaattgcgactacaaagatagttgagtacgatgattatatcgtaacgtctgagttatatagtcatactatccgttgcttgaacaaattggaaacaaagcatttagaaatcctgaaggggaaactgcatggttcacctttggaaaattcagagaaaagaataaaaaaattaaatgcaatgttcttatattgcatatctgatcttggagtatggctggcagcaaaggctgctgagattctacaatcaaataaggaaagctgtgtgtccttttggggcgaagaattggatgaaaaacttgaaggatttgttagaaactatgtcagagatgtatatagtgatctttcagaaattatattgaagatgacaaagaggggcgtacaacgacatattggtgaggacttcgctgaggatctgcaagatgggttattaacatccaaagtttattttcttatcaaatctcttatggggtataggcatatgcaagatttgagatgcattgtttttgtcgaaagagttattacaagcattgtgttggaggcccttctgtcaactattaatcaaatgtctggatggagtgttagatacatggcatcagggcgtaattgtggtttgcaacatcagagtaggaataagcatgtggaaatcgttgattcatttcggagtggaaaggtgcatctgattattgccacacaaattttggaggagggactagatgtgccaagttgtaacttgataatccgttttgatcaggcagcaactgggagatgtcaatgctctttctaagacacagaagtttctgaaaagtggacaaatcatgcgggaagaatctcagagattggaatctacttgttgtcagcctcttctaaacacactatgcaatgaagaattttatggtgttgaatctactggagcaattgtgactttgaactctagtattcaattgattaactttttctgctcaaagctaccatcggatgagtattttaaacctctaccaagattcaaaattgacaaggcattaggtacatgtacgctgcatcttccaatgagcagtcctgtacaaacaatttatgctgaaggaaaagtttctataatcaagaaggttgtttgtctcaaggcctgccgggaattacatgctgttggcgctctcacagattatctcttgcccgaatcgagtgttccatgtgaagatgaacctgatattgttgtggacaaatacaaaaatgggcaacctgactactttccagagcaattagtggataattggtcgtccttttctcgtcgtggcttttattattgctacatggtatcactggaaggttgttctaaaactactccagctgagatagtattagctgtaaagtgcgacatgggatctgacttcatctcgaactcattcaaattgtggggtgtgcaagattatttgagttttaccatgagatatgttggcatcattcatctaaatcaggaacaggtaattgccgcgagaagattccagacaacaattctttctttgcttattagtaatgacctttcggaggtcagcaattatattaagaacttacttgaaatgccagcatctcctggagctgtgtatctacttctgccagtagtttctggaaaaattgattggcgtagcatcaaattctcagcctcggaaatgcctgaagctactaacatggatatgcgacactgctatccttgtaaagatactggtatagtgcagacaaaagatggcactttctgctcgtgcatgcttcgaaattctattgtctgtacaccacataatggcatgttttatgctgtttgtggctttcttgacttgaatgctaattcgcttctacatagaagtgatggcagtttccttagctacaaaacctattttaaggaaaggtacaaccttgatttaagatgtgaagatcaagctctcttggaagctcgtaaacttgtggaagtgcggaactttctccacaagtgtaactataaaaaagaaaaagaaagaagtggtaagagtgtggttgaattgccacccgaactgtgcatagttgtcatgtcaccaatgtccgcaattactttgcgcagcttcacatttattccttctataatgtatcggatccagtgtatgctcctttctatgaatttgaaaatgcaattgggtccaagcatgcagcagtttgatattccagcactaaagattctggaagcacttacaacaaagaattgccaagaggaattttcgcaggaatcattagagacacttggggactcttttctcaagtatattacaacccaacacttttttgtcaaatacaaacatcagcatgaaggcatgctaaccaagatgaagaaaaacgtgatctcgaatgcagctttatgtcagctggcttgcagtaacaatcttgtgggatacattcgaagcgaagctttcaatcctaaaacatggatcgttccaggggttggctatgacatatgtgataggagtctgaggaagctgaaaagtaagagaattgcggattcagttgaggccttaatcggggcgtatctcagtactgctggtgagcaggcagcatatattttcttaaaatctttaggaatggatatagagtttcacaaaatgccaattgagagggtaatcacaatcaaagcagaagagttcattaatgttaaaagtttggagctattgcttgactatagtttcaatgatccttcattgttgatggaagcactgacacatggttcatatcagattgctggcactactccatgttatcagcggctggagtttcttggggatgctgtattagatcatatttttactgattatttctaccatcagtaccctgaatgcactcctgaactgctgacagatctgagatctgcttctgtgaacaatagctgctatgctcatgcagcagtaaaagcaggattacataagcatgttcttcactcgtcatcagcactgcacaaaaggatggccgactacctggacaagtttgagcagtcattttcaggtccatcacatggttgggaagcaggcatcagtctgcccaaggttctaggtgatgtggttgaatctatcgctggtgcaatttacatcgacgccaagcatgacaaaggggtcgtttggagaagcatgaaacggatactggaacctcttgtgacacccgacacccttcagaatgaccctgtgaaagagctccaggaattctgtgatagcaaaggttacactttggagtacacggtaactcgtgacaacggtgtatcctcggtggtcgcagaagtgcggaccgaagggactacgtacaaggccactcggacaggcttctctaagcttgacgccaaaaagttggcagccagttccgtgctccgtgatttgaaggctgcggacacaaagcagtactctgcaaatggtatcagttgcacttaaacttcatagctctatggtatatacttttgtacaaaatcgtcgaatcagtaaggtgtgcaggtgcctaggcacgctaccctacttttactgcatctacgtctacggccacactaaagcagtacgtgcaacaatgttttgttttggtcatgtctcttgagagtgaaagtgtagcgttatttttattttgattcgcatttttgggataggcctggtggtgcaccagggcaccaagcgagtatgtggtccgtagggtttttagattactcttgtttcgagatgattggattaaattcttgtagagctgattggatggttcaatatcttggtttttagaatggtc

SEQ ID NO: 52827 - DNA, 4774 bp, Zea Mays
agaaagccaaggccacaaaattgctgcgaatctgggaaagcccaccaccgtccccgcgagagccaccgaggtagtcacgattcgaatcctctggcgtggatgggatcaggaaggaggacgcgaaacgaatcggatcccttccccttgccgagtcaaaaagcgtagcgaagcaagcgcaacgcaatcgtgtggcgattgcagggcgtgtgccgtggaggagagcggcagcgcaaccgtcaccaccaccaaacccctccgcattctctcgtgcacgcagcacgcgtccctaaacctccctctcccttccgctttttgtaatcctcgtcgccatgacccgcgccgccgccgaagccgccggggaggtggtggtggaggaggatctgccgccatcctgcgacccgcagacacaggcgagatggtaccagctggaggcgctggagcgcgcgctggccgggaacacgcttgtgttcctcgagacgggcgccggcaagacgctcattgcggtgttgcttctccgccgcttcgcacaccgcatccgctcctccccgccgccctccttcgccgtcttcctcgtccccaccgtcgtgctcgtgaaccagcaggcgggcgtcatcaaggagcacacggacctccgcgtcgcccagttctacggcgacatgggcgtcgacttctggaacgcggacacctggcgcggcaggatcgacggggccgaggtgctcgtcatgacgccacaaatccttcttgataacctccgccacagcatcttcaggctgcgggacatcccgctcctcatcttcgacgagtgccaccgcgccaccgggaattccccgtacgcctgcattcttaaggagttttatcatccgcaactgaattctaggccatcagattccattccaactatatttgggatgaccgcttctttaattgcaagaaatttggcgcttgacaaatattcagaagaaatatctgagtttgagaatctcatgaatgcgaaggtgtacactgttgccagtgaatcagcactattgcaatacattccaattgcgactacaaagatagttgagtacgatgattatatcgtaacgtctgagttatatagtcatactatccgttgcttgaacaaattggaaacaaagcatttagaaatcctgaaggggaaactgcatggttcacctttggaaaattcagagaaaagaataaaaaaattaaatgcaatgttcttatattgcatatctgatcttggagtatggctggcagcaaaggctgctgagattctacaatcaaataaggaaagctgtgtgtccttttggggcgaagaattggatgaaaaacttgaaggatttgttagaaactatgtcagagatgtatatagtgatctttcagaaattatattgaagatgacaaagaggggcgtacaacgacatattggtgaggacttcgctgaggatctgcaagatgggttattaacatccaaagtttattttcttatcaaatctcttatggggtataggcatatgcaagatttgagatgcattgtttttgtcgaaagagttattacaagcattgtgttggaggcccttctgtcaactattaatcaaatgtctggatggagtgttagatacatggcatcagggcgtaattgtggtttgcaacatcagagtaggaataagcatgtggaaatcgttgattcatttcggagtggaaaggtgcatctgattattgccacacaaattttggaggagggactagatgtgccaagttgtaacttgataatccgttttgatcaggcagcaactgtacgcagctttatacagtcacgtggtcgagctaggatgcaacattctgactatgttttactagttagaaggggagatgtcaatgctctttctaagacacagaagtttctgaaaagtggacaaatcatgcgggaagaatctcagagattggaatctacttgttgtcagcctcttctaaacacactatgcaatgaagaattttatggtgttgaatctactggagcaattgtgactttgaactctagtattcaattgattaactttttctgctcaaagctaccatcggatgagtattttaaacctctaccaagattcaaaattgacaaggcattaggtacatgtacgctgcatcttccaatgagcagtcctgtacaaacaatttatgctgaaggaaaagtttctataatcaagaaggttgtttgtctcaaggcctgccgggaattacatgctgttggcgctctcacagattatctcttgcccgaatcgagtgttccatgtgaagatgaacctgatattgttgtggacaaatacaaaaatgggcaacctgactactttccagagcaattagtggataattggtcgtccttttctcgtcgtggcttttattattgctacatggtatcactggaaggttgttctaaaactactccagctgagatagtattagctgtaaagtgcgacatgggatctgacttcatctcgaactcattcaaattgtggggtgtgcaagattatttgagttttaccatgagatatgttggcatcattcatctaaatcaggaacaggtaattgccgcgagaagattccagacaacaattctttctttgcttattagtaatgacctttcggaggtcagcaattatattaagaacttacttgaaatgccagcatctcctggagctgtgtatctacttctgccagtagtttctggaaaaattgattggcgtagcatcaaattctcagcctcggaaatgcctgaagctactaacatggatatgcgacactgctatccttgtaaagatactggtatagtgcagacaaaagatggcactttctgctcgtgcatgcttcgaaattctattgtctgtacaccacataatggcatgttttatgctgtttgtggctttcttgacttgaatgctaattcgcttctacatagaagtgatggcagtttccttagctacaaaacctattttaaggaaaggtacaaccttgatttaagatgtgaagatcaagctctcttggaagctcgtaaacttgtggaagtgcggaactttctccacaagtgtaactataaaaaagaaaaagaaagaagtggtaagagtgtggttgaattgccacccgaactgtgcatagttgtcatgtcaccaatgtccgcaattactttgcgcagcttcacatttattccttctataatgtatcggatccagtgtatgctcctttctatgaatttgaaaatgcaattgggtccaagcatgcagcagtttgatattccagcactaaagattctggaagcacttacaacaaagaattgccaagaggaattttcgcaggaatcattagagacacttggggactcttttctcaagtatattacaacccaacacttttttgtcaaatacaaacatcagcatgaaggcatgctaaccaagatgaagaaaaacgtgatctcgaatgcagctttatgtcagctggcttgcagtaacaatcttgtgggatacattcgaagcgaagctttcaatcctaaaacatggatcgttccaggggttggctatgacatatgtgataggagtctgaggaagctgaaaagtaagagaattgcggattcagttgaggccttaatcggggcgtatctcagtactgctggtgagcaggcagcatatattttcttaaaatctttaggaatggatatagagtttcacaaaatgccaattgagagggtaatcacaatcaaagcagaagagttcattaatgttaaaagtttggagctattgcttgactatagtttcaatgatccttcattgttgatggaagcactgacacatggttcatatcagattgctggcactactccatgttatcagatctgagatctgcttctgtgaacaatagctgctatgctcatgcagcagtaaaagcaggattacataagcatgttcttcactcgtcatcagcactgcacaaaaggatggccgactacctggacaagtttgagcagtcattttcaggtccatcacatggttgggaagcaggcatcagtctgcccaaggtgatgtggttgaatctatcgctggtgcaatttacatcgacgccaagcatgacaaaggggtcgtttggagaagcatgaaacggatactggaacctcttgtgacacccgacacccttcagaatgaccctgtgaaagagctccaggaattctgtgatagcaaaggttacactttggagtacacggtaactcgtgacaacggtgtatcctcggtggtcgcagaagtgcggaccgaagggactacgtacaaggccactcggacaggcttctctaagcttgacgccaaaaagttggcagccagttccgtgctccgtgatttgaaggctgcggacacaaagcagtactctgcaaatggtatcagttgcacttaaacttcatagctctatggtatatacttttgtacaaaatcgtcgaatcagtaaggtgtgcaggtgcctaggcacgctaccctacttttactgcatctacgtctacggccacactaaagcagtacgtgcaacaatgttttgttttggtcatgtctcttgagagtgaaagtgtagcgttatttttattttgattcgcatttttgggataggcctggtggtgcaccagggcaccaagcgagtatgtggtccgtagggtttttagattactcttgtttcgagatgattggattaaattcttgtagagctgattggatggttcaatatcttggtttttagaatggtc

SEQ ID NO: 52828 - DNA, 1636 bp, Zea Mays
tttttccttccttcagaacctacgagtgttaagttgccacctgaactctgcaaaatagtcatggcaccggtgtcagcaaatactttgttcagcttctcatttgtgccttccataatgtaccgtatccagtgtctgcttctttctgcaaagttgaaaatccagttgggcccaagaatgcaacagttcaacataacagctatgaagattctggaagcacttacaacaaaggaatgccaggagaaattttcaatggaatcattagaaacacttggagattctttcattaagtatgttacaggccaaaatctttttaacaaatacaaacatcgagaggacatgctaacctctatgagagaagaaaaggtctccaacccagctctatgccagctagcttgcaaaagcgaaattgtgggatacattcgaggtgaactatttaacccccaaaaatggaccattccagggttcggttatgactcacgcggtaacaacaaggttttcttccgagcaaccaataatatgtacagtctgaagaaaatatccataaaaagcaagagaattgctgatacagtggaagccttgactggggcctacctcagtacttgtggtgaactggctgcagttcattttatcaaagcactaggaatggatgttgaactgcatagtaaaatgcaagttgaaaggactattacaacaaaatctgaagaattaattgacgcggaaagcttgcagacaatgctcaaatatgtgttctatgatacttcactgttagtagaagcattgacacatagttcttacaatattactggtattacagcttgcaatgagaaaataccccaattgtacaccagcactgttgacaaatctacgaaaagcttctgtgaacaactgttgctatgcacatgcagctgttaaagcagggttacacaagcacattcttcattcatcgtcaaaacagatggttaacgatcttgagaattcagggcggtcattttcaggcccatcacatggttgggaagctggcattagtctcccggaggatctcgcagatttgtttgaagcaatagctggcgcaatttacgtggacagcgggaacgacaaagaggttgtctggagtgccatcaggcggctactggaacctcttgccacccccgggaccatggagcctgaccccgtgtcggaactgaaggaattatgcgagcacaaacactaccctaagccatcgtactctccaactcgtgacagtgtagctggagtgacaagggtggttgcacaggtgacggctgcgcggactgtgtactccgggactggaacaggccgcaaccaggatgtggcagaggttctcgctgcaaaggctctgctcaaaaagataaaggccgcagcaagaggatgaagcttggacttggcttggaccgggcgggcatttgatatttgggaatttgcgcacatgatagctgttctcgcagaggtaacaaaacaaactactgtagtatataaatgttgtgtatatgaatcaaggacagttgaactacccttggtttcgatagctgcaaaatacaaaacaaaaaaaaactcgaatctactatgcacagtggcttcatgtggtggacccttaatgaaatgatgaattctacgtggc

SEQ ID NO: 52829 - DNA, 1647 bp, Zea Mays
tttttccttccttcagaacctacgagtgttaagttgccacctgaactctgcaaaatagtcatggcaccggtgtcagcaaatactttgttcagcttctcatttgtgccttccataatgtaccgtatccagtgtctgcttctttctgcaaagttgaaaatccagttgggcccaagaatgcaacagttcaacataacagctatgaagattctggaagcacttacaacaaaggaatgccaggagaaattttcaatggaatcattagaaacacttggagattctttcattaagtatgttacaggccaaaatctttttaacaaatacaaacatcgagaggacatgctaacctctatgagagaagaaaagggatacattcgaggtgaactatttaacccccaaaaatggaccattccagggttcggttatgactcacgcggtaacaacaaggttttcttccgagcaaccaataatatgtacagtctgaagaaaatatccataaaaagcaagagaattgctgatacagtggaagccttgactggggcctacctcagtacttgtggtgaactggctgcagttcattttatcaaagcactaggaatggatgttgaactgcatagtaaaatgcaagttgaaaggactattacaacaaaatctgaagaattaattgacgcggaaagcttgcagacaatgctcaaatatgtgttctatgatacttcactgttagtagaagcattgacacatagttcttacaatattactggtattacagcttgcaatgagaggcttgaatttctcggagatgctgtattggactacatcttaacttattacttttacagaaaataccccaattgtacaccagcactgttgacaaatctacgaaaagcttctgtgaacaactgttgctatgcacatgcagctgttaaagcagggttacacaagcacattcttcattcatcgtcaaaacagatggttaacgatcttgagaattcagggcggtcattttcaggcccatcacatggttgggaagctggcattagtctcccggaggatctcgcagatttgtttgaagcaatagctggcgcaatttacgtggacagcgggaacgacaaagaggttgtctggagtgccatcaggcggctactggaacctcttgccacccccgggaccatggagcctgaccccgtgtcggaactgaaggaattatgcgagcacaaacactaccctaagccatcgtactctccaactcgtgacagtgtagctggagtgacaagggtggttgcacaggtgacggctgcgcggactgtgtactccgggactggaacaggccgcaaccaggatgtggcagaggttctcgctgcaaaggctctgctcaaaaagataaaggccgcagcaagaggatgaagcttggacttggcttggaccgggcgggcatttgatatttgggaatttgcgcacatgatagctgttctcgcagaggtaacaaaacaaactactgtagtatataaatgttgtgtatatgaatcaaggacagttgaactacccttggtttcgatagctgcaaaatacaaaacaaaaaaaaactcgaatctactatgcacagtggcttcatgtggtggacccttaatgaaatgatgaattctacgtggc

SEQ ID NO: 52830 - DNA, 1685 bp, Zea Mays
tttttccttccttcagaacctacgagtgttaagttgccacctgaactctgcaaaatagtcatggcaccggtgtcagcaaatactttgttcagcttctcatttgtgccttccataatgtaccgtatccagtgtctgcttctttctgcaaagttgaaaatccagttgggcccaagaatgcaacagttcaacataacagctatgaagattctggaagcacttacaacaaaggaatgccaggagaaattttcaatggaatcattagaaacacttggagattctttcattaagtatgttacaggccaaaatctttttaacaaatacaaacatcgagaggacatgctaacctctatgagagaagaaaaggtctccaacccagctctatgccagctagcttgcaaaagcgaaattgtgggatacattcgaggtgaactatttaacccccaaaaatggaccattccagggttcggttatgactcacgcggtaacaacaaggttttcttccgagcaaccaataatatgtacagtctgaagaaaatatccataaaaagcaagagaattgctgatacagtggaagccttgactggggcctacctcagtacttgtggtgaactggctgcagttcattttatcaaagcactaggaatggatgttgaactgcatagtaaaatgcaagttgaaaggactattacaacaaaatctgaagaattaattgacgcggaaagcttgcagacaatgctcaaatatgtgttctatgatacttcactgttagtagaagcattgacacatagttcttacaatattactggtattacagcttgcaatgagaggcttgaatttctcggagatgctgtattggactacatcttaacttattacttttacagaaaataccccaattgtacaccagcactgttgacaaatctacgaaaagcttctgtgaacaactgttgctatgcacatgcagctgttaaagcagggttacacaagcacattcttcattcatcgtcaaaacagatggttaacgatcttgagaattcagggcggtcattttcaggcccatcacatggttgggaagctggcattagtctcccggagatttgtttgaagcaatagctggcgcaatttacgtggacagcgggaacgacaaagaggttgtctggagtgccatcaggcggctactggaacctcttgccacccccgggaccatggagcctgaccccgtgtcggaactgaaggaattatgcgagcacaaacactaccctaagccatcgtactctccaactcgtgacagtgtagctggagtgacaagggtggttgcacaggtgacggctgcgcggactgtgtactccgggactggaacaggccgcaaccaggatgtggcagaggttctcgctgcaaaggctctgctcaaaaagataaaggccgcagcaagaggatgaagcttggacttggcttggaccgggcgggcatttgatatttgggaatttgcgcacatgatagctgttctcgcagaggtaacaaaacaaactactgtagtatataaatgttgtgtatatgaatcaaggacagttgaactacccttggtttcgatagctgcaaaatacaaaacaaaaaaaaactcgaatctactatgcacagtggcttcatgtggtggacccttaatgaaatgatgaattctacgtggc

SEQ ID NO: 52831 - DNA, 2220 bp, Zea Mays
gtcaagggagggcggccccagcacaagcgccgcccattgatcgctttcctctccttccctctcccctcccagtcgctcgcctaaacctcaccagcgaccagtcgccatcaccatggatggacccgcctccccctccgccgccgccgagactgatacgcggggaggagaagctccatccaaagccaagcgaggcaatgccgaggagaaatatcaacatggacaaccggtttactttcctgaggaactaatggacaattgggtttctttttctcttcgtggcttgtattattgctacaacatctcgttgcaagggtcttgcaacacaactgctgatccaacggacataattttagctgtcaaatgtgacatggggcctgacttctttcggtactcttttaacttgggtggtactgatattaccattaagtacctgtacaagattcatctgaatcaggaacaggtactttttgctagaagattccagatcacggttctttctttgctcattaacagtaacagttcggaggtcagcaatgctataaaatacttccgtgaatggcaggtagatttgggggttgtctatctacttctgcccacagcgtcaggcaaaattgattggtgcggtatcaagttctcaacatcatcagcatatgatgtgactgataaaaatatgagacattgccattcttgtaaagatgctgatatactgcagacaatggatgacccttgctgcaggtgcatacttcagaattctgttgtatatgcccctcgtgaacgaaaattttatattattacaggacttgacttaaatgcaaaccaacctctggatttgaacaataggagtgctgttagctgcaaaagtgtctgcttctttctgcaaagttgaaaatccagttgggcccaagaatgcaacagttcaacataacagctatgaagggatacattcgaggtgaactatttaacccccaaaaatggaccattccagggttcggttatgactcacgcggtaacaacaaggttttcttccgagcaaccaataatatgtacagtctgaagaaaatatccataaaaagcaagagaattgctgatacagtggaagccttgactggggcctacctcagtacttgtggtgaactggctgcagttcattttatcaaagcactaggaatggatgttgaactgcatagtaaaatgcaagttgaaaggactattacaacaaaatctgaagaattaattgacgcggaaagcttgcagacaatgctcaaatatgtgttctatgatacttcactgttagtagaagcattgacacatagttcttacaatattactggtattacagcttgcaatgagaggcttgaatttctcggagatgctgtattggactacatcttaacttattacttttacagaaaataccccaattgtacaccagcactgttgacaaatctacgaaaagcttctgtgaacaactgttgctatgcacatgcagctgttaaagcagggttacacaagcacattcttcattcatcgtcaaaacagatggttaacgatcttgagaattcagggcggtcattttcaggcccatcacatggttgggaagctggcattagtctcccggaggatctcgcagatttgtttgaagcaatagctggcgcaatttacgtggacagcgggaacgacaaagaggttgtctggagtgccatcaggcggctactggaacctcttgccacccccgggaccatggagcctgaccccgtgtcggaactgaaggaattatgcgagcacaaacactaccctaagccatcgtactctccaactcgtgacagtgtagctggagtgacaagggtggttgcacaggtgacggctgcgcggactgtgtactccgggactggaacaggccgcaaccaggatgtggcagaggttctcgctgcaaaggctctgctcaaaaagataaaggccgcagcaagaggatgaagcttggacttggcttggaccgggcgggcatttgatatttgggaatttgcgcacatgatagctgttctcgcagaggtaacaaaacaaactactgtagtatataaatgttgtgtatatgaatcaaggacagttgaactacccttggtttcgatagctgcaaaatacaaaacaaaaaaaaactcgaatctactatgcacagtggcttcatgtggtggacccttaatgaaatgatgaattctacgtggc

SEQ ID NO: 52832 - DNA, 2576 bp, Zea Mays
cttcgcttccgtccgaagtctcctcgctgccggggtgtcaagggagggcggccccagcacaagcgccgcccattgatcgctttcctctccttccctctcccctcccagtcgctcgcctaaacctcaccagcgaccagtcgccatcaccatggatggacccgcctccccctccgccgccgccgagactgatacgcggggaggagaagctccatccaaagccaagcgaggcaatgccgaggagaaatatcaacatggacaaccggtttactttcctgaggaactaatggacaattgggtttctttttctcttcgtggcttgtattattgctacaacatctcgttgcaagggtcttgcaacacaactgctgatccaacggacataattttagctgtcaaatgtgacatggggcctgacttctttcggtactcttttaacttgggtggtactgatattaccattaagtacctgtacaagattcatctgaatcaggaacaggtactttttgctagaagattccagatcacggttctttctttgctcattaacagtaacagttcggaggtcagcaatgctataaaatacttccgtgaatggcaggtagatttgggggttgtctatctacttctgcccacagcgtcaggcaaaattgattggtgcggtatcaagttctcaacatcatcagcatatgatgtgactgataaaaatatgagacattgccattcttgtaaagatgctgatatactgcagacaatggatgacccttgctgcaggtgcatacttcagaattctgttgtatatgcccctcgtgaacgaaaattttatattattacaggacttgacttaaatgcaaaccaacctctggatttgaacaataggagtgctgttagctgcaaaagaacctacgagtgttaagttgccacctgaactctgcaaaatagtcatggcaccggtgtcagcaaatactttgttcagcttctcatttgtgccttccataatgtaccgtatccagtgtctgcttctttctgcaaagttgaaaatccagttgggcccaagaatgcaacagttcaacataacagctatgaagattctggaagcacttacaacaaaggaatgccaggagaaattttcaatggaatcattagaaacacttggagattctttcattaagtatgttacaggccaaaatctttttaacaaatacaaacatcgagaggacatgctaacctctatgagagaagaaaaggtctccaacccagctctatgccagctagcttgcaaaagcgaaattgtgggatacattcgaggtgaactatttaacccccaaaaatggaccattccagggttcggttatgactcacgcggtaacaacaaggttttcttccgagcaaccaataatatgtacagtctgaagaaaatatccataaaaagcaagagaattgctgatacagtggaagccttgactggggcctacctcagtacttgtggtgaactggctgcagttcattttatcaaagcactaggaatggatgttgaactgcatagtaaaatgcaagttgaaaggactattacaacaaaatctgaagaattaattgacgcggaaagcttgcagacaatgctcaaatatgtgttctatgatacttcactgttagtagaagcattgacacatagttcttacaatattactggtattacagcttgcaatgagaggcttgaatttctcggagatgctgtattggactacatcttaacttattacttttacagaaaataccccaattgtacaccagcactgttgacaaatctacgaaaagcttctgtgaacaactgttgctatgcacatgcagctgttaaagcagggttacacaagcacattcttcattcatcgtcaaaacagatggttaacgatcttgagaattcagggcggtcattttcaggcccatcacatggttgggaagctggcattagtctcccggaggatctcgcagatttgtttgaagcaatagctggcgcaatttacgtggacagcgggaacgacaaagaggttgtctggagtgccatcaggcggctactggaacctcttgccacccccgggaccatggagcctgaccccgtgtcggaactgaaggaattatgcgagcacaaacactaccctaagccatcgtactctccaactcgtgacagtgtagctggagtgacaagggtggttgcacaggtgacggctgcgcggactgtgtactccgggactggaacaggccgcaaccaggatgtggcagaggttctcgctgcaaaggctctgctcaaaaagataaaggccgcagcaagaggatgaagcttggacttggcttggaccgggcgggcatttgatatttgggaatttgcgcacatgatagctgttctcgcagaggtaacaaaacaaactactgtagtatataaatgttgtgtatatgaatcaaggacagttgaactacccttggtttcgatagctgcaaaatacaaaacaaaaaaaaactcgaatctactatgcacagtggcttcatgtggtggacccttaatgaaatgatgaattctacgtggc

SEQ ID NO: 52833 - DNA, 2379 bp, Zea Mays
caaggatggccttcgcttccgtccgaagtctcctcgctgccggggtgtcaagggagggcggccccagcacaagcgccgcccattgatcgctttcctctccttccctctcccctcccagtcgctcgcctaaacctcaccagcgaccagtcgccatcaccatggatggacccgcctccccctccgccgccgccgagactgatacgcggggaggagaagctccatccaaagccaagcgaggcaatgccgaggagaaatatcaacatggacaaccggtttactttcctgaggaactaatggacaattgggtttctttttctcttcgtggcttgtattattgctacaacatctcgttgcaagggtcttgcaacacaactgctgatccaacggacataattttagctgtcaaatgtgacatggggcctgacttctttcggtactcttttaacttgggtggtactgatattaccattaagtacctgtacaagattcatctgaatcaggaacaggtactttttgctagaagattccagatcacggttctttctttgctcattaacagtaacagttcggaggtcagcaatgctataaaatacttccgtgaatggcaggtagatttgggggttgtctatctacttctgcccacagcgtcaggcaaaattgattggtgcggtatcaagttctcaacatcatcagcatatgatgtgactgataaaaatatgagacattgccattcttgtaaagatgctgatatactgcagacaatggatgacccttgctgcaggtgcatacttcagaattctgttgtatatgcccctcgtgaacgaaaattttatattattacaggacttgacttaaatgcaaaccaacctctggatttgaacaataggagtgctgttagctgcaaaagaacctacgagtgttaagttgccacctgaactctgcaaaatagtcatggcaccggtgtcagcaaatactttgttcagcttctcatttgtgccttccataatgtaccgtatccagtgtctgcttctttctgcaaagttgaaaatccagttgggcccaagaatgcaacagttcaacataacagctatgaagggatacattcgaggtgaactatttaacccccaaaaatggaccattccagggttcggttatgactcacgcggtaacaacaaggttttcttccgagcaaccaataatatgtacagtctgaagaaaatatccataaaaagcaagagaattgctgatacagtggaagccttgactggggcctacctcagtacttgtggtgaactggctgcagttcattttatcaaagcactaggaatggatgttgaactgcatagtaaaatgcaagttgaaaggactattacaacaaaatctgaagaattaattgacgcggaaagcttgcagacaatgctcaaatatgtgttctatgatacttcactgttagtagaagcattgacacatagttcttacaatattactggtattacagcttgcaatgagaggcttgaatttctcggagatgctgtattggactacatcttaacttattacttttacagaaaataccccaattgtacaccagcactgttgacaaatctacgaaaagcttctgtgaacaactgttgctatgcacatgcagctgttaaagcagggttacacaagcacattcttcattcatcgtcaaaacagatggttaacgatcttgagaattcagggcggtcattttcaggcccatcacatggttgggaagctggcattagtctcccggaggatctcgcagatttgtttgaagcaatagctggcgcaatttacgtggacagcgggaacgacaaagaggttgtctggagtgccatcaggcggctactggaacctcttgccacccccgggaccatggagcctgaccccgtgtcggaactgaaggaattatgcgagcacaaacactaccctaagccatcgtactctccaactcgtgacagtgtagctggagtgacaagggtggttgcacaggtgacggctgcgcggactgtgtactccgggactggaacaggccgcaaccaggatgtggcagaggttctcgctgcaaaggctctgctcaaaaagataaaggccgcagcaagaggatgaagcttggacttggcttggaccgggcgggcatttgatatttgggaatttgcgcacatgatagctgttctcgcagaggtaacaaaacaaactactgtagtatataaatgttgtgtatatgaatcaaggacagttgaactacccttggtttcgatagctgcaaaatacaaaacaaaaaaaaactcgaatctactatgcacagtggcttcatgtggtggacccttaatgaaatgatgaattctacgtggc

SEQ ID NO: 52834 - DNA, 2553 bp, Zea Mays
cgagacttcacaaggatggccttcgcttccgtccgaagtctcctcgctgccggggtgtcaagggagggcggccccagcacaagcgccgcccattgatcgctttcctctccttccctctcccctcccagtcgctcgcctaaacctcaccagcgaccagtcgccatcaccatggatggacccgcctccccctccgccgccgccgagactgatacgcggggaggagaagctccatccaaagccaagcgaggcaatgccgaggagaaatatcaacatggacaaccggtttactttcctgaggaactaatggacaattgggtttctttttctcttcgtggcttgtattattgctacaacatctcgttgcaagggtcttgcaacacaactgctgatccaacggacataattttagctgtcaaatgtgacatggggcctgacttctttcggtactcttttaacttgggtggtactgatattaccattaagtacctgtacaagattcatctgaatcaggaacaggtactttttgctagaagattccagatcacggttctttctttgctcattaacagtaacagttcggaggtcagcaatgctataaaatacttccgtgaatggcaggtagatttgggggttgtctatctacttctgcccacagcgtcaggcaaaattgattggtgcatacttcagaattctgttgtatatgcccctcgtgaacgaaaattttatattattacaggacttgacttaaatgcaaaccaacctctggatttgaacaataggagtgctgttagctgcaaaagtaaaccactgttggtcgccagtggattattcacagtgcaaaacttcctctacaaatgctacggaaaaaggaaagaacctacgagtgttaagttgccacctgaactctgcaaaatagtcatggcaccggtgtcagcaaatactttgttcagcttctcatttgtgccttccataatgtaccgtatccagtgtctgcttctttctgcaaagttgaaaatccagttgggcccaagaatgcaacagttcaacataacagctatgaagattctggaagcacttacaacaaaggaatgccaggagaaattttcaatggaatcattagaaacacttggagattctttcattaagtatgttacaggccaaaatctttttaacaaatacaaacatcgagaggacatgctaacctctatgagagaagaaaaggtctccaacccagctctatgccagctagcttgcaaaagcgaaattgtgggatacattcgaggtgaactatttaacccccaaaaatggaccattccagggttcggttatgactcacgcggtaacaacaaggttttcttccgagcaaccaataatatgtacagtctgaagaaaatatccataaaaagcaagagaattgctgatacagtggaagccttgactggggcctacctcagtacttgtggtgaactggctgcagttcattttatcaaagcactaggaatggatgttgaactgcatagtaaaatgcaagttgaaaggactattacaacaaaatctgaagaattaattgacgcggaaagcttgcagacaatgctcaaatatgtgttctatgatacttcactgttagtagaagcattgacacatagttcttacaatattactggtattacagcttgcaatgagaggcttgaatttctcggagatgctgtattggactacatcttaacttattacttttacagaaaataccccaattgtacaccagcactgttgacaaatctacgaaaagcttctgtgaacaactgttgctatgcacatgcagctgttaaagcagggttacacaagcacattcttcattcatcgtcaaaacagatggttaacgatcttgagaattcagggcggtcattttcaggcccatcacatggttgggaagctggcattagtctcccggaggatctcgcagatttgtttgaagcaatagctggcgcaatttacgtggacagcgggaacgacaaagaggttgtctggagtgccatcaggcggctactggaacctcttgccacccccgggaccatggagcctgaccccgtgtcggaactgaaggaattatgcgagcacaaacactaccctaagccatcgtactctccaactcgtgacagtgtagctggagtgacaagggtggttgcacaggtgacggctgcgcggactgtgtactccgggactggaacaggccgcaaccaggatgtggcagaggttctcgctgcaaaggctctgctcaaaaagataaaggccgcagcaagaggatgaagcttggacttggcttggaccgggcgggcatttgatatttgggaatttgcgcacatgatagctgttctcgcagaggtaacaaaacaaactactgtagtatataaatgttgtgtatatgaatcaaggacagttgaactacccttggtttcgatagctgcaaaatacaaaacaaaaaaaaactcgaatctactatgcacagtggcttcatgtggtggacccttaatgaaatgatgaattctacgtggc

SEQ ID NO: 52835 - DNA, 929 bp, Zea Mays
cttcgcttccgtccgaagtctcctcgctgccggggtgtcaagggagggcggccccagcacaagcgccgcccattgatcgctttcctctccttccctctcccctcccagtcgctcgcctaaacctcaccagcgaccagtcgccatcaccatggatggacccgcctccccctccgccgccgccgagactgatacgcggggaggagaagctccatccaaagccaagcgaggcaatgccgaggagaaatatcaacatggacaaccggtttactttcctgaggaactaatggacaattgggtttctttttctcttcgtggcttgtattattgctacaacatctcgttgcaagggtcttgcaacacaactgctgatccaacggacataattttagctgtcaaatgtgacatggggcctgacttctttcggtactcttttaacttgggtggtactgatattaccattaagtacctgtacaagattcatctgaatcaggaacaggtactttttgctagaagattccagatcacggttctttctttgctcattaacagtaacagttcggaggtcagcaatgctataaaatacttccgtgaatggcaggtagatttgggggttgtctatctacttctgcccacagcgtcaggcaaaattgattggtgcggtatcaagttctcaacatcatcagcatatgatgtgactgataaaaatatgagacattgccattcttgtaaagatgctgatatactgcagacaatggatgacccttgctgcaggtgcatacttcagaattctgttgtatatgcccctcgtgaacgaaaattttatattattacaggacttgacttaaatgcaaaccaacctctggatttgaacaataggagtgctgttagctgcaaaagtcggtattctttttgtatgctctggatgtggc

SEQ ID NO: 52836 - DNA, 2258 bp, Zea Mays
caatccttcaccatcctaagctagccaagcatgtggaggctaaagatcggcgagaggccaagcaacccgctgcttcgctcgcccaatggcttccttgggagagaggtgtgggagttcgaccccgccgcaggcacgccggaggagcgcgccgaggtcgataggctgcgccaggagtacacccgcaaccgcttcacgcgacggcaatgcagtgaccttctcatgcgcatgcagtatgcaaaacagaaccttcataatacaaaccttccggctatcaagattgaccaggattcagacgtcacagaagaaactatactaattacattgaggcgtgctcttaatcaatattcttctttgcaaggacctgctgggcattggcctggggattacggcgggatttcgttcattttaccactcatgatgataggtgtatacgattgggctgggaacaatgcaatcattcctgagttatggatgcttccacattttctcccaattcatcctggaaggttttggtgcttttgtcggatggtttacatgccaatggcttacatttatggaaaaaagtttgttgggcctatcactacaactattttagaaataagaaatgagctctacaatataccatataataagatcaactggaacaaggcttgcaattcttgtgccaaggaagaccttatctatgagccttcatggttgcaaagtattgcaatggcttatttgaataagtttatagaaccattatcaaatctttggccaatgaataagctacgagaaagagctatgagtgacctcatggaacatatccactatgaagatgaaaccagcaactatgttggcttatgccctataaacaaggcattaaatatgatatgttgttggatagaaaaaccaaactcaaatgaatttagacaacatctcccaaggattcatgatttcctatggcttggagaagacggaatgaagtcaaaggtgtatgttggttgccatagttgggaaactgcgctcatagttcaggctttttgctcaacagggctcaccgaggagttttgttcgactcttcaaaaagctcatcagttcttaaaaaatgcacaggttatcaaaaacattcctgattacaagagctactaccgtgaaagaactaaaggttcttggactctatccaatggagaaaacttttggcctattgctgatacaactgctgaggcacttaaggcaatactgttgctgtctaacattccttcagaacttgtcggggatccaataaaacaagaacgactatatgatgccgttgattgcctcctttctttcgtgaacaaagatggtacattatcatcagctgaatgtaaacgaacaacttcatgggtggagtttatcaatccttctgagagttttcgtaatatcatcgtcgactatccatatcctgaatgcacatcatcattaattcaagctttagtgctgtttagaggcaagcatccaatatatcgtcgtgatgagatagacaaaattatcaaaagtggtgcatcattcattgagaaagtacaacgaaaggatgggtcctggtatggttcttgggctgtgtgtttcacttatgcaacattctttgctataaaaggattagttgctgcaggaagaacataccggaatagtttggctattaggaaagcatgcaacttcttgttgtcaaagcaactaggaaccggtggatggggagaaaactatcttggttgtcaaattgaggagtatgttgacagtggcagtccacatggagtcaacactgcacaggcgatgctagctttactctacgctgggcaggtcgaacaagacccagcgccactataccgtgctgcaaaagaattaattaacatgcagatggagaacggagaatttccccaacaagaaattgttggcaacttcaactcctcacttttcttcaattacccgaactaccgaaacttatttcccatctgggctttaggagaatttcgccgccgacttgttgcaaaaaaaggttaagatgggtatcttaagctatttctaataattgtatttgggatacaagtatccatgtatattttatttttcgtgatgatgggaatgtaacacaaaataaaatttatatttagtacgtatatgttaatatttgtaagattatcacaaacaagttgataatcatcagtgatctggttcctcaaattcaataacaaggatgcaaaatgtttggtagcaagaatactgcaatggaatggaatagctaa

SEQ ID NO: 52837 - DNA, 2240 bp, Zea Mays
caatccttcaccatcctaagctagccaagcatgtggaggctaaagatcggcgagaggccaagcaacccgctgcttcgctcgcccaatggcttccttgggagagaggtgtgggagttcgaccccgccgcaggcacgccggaggagcgcgccgaggtcgataggctgcgccaggagtacacccgcaaccgcttcacgcgacggcaatgcagtgaccttctcatgcgcatgcagtatgcaaaacagaaccttcataatacaaaccttccggctatcaagattgaccaggattcagacgtcacagaagaaactatactaattacattgaggcgtgctcttaatcaatattcttctttgcaaggacctgctgggcattggcctggggattacggcgggatttcgttcattttaccactcatgatatttgcattacatgtcacacgatcaatggatgaagttttgtcaatagagcatatacgtgagatatgtcgctacatttataacatgcagaatgaggatggaggctggggaacacataccttgggaccaagctccatgtttggcacatgtgtaaactatgcaaccttaaggattctaggagaggtgcttgatggagaaaatgatgcattatccaaagggcgttcttggattttgtctcatggaagtgcaactgcagcaccacaatgggcaaagatatatctctcgatgataggtgtatacgattgggctgggaacaatgcaatcattcctgagttatggatgcttccacattttctcccaattcatcctggaaggttttggtgcttttgtcggatggtttacatgccaatggcttacatttatggaaaaaagtttgttgggcctatcactacaactattttagaaataagaaatgagctctacaatataccatataataagatcaactggaacaaggcttgcaattcttgtgccaaggtgtatgttggttgccatagttgggaaactgcgctcatagttcaggctttttgctcaacagggctcaccgaggagttttgttcgactcttcaaaaagctcatcagttcttaaaaaatgcacaggttatcaaaaacattcctgattacaagagctactaccgtgaaagaactaaaggttcttggactctatccaatggagaaaacttttggcctattgctgatacaactgctgaggcacttaaggcaatactgttgctgtctaacattccttcagaacttgtcggggatccaataaaacaagaacgactatatgatgccgttgattgcctcctttctttcgtgaacaaagatggtacattatcatcagctgaatgtaaacgaacaacttcatgggtggagtttatcaatccttctgagagttttcgtaatatcatcgtcgactatccatatcctgaatgcacatcatcattaattcaagctttagtgctgtttagaggcaagcatccaatatatcgtcgtgatgagatagacaaaattatcaaaagtggtgcatcattcattgagaaagtacaacgaaaggatgggtcctggtatggttcttgggctgtgtgtttcacttatgcaacattctttgctataaaaggattagttgctgcaggaagaacataccggaatagtttggctattaggaaagcatgcaacttcttgttgtcaaagcaactaggaaccggtggatggggagaaaactatcttggttgtcaaattgaggagtatgttgacagtggcagtccacatggagtcaacactgcacaggcgatgctagctttactctacgctgggcaggtcgaacaagacccagcgccactataccgtgctgcaaaagaattaattaacatgcagatggagaacggagaatttccccaacaagaaattgttggcaacttcaactcctcacttttcttcaattacccgaactaccgaaacttatttcccatctgggctttaggagaatttcgccgccgacttgttgcaaaaaaaggttaagatgggtatcttaagctatttctaataattgtatttgggatacaagtatccatgtatattttatttttcgtgatgatgggaatgtaacacaaaataaaatttatatttagtacgtatatgttaatatttgtaagattatcacaaacaagttgataatcatcagtgatctggttcctcaaattcaataacaaggatgcaaaatgtttggtagcaagaatactgcaatggaatggaatagctaa

SEQ ID NO: 52838 - DNA, 2539 bp, Zea Mays
caatccttcaccatcctaagctagccaagcatgtggaggctaaagatcggcgagaggccaagcaacccgctgcttcgctcgcccaatggcttccttgggagagaggtgtgggagttcgaccccgccgcaggcacgccggaggagcgcgccgaggtcgataggctgcgccaggagtacacccgcaaccgcttcacgcgacggcaatgcagtgaccttctcatgcgcatgcagtatgcaaaacagaaccttcataatacaaaccttccggctatcaagattgaccaggattcagacgtcacagaagaaactatactaattacattgaggcgtgctcttaatcaatattcttctttgcaaggacctgctgggcattggcctggggattacggcgggatttcgttcattttaccactcatgatatttgcattacatgtcacacgatcaatggatgaagttttgtcaatagagcatatacgtgagatatgtcgctacatttataacatgcagaatgaggatggaggctggggaacacataccttgggaccaagctccatgtttggcacatgtgtaaactatgcaaccttaaggattctaggagaggtgcttgatggagaaaatgatgcattatccaaagggcgttcttggattttgtctcatggaagtgcaactgcagcaccacaatgggcaaagatatatctctcgatgataggtgtatacgattgggctgggaacaatgcaatcattcctgagttatggatgcttccacattttctcccaattcatcctggttttggtgcttttgtcggatggtttacatgccaatggcttacatttatggaaaaaagtttgttgggcctatcactacaactattttagaaataagaaatgagctctacaatataccatataataagatcaactggaacaaggcttgcaattcttgtgccaaggaagaccttatctatgagccttcatggttgcaaagtattgcaatggcttatttgaataagtttatagaaccattatcaaatctttggccaatgaataagctacgagaaagagctatgagtgacctcatggaacatatccactatgaagatgaaaccagcaactatgttggcttatgccctataaacaaggcattaaatatgatatgttgttggatagaaaaaccaaactcaaatgaatttagacaacatctcccaaggattcatgatttcctatggcttggagaagacggaatgaagtcaaaggtgtatgttggttgccatagttgggaaactgcgctcatagttcaggctttttgctcaacagggctcaccgaggagttttgttcgactcttcaaaaagctcatcagttcttaaaaaatgcacaggttatcaaaaacattcctgattacaagagctactaccgtgaaagaactaaaggttcttggactctatccaatggagaaaacttttggcctattgctgatacaactgctgaggcacttaaggcaatactgttgctgtctaacattccttcagaacttgtcggggatccaataaaacaagaacgactatatgatgccgttgattgcctcctttctttcgtgaacaaagatggtacattatcatcagctgaatgtaaacgaacaacttcatgggtggagtttatcaatccttctgagagttttcgtaatatcatcgtcgactatccatatcctgaatgcacatcatcattaattcaagctttagtgctgtttagaggcaagcatccaatatatcgtcgtgatgagatagacaaaattatcaaaagtggtgcatcattcattgagaaagtacaacgaaaggatgggtcctggtatggttcttgggctgtgtgtttcacttatgcaacattctttgctataaaaggattagttgctgcaggaagaacataccggaatagtttggctattaggaaagcatgcaacttcttgttgtcaaagcaactaggaaccggtggatggggagaaaactatcttggttgtcaaattgaggagtatgttgacagtggcagtccacatggagtcaacactgcacaggcgatgctagctttactctacgctgggcaggtcgaacaagacccagcgccactataccgtgctgcaaaagaattaattaacatgcagatggagaacggagaatttccccaacaagaaattgttggcaacttcaactcctcacttttcttcaattacccgaactaccgaaacttatttcccatctgggctttaggagaatttcgccgccgacttgttgcaaaaaaaggttaagatgggtatcttaagctatttctaataattgtatttgggatacaagtatccatgtatattttatttttcgtgatgatgggaatgtaacacaaaataaaatttatatttagtacgtatatgttaatatttgtaagattatcacaaacaagttgataatcatcagtgatctggttcctcaaattcaataacaaggatgcaaaatgtttggtagcaagaatactgcaatggaatggaatagctaa

SEQ ID NO: 52839 - DNA, 2376 bp, Zea Mays
caatccttcaccatcctaagctagccaagcatgtggaggctaaagatcggcgagaggccaagcaacccgctgcttcgctcgcccaatggcttccttgggagagaggtgtgggagttcgaccccgccgcaggcacgccggaggagcgcgccgaggtcgataggctgcgccaggagtacacccgcaaccgcttcacgcgacggcaatgcagtgaccttctcatgcgcatgcagtatgcaaaacagaaccttcataatacaaaccttccggctatcaagattgaccaggattcagacgtcacagaagaaactatactaattacattgaggcgtgctcttaatcaatattcttctttgcaaggacctgctgggcattggcctggggattacggcgggatttcgttcattttaccactcatgatatttgcattacatgtcacacgatcaatggatgaagttttgtcaatagagcatatacgtgagatatgtcgctacatttataacatgcagaatgaggatggaggctggggaacacataccttgggaccaagctccatgtttggcacatgtgtaaactatgcaaccttaaggattctaggagaggtgcttgatggagaaaatgatgcattatccaaagggcgttcttggattttgtctcatggaagtgcaactgcagcaccacaatgggcaaagatatatctctcgatgataggtgtatacgattgggctgggaacaatgcaatcattcctgagttatggatgcttccacattttctcccaattcatcctggaagaccttatctatgagccttcatggttgcaaagtattgcaatggcttatttgaataagtttatagaaccattatcaaatctttggccaatgaataagctacgagaaagagctatgagtgacctcatggaacatatccactatgaagatgaaaccagcaactatgttggcttatgccctataaacaaggcattaaatatgatatgttgttggatagaaaaaccaaactcaaatgaatttagacaacatctcccaaggattcatgatttcctatggcttggagaagacggaatgaagtcaaaggtgtatgttggttgccatagttgggaaactgcgctcatagttcaggctttttgctcaacagggctcaccgaggagttttgttcgactcttcaaaaagctcatcagttcttaaaaaatgcacaggttatcaaaaacattcctgattacaagagctactaccgtgaaagaactaaaggttcttggactctatccaatggagaaaacttttggcctattgctgatacaactgctgaggcacttaaggcaatactgttgctgtctaacattccttcagaacttgtcggggatccaataaaacaagaacgactatatgatgccgttgattgcctcctttctttcgtgaacaaagatggtacattatcatcagctgaatgtaaacgaacaacttcatgggtggagtttatcaatccttctgagagttttcgtaatatcatcgtcgactatccatatcctgaatgcacatcatcattaattcaagctttagtgctgtttagaggcaagcatccaatatatcgtcgtgatgagatagacaaaattatcaaaagtggtgcatcattcattgagaaagtacaacgaaaggatgggtcctggtatggttcttgggctgtgtgtttcacttatgcaacattctttgctataaaaggattagttgctgcaggaagaacataccggaatagtttggctattaggaaagcatgcaacttcttgttgtcaaagcaactaggaaccggtggatggggagaaaactatcttggttgtcaaattgaggagtatgttgacagtggcagtccacatggagtcaacactgcacaggcgatgctagctttactctacgctgggcaggtcgaacaagacccagcgccactataccgtgctgcaaaagaattaattaacatgcagatggagaacggagaatttccccaacaagaaattgttggcaacttcaactcctcacttttcttcaattacccgaactaccgaaacttatttcccatctgggctttaggagaatttcgccgccgacttgttgcaaaaaaaggttaagatgggtatcttaagctatttctaataattgtatttgggatacaagtatccatgtatattttatttttcgtgatgatgggaatgtaacacaaaataaaatttatatttagtacgtatatgttaatatttgtaagattatcacaaacaagttgataatcatcagtgatctggttcctcaaattcaataacaaggatgcaaaatgtttggtagcaagaatactgcaatggaatggaatagctaa

SEQ ID NO: 52840 - DNA, 2430 bp, Zea Mays
gcaatccttcaccatcctaagctagccaagcatgtggaggctaaagatcggcgagaggccaagcaacccgctgcttcgctcgcccaatggcttccttgggagagaggtgtgggagttcgaccccgccgcaggcacgccggaggagcgcgccgaggtcgataggctgcgccaggagtacacccgcaaccgcttcacgcgacggcaatgcagtgaccttctcatgcgcatgcagtatgcaaaacagaaccttcataatacaaaccttccggctatcaagattgaccaggattcagacgtcacagaagaaactatactaattacattgaggcgtgctcttaatcaatattcttctttgcaaggacctgctgggcattggcctggggattacggcgggatttcgttcattttaccactcatgatatttgcattacatgtcacacgatcaatggatgaagttttgtcaatagagcatatacgtgagatatgtcgctacatttataacatgcagaatgaggatggaggctggggaacacataccttgggaccaagctccatgtttggcacatgtgtaaactatgcaaccttaaggattctaggagaggtgcttgatggagaaaatgatgcattatccaaagggcgttcttggattttgtctcatggaagtgcaactgcagcaccacaatgggcaaagatatatctctcgatgataggtgtatacgattgggctgggaacaatgcaatcattcctgagttatggatgcttccacattttctcccaattcatcctggaaggttttggtgcttttgtcggatggtttacatgccaatggcttacatttatggaaaaaagtttgttgggcctatcactacaactattttagaaataagaaatgagctctacaatataccatataataagatcaactggaacaaggcttgcaattcttgtgccaaggaagaccttatctatgagccttcatggttgcaaagtattgcaatggcttatttgaataagtttatagaaccattatcaaatctttggccaatgaataagctacgagaaagagctatgagtgacctcatggaacatatccactatgaagatgaaaccagcaactatgttggcttatgccctataaacaaggtgtatgttggttgccatagttgggaaactgcgctcatagttcaggctttttgctcaacagggctcaccgaggagttttgttcgactcttcaaaaagctcatcagttcttaaaaaatgcacaggttatcaaaaacattcctgattacaagagctactaccgtgaaagaactaaaggttcttggactctatccaatggagaaaacttttggcctattgctgatacaactgctgaggcacttaaggcaatactgttgctgtctaacattccttcagaacttgtcggggatccaataaaacaagaacgactatatgatgccgttgattgcctcctttctttcgtgaacaaagatggtacattatcatcagctgaatgtaaacgaacaacttcatgggtggagtttatcaatccttctgagagttttcgtaatatcatcgtcgactatccatatcctgaatgcacatcatcattaattcaagctttagtgctgtttagaggcaagcatccaatatatcgtcgtgatgagatagacaaaattatcaaaagtggtgcatcattcattgagaaagtacaacgaaaggatgggtcctggtatggttcttgggctgtgtgtttcacttatgcaacattctttgctataaaaggattagttgctgcaggaagaacataccggaatagtttggctattaggaaagcatgcaacttcttgttgtcaaagcaactaggaaccggtggatggggagaaaactatcttggttgtcaaattgaggagtatgttgacagtggcagtccacatggagtcaacactgcacaggcgatgctagctttactctacgctgggcaggtcgaacaagacccagcgccactataccgtgctgcaaaagaattaattaacatgcagatggagaacggagaatttccccaacaagaaattgttggcaacttcaactcctcacttttcttcaattacccgaactaccgaaacttatttcccatctgggctttaggagaatttcgccgccgacttgttgcaaaaaaaggttaagatgggtatcttaagctatttctaataattgtatttgggatacaagtatccatgtatattttatttttcgtgatgatgggaatgtaacacaaaataaaatttatatttagtacgtatatgttaatatttgtaagattatcacaaacaagttgataatcatcagtgatctggttcctcaaattcaataacaaggatgcaaaatgtttggtagcaagaatactgcaatggaatggaatagctaa

SEQ ID NO: 52841 - DNA, 2157 bp, Zea Mays
cagcaatccttcaccatcctaagctagccaagcatgtggaggctaaagatcggcgagaggccaagcaacccgctgcttcgctcgcccaatggcttccttgggagagaggtgtgggagttcgaccccgccgcaggcacgccggaggagcgcgccgaggtcgataggctgcgccaggagtacacccgcaaccgcttcacgcgacggcaatgcagtgaccttctcatgcgcatgcagtatgcaaaacagaaccttcataatacaaaccttccggctatcaagattgaccaggattcagacgtcacagaagaaactatactaattacattgaggcgtgctcttaatcaatattcttctttgcaaggacctgctgggcattggcctggggattacggcgggatttcgttcattttaccactcatgatatttgcattacatgtcacacgatcaatggatgaagttttgtcaatagagcatatacgtgagatatgtcgctacatttataacatgcagaatgaggatggaggctggggaacacataccttgggaccaagctccatgtttggcacatgtgtaaactatgcaaccttaaggattctaggagaggtgcttgatggagaaaatgatgcattatccaaagggcgttcttggattttgtctcatggaagtgcaactgcagcaccacaatgggcaaagatatatctctcgatgataggtgtatacgattgggctgggaacaatgcaatcattcctgagttatggatgcttccacattttctcccaattcatcctggaagaccttatctatgagccttcatggttgcaaagtattgcaatggcttatttgaataagtttatagaaccattatcaaatctttggccaatgaataagctacgagaaagagctatgagtgacctcatggaacatatccactatgaagatgaaaccagcaactatgttggcttatgccctataaacaaggcattaaatatgatatgttgttggatagaaaaaccaaactcaaatgaatttagacaacatctcccaaggattcatgatttcctatggcttggagaagacggaatgaagtcaaaggttatcaaaaacattcctgattacaagagctactaccgtgaaagaactaaaggttcttggactctatccaatggagaaaacttttggcctattgctgatacaactgctgaggcacttaagaacaaagatggtacattatcatcagctgaatgtaaacgaacaacttcatgggtggagtttatcaatccttctgagagttttcgtaatatcatcgtcgactatccatatcctgaatgcacatcatcattaattcaagctttagtgctgtttagaggcaagcatccaatatatcgtcgtgatgagatagacaaaattatcaaaagtggtgcatcattcattgagaaagtacaacgaaaggatgggtcctggtatggttcttgggctgtgtgtttcacttatgcaacattctttgctataaaaggattagttgctgcaggaagaacataccggaatagtttggctattaggaaagcatgcaacttcttgttgtcaaagcaactaggaaccggtggatggggagaaaactatcttggttgtcaaattgaggagtatgttgacagtggcagtccacatggagtcaacactgcacaggcgatgctagctttactctacgctgggcaggtcgaacaagacccagcgccactataccgtgctgcaaaagaattaattaacatgcagatggagaacggagaatttccccaacaagaaattgttggcaacttcaactcctcacttttcttcaattacccgaactaccgaaacttatttcccatctgggctttaggagaatttcgccgccgacttgttgcaaaaaaaggttaagatgggtatcttaagctatttctaataattgtatttgggatacaagtatccatgtatattttatttttcgtgatgatgggaatgtaacacaaaataaaatttatatttagtacgtatatgttaatatttgtaagattatcacaaacaagttgataatcatcagtgatctggttcctcaaattcaataacaaggatgcaaaatgtttggtagcaagaatactgcaatggaatggaatagctaa

SEQ ID NO: 52842 - DNA, 2577 bp, Zea Mays
cagcaatccttcaccatcctaagctagccaagcatgtggaggctaaagatcggcgagaggccaagcaacccgctgcttcgctcgcccaatggcttccttgggagagaggtgtgggagttcgaccccgccgcaggcacgccggaggagcgcgccgaggtcgataggctgcgccaggagtacacccgcaaccgcttcacgcgacggcaatgcagtgaccttctcatgcgcatgcagtatgcaaaacagaaccttcataatacaaaccttccggctatcaagattgaccaggattcagacgtcacagaagaaactatactaattacattgaggcgtgctcttaatcaatattcttctttgcaaggacctgctgggcattggcctggggattacggcgggatttcgttcattttaccactcatgatatttgcattacatgtcacacgatcaatggatgaagttttgtcaatagagcatatacgtgagatatgtcgctacatttataacatgcagaatgaggatggaggctggggaacacataccttgggaccaagctccatgtttggcacatgtgtaaactatgcaaccttaaggattctaggagaggtgcttgatggagaaaatgatgcattatccaaagggcgttcttggattttgtctcatggaagtgcaactgcagcaccacaatgggcaaagatatatctctcgatgataggtgtatacgattgggctgggaacaatgcaatcattcctgagttatggatgcttccacattttctcccaattcatcctggaaggttttggtgcttttgtcggatggtttacatgccaatggcttacatttatggaaaaaagtttgttgggcctatcactacaactattttagaaataagaaatgagctctacaatataccatataataagatcaactggaacaaggcttgcaattcttgtgccaaggaagaccttatctatgagccttcatggttgcaaagtattgcaatggcttatttgaataagtttatagaaccattatcaaatctttggccaatgaataagctacgagaaagagctatgagtgacctcatggaacatatccactatgaagatgaaaccagcaactatgttggcttatgccctataaacaaggcattaaatatgatatgttgttggatagaaaaaccaaactcaaatgaatttagacaacatctcccaaggattcatgatttcctatggcttggagaagacggaatgaagtcaaaggtgtatgttggttgccatagttgggaaactgcgctcatagttcaggctttttgctcaacagggctcaccgaggagttttgttcgactcttcaaaaagctcatcagttcttaaaaaatgcacaggttatcaaaaacattcctgattacaagagctactaccgtgaaagaactaaaggttcttggactctatccaatggagaaaacttttggcctattgctgatacaactgctgaggcacttaaggcaatactgttgctgtctaacattccttcagaacttgtcggggatccaataaaacaagaacgactatatgatgccgttgattgcctcctttctttcgtgaacaaagatggtacattatcatcagctgaatgtaaacgaacaacttcatgggtggaggtgagaatacctttgcatggtattaattaattttatcaatccttctgagagttttcgtaatatcatcgtcgactatccatatcctgaatgcacatcatcattaattcaagctttagtgctgtttagaggcaagcatccaatatatcgtcgtgatgagatagacaaaattatcaaaagtggtgcatcattcattgagaaagtacaacgaaaggatgggtcctggtatggttcttgggctgtgtgtttcacttatgcaacattctttgctataaaaggattagttgctgcaggaagaacataccggaatagtttggctattaggaaagcatgcaacttcttgttgtcaaagcaactaggaaccggtggatggggagaaaactatcttggttgtcaaattgaggagtatgttgacagtggcagtccacatggagtcaacactgcacaggcgatgctagctttactctacgctgggcaggtcgaacaagacccagcgccactataccgtgctgcaaaagaattaattaacatgcagatggagaacggagaatttccccaacaagaaattgttggcaacttcaactcctcacttttcttcaattacccgaactaccgaaacttatttcccatctgggctttaggagaatttcgccgccgacttgttgcaaaaaaaggttaagatgggtatcttaagctatttctaataattgtatttgggatacaagtatccatgtatattttatttttcgtgatgatgggaatgtaacacaaaataaaatttatatttagtacgtatatgttaatatttgtaagattatcacaaacaagttgataatcatcagtgatctggttcctcaaattcaataacaaggatgcaaaatgtttggtagcaagaatactgcaatggaatggaatagctaa

SEQ ID NO: 52843 - DNA, 2518 bp, Zea Mays
cagcaatccttcaccatcctaagctagccaagcatgtggaggctaaagatcggcgagaggccaagcaacccgctgcttcgctcgcccaatggcttccttgggagagaggtgtgggagttcgaccccgccgcaggcacgccggaggagcgcgccgaggtcgataggctgcgccaggagtacacccgcaaccgcttcacgcgacggcaatgcagtgaccttctcatgcgcatgcagtatgcaaaacagaaccttcataatacaaaccttccggctatcaagattgaccaggattcagacgtcacagaagaaactatactaattacattgaggcgtgctcttaatcaatattcttctttgcaaggacctgctgggcattggcctggggattacggcgggatttcgttcattttaccactcatgatatttgcattacatgtcacacgatcaatggatgaagttttgtcaatagagcatatacgtgagatatgtcgctacatttataacatgcagaatgaggatggaggctggggaacacataccttgggaccaagctccatgtttggcacatgtgtaaactatgcaaccttaaggattctaggagaggtgcttgatggagaaaatgatgcattatccaaagggcgttcttggattttgtctcatggaagtgcaactgcagcaccacaatgggcaaagatatatctctcgatgataggtgtatacgattgggctgggaacaatgcaatcattcctgagttatggatgcttccacattttctcccaattcatcctggaaggttttggtgcttttgtcggatggtttacatgccaatggcttacatttatggaaaaaagtttgttgggcctatcactacaactattttagaaataagaaatgagctctacaatataccatataataagatcaactggaacaaggcttgcaattcttgtgccaaggaagaccttatctatgagccttcatggttgcaaagtattgcaatggcttatttgaataagtttatagaaccattatcaaatctttggccaatgaataagctacgagaaagagctatgagtgacctcatggaacatatccactatgaagatgaaaccagcaactatgttggcttatgccctataaacaaggcattaaatatgatatgttgttggatagaaaaaccaaactcaaatgaatttagacaacatctcccaaggattcatgatttcctatggcttggagaagacggaatgaagtcaaaggtgtatgttggttgccatagttgggaaactgcgctcatagttcaggctttttgctcaacagggctcaccgaggagttttgttcgactcttcaaaaagctcatcagttcttaaaaaatgcacaggttatcaaaaacattcctgattacaagagctactaccgtgaaagaactaaaggttcttggactctatccaatggagaaaacttttggcctattgctgatacaactgctgaggcacttaagaacaaagatggtacattatcatcagctgaatgtaaacgaacaacttcatgggtggagtttatcaatccttctgagagttttcgtaatatcatcgtcgactatccatatcctgaatgcacatcatcattaattcaagctttagtgctgtttagaggcaagcatccaatatatcgtcgtgatgagatagacaaaattatcaaaagtggtgcatcattcattgagaaagtacaacgaaaggatgggtcctggtatggttcttgggctgtgtgtttcacttatgcaacattctttgctataaaaggattagttgctgcaggaagaacataccggaatagtttggctattaggaaagcatgcaacttcttgttgtcaaagcaactaggaaccggtggatggggagaaaactatcttggttgtcaaattgaggagtatgttgacagtggcagtccacatggagtcaacactgcacaggcgatgctagctttactctacgctgggcaggtttagtttgcatccccctcccccttccgcttggattcagctgcttcgctaatgtttgatactgtgggcaggtcgaacaagacccagcgccactataccgtgctgcaaaagaattaattaacatgcagatggagaacggagaatttccccaacaagaaattgttggcaacttcaactcctcacttttcttcaattacccgaactaccgaaacttatttcccatctgggctttaggagaatttcgccgccgacttgttgcaaaaaaaggttaagatgggtatcttaagctatttctaataattgtatttgggatacaagtatccatgtatattttatttttcgtgatgatgggaatgtaacacaaaataaaatttatatttagtacgtatatgttaatatttgtaagattatcacaaacaagttgataatcatcagtgatctggttcctcaaattcaataacaaggatgcaaaatgtttggtagcaagaatactgcaatggaatggaatagctaa

SEQ ID NO: 52844 - DNA, 3295 bp, Zea Mays
cagcaatccttcaccatcctaagctagccaagcatgtggaggctaaagatcggcgagaggccaagcaacccgctgcttcgctcgcccaatggcttccttgggagagaggtgtgggagttcgaccccgccgcaggcacgccggaggagcgcgccgaggtcgataggctgcgccaggagtacacccgcaaccgcttcacgcgacggcaatgcagtgaccttctcatgcgcatgcaggaaagtacagtcccggcctggacataataaggcactgaactatatatcccctccattttttcgcccaaatctagtaagtagccctttgtaaaacctcagcaatttcttgaagatcgacccccccagatgaaccatataaccaagagagaaaccatgaacccgattaaaagatggcccctcatctcctgaacttccaaagtggtattaaatccgctaacaataactacttgtggttcagtatgggcaacattagccaacaacactagtactacatgcttctaacgggcgatattatacaccctgaggaggtaataggaatttcattaaagtttcatgggtattaaataagctaatatgttatagtattaatgaagaggggtatgaccaaaaaaaattataggaaaaatcaagttttataaagctacacaccaaagtcttgaaaacggtacgttacataaaacataaaacccgacaggaacttaactgacaacaaaacagacttaacttctcttaaatgtgtgccacgtaacatcattgtacatgctctaatcagacctgttctacattatatggcattctaaaattttagattcagagtatttcaaattttaattggaaaaaaaatcagtattttttcagtgtagtgtgcaggactagcttgtttgattttcaatttgaattactgcatacacatttatttcatctacgacgtgtttaatgaagtcttacgttgtatatctctcttgcagtatgcaaaacagaaccttcataatacaaaccttccggctatcaagattgaccaggattcagacgtcacagaagaaactatactaattacattgaggcgtgctcttaatcaatattcttctttgcaaggacctgctgggcattggcctggggattacggcgggatttcgttcattttaccactcatgatatttgcattacatgtcacacgatcaatggatgaagttttgtcaatagagcatatacgtgagatatgtcgctacatttataacatgcagaatgaggatggaggctggggaacacataccttgggaccaagctccatgtttggcacatgtgtaaactatgcaaccttaaggattctaggagaggtgcttgatggagaaaatgatgcattatccaaagggcgttcttggattttgtctcatggaagtgcaactgcagcaccacaatgggcaaagatatatctctcgatgataggtgtatacgattgggctgggaacaatgcaatcattcctgagttatggatgcttccacattttctcccaattcatcctggaaggttttggtgcttttgtcggatggtttacatgccaatggcttacatttatggaaaaaagtttgttgggcctatcactacaactattttagaaataagaaatgagctctacaatataccatataataagatcaactggaacaaggcttgcaattcttgtgccaaggaagaccttatctatgagccttcatggttgcaaagtattgcaatggcttatttgaataagtttatagaaccattatcaaatctttggccaatgaataagctacgagaaagagctatgagtgacctcatggaacatatccactatgaagatgaaaccagcaactatgttggcttatgccctataaacaaggcattaaatatgatatgttgttggatagaaaaaccaaactcaaatgaatttagacaacatctcccaaggattcatgatttcctatggcttggagaagacggaatgaagtcaaaggtgtatgttggttgccatagttgggaaactgcgctcatagttcaggctttttgctcaacagggctcaccgaggagttttgttcgactcttcaaaaagctcatcagttcttaaaaaatgcacaggttatcaaaaacattcctgattacaagagctactaccgtgaaagaactaaaggttcttggactctatccaatggagaaaacttttggcctattgctgatacaactgctgaggcacttaaggcaatactgttgctgtctaacattccttcagaacttgtcggggatccaataaaacaagaacgactatatgatgccgttgattgcctcctttctttcgtgaacaaagatggtacattatcatcagctgaatgtaaacgaacaacttcatgggtggagtttatcaatccttctgagagttttcgtaatatcatcgtcgactatccatatcctgaatgcacatcatcattaattcaagctttagtgctgtttagaggcaagcatccaatatatcgtcgtgatgagatagacaaaattatcaaaagtggtgcatcattcattgagaaagtacaacgaaaggatgggtcctggtatggttcttgggctgtgtgtttcacttatgcaacattctttgctataaaaggattagttgctgcaggaagaacataccggaatagtttggctattaggaaagcatgcaacttcttgttgtcaaagcaactaggaaccggtggatggggagaaaactatcttggttgtcaaattgaggagtatgttgacagtggcagtccacatggagtcaacactgcacaggcgatgctagctttactctacgctgggcaggtcgaacaagacccagcgccactataccgtgctgcaaaagaattaattaacatgcagatggagaacggagaatttccccaacaagaaattgttggcaacttcaactcctcacttttcttcaattacccgaactaccgaaacttatttcccatctgggctttaggagaatttcgccgccgacttgttgcaaaaaaaggttaagatgggtatcttaagctatttctaataattgtatttgggatacaagtatccatgtatattttatttttcgtgatgatgggaatgtaacacaaaataaaatttatatttagtacgtatatgttaatatttgtaagattatcacaaacaagttgataatcatcagtgatctggttcctcaaattcaataacaaggatgcaaaatgtttggtagcaagaatactgcaatggaatggaatagctaa

SEQ ID NO: 52845 - DNA, 2438 bp, Zea Mays
aaccaaaccaaaccacagcaatccttcaccatcctaagctagccaagcatgtggaggctaaagatcggcgagaggccaagcaacccgctgcttcgctcgcccaatggcttccttgggagagaggtgtgggagttcgaccccgccgcaggcacgccggaggagcgcgccgaggtcgataggctgcgccaggagtacacccgcaaccgcttcacgcgacggcaatgcagtgaccttctcatgcgcatgcagtatgcaaaacagaaccttcataatacaaaccttccggctatcaagattgaccaggattcagacgtcacagaagaaactatactaattacattgaggcgtgctcttaatcaatattcttctttgcaaggacctgctgggcattggcctggggattacggcgggatttcgttcattttaccactcatgatatttgcattacatgtcacacgatcaatggatgaagttttgtcaatagagcatatacgtgagatatgtcgctacatttataacatgcagaatgaggatggaggctggggaacacataccttgggaccaagctccatgtttggcacatgtgtaaactatgcaaccttaaggattctaggagaggtgcttgatggagaaaatgatgcattatccaaagggcgttcttggattttgtctcatggaagtgcaactgcagcaccacaatgggcaaagatatatctctcgatgataggtgtatacgattgggctgggaacaatgcaatcattcctgagttatggatgcttccacattttctcccaattcatcctggaaggttttggtgcttttgtcggatggtttacatgccaatggcttacatttatggaaaaaagtttgttgggcctatcactacaactattttagaaataagaaatgagctctacaatataccatataataagatcaactggaacaaggcttgcaattcttgtgccaaggaagaccttatctatgagccttcatggttgcaaagtattgcaatggcttatttgaataagtttatagaaccattatcaaatctttggccaatgaataagctacgagaaagagctatgagtgacctcatggaacatatccactatgaagatgaaaccagcaactatgttggcttatgccctataaacaaggcattaaatatgatatgttgttggatagaaaaaccaaactcaaatgaatttagacaacatctcccaaggattcatgatttcctatggcttggagaagacggaatgaagtcaaaggttatcaaaaacattcctgattacaagagctactaccgtgaaagaactaaaggttcttggactctatccaatggagaaaacttttggcctattgctgatacaactgctgaggcacttaaggcaatactgttgctgtctaacattccttcagaacttgtcggggatccaataaaacaagaacgactatatgatgccgttgattgcctcctttctttcgtgaacaaagatggtacattatcatcagctgaatgtaaacgaacaacttcatgggtggagtttatcaatccttctgagagttttcgtaatatcatcgtcgactatccatatcctgaatgcacatcatcattaattcaagctttagtgctgtttagaggcaagcatccaatatatcgtcgtgatgagatagacaaaattatcaaaagtggtgcatcattcattgagaaagtacaacgaaaggatgggtcctggtatggttcttgggctgtgtgtttcacttatgcaacattctttgctataaaaggattagttgctgcaggaagaacataccggaatagtttggctattaggaaagcatgcaacttcttgttgtcaaagcaactaggaaccggtggatggggagaaaactatcttggttgtcaaattgaggagtatgttgacagtggcagtccacatggagtcaacactgcacaggcgatgctagctttactctacgctgggcaggtcgaacaagacccagcgccactataccgtgctgcaaaagaattaattaacatgcagatggagaacggagaatttccccaacaagaaattgttggcaacttcaactcctcacttttcttcaattacccgaactaccgaaacttatttcccatctgggctttaggagaatttcgccgccgacttgttgcaaaaaaaggttaagatgggtatcttaagctatttctaataattgtatttgggatacaagtatccatgtatattttatttttcgtgatgatgggaatgtaacacaaaataaaatttatatttagtacgtatatgttaatatttgtaagattatcacaaacaagttgataatcatcagtgatctggttcctcaaattcaataacaaggatgcaaaatgtttggtagcaagaatactgcaatggaatggaatagctaa

SEQ ID NO: 52846 - DNA, 3070 bp, Zea Mays
gttcctggggtcctcgcccacgtaggctaacaacgcaagcattgtaccgaaaaccccaggcatcagatgctccaatctttgctgcccatacataggccgcctctagagagcaaaaaagagaagtgcaaacaaagatcctcaaaaggacaggcagccaaatgccccaccacagcgtagcccctcctcactgactcacctgcaaaaaccacttgcaaaccacacaaaccgaaaccgccagctcccctgcctccatttttagcaacttttcccttcaatctcccgtcgcagtcacccttcttgcacccccgcgcagcttccgacacctccgaccttctctggcggcgccccgccgttggacgctcatggagaagagcccgggcgccgcgccgacatcatcgcccgaggaggaggtggcggcggatggccgcgggcacgttgaggacgcgacggggcagaaggagcaggcgacgccggtggtgctcaagaaggggccgtggacggcagcggaggatgccatgctcatggaccacgtccggcaccacggcgaggggaactggaacgcagtgcagagggtgaccggcctgctgcgctgcggcaagagctgccgcctgcgctggaccaaccacctccgccccaacctcaagaagggctccttctcccccgacgaggagctcctcatcgcccagctccacgcgcagctcggcaacaagtgggcgcgcatggccgcgcatctgccggggaggacggacaacgagatcaagaactactggaacacgaggaccaagcgccgccagcgcgccggcctgcctgtgcacccgccgccagaggtgcagctccagctcgccctcgccaggcgctgccgctacgacgacttctcgccgctgccgtccccgcaggagctgtccggtgtccaggcgctggtgggcgccgccgcctcggccgggtacgccagctcccgcccggcgcccctcgacctggctcggcagctcacccagacgacgaaccagcagacggagactgtgcagttcctctcgccgccacccttctcggcgccgtcgtccccgtgggcgaggccgttcgcccggaacgcgcagtacttccagctcgcgcactcgtcgtcgcccgtgtccccgacgacgccggacctgtccctcggctacggcgcgcgcagcgccggcgccgaccagagcaggctcccgccgctctcgccgtccccttgccccagagtggtggagctcccttcaaaccaatacgcccaaccgacgccgccggcctcggccgccgccaccgcacttggaggtggtggcgcagcgctgccggatcatcagaacgcggcgagcctcgagaagatgctgcgcgagctgcatgacgtcatcaaggtcgacccgccggcgctggtcccggccagcggcggcgctgccctggagtggcatggtggcggaggtgagtagtgcatgccgtgtgtgaagcattttctctcgcatcttccctttatttttggatgcacgcgggagtagggagttcgatttgttgctttgcggggggaagagaacaaatatgctcatgattactgtgtgaactggcagattagcgtgaaccttttcgttcgtggttccaaaatctccatttgttttcacttgctacgtgccaccgcccaccggcttcttcaaaagctaaacaatttctgatctttatcgcggtgtcaccatctagttttaatcggcgtttcacttacttgccagcggtagtaggaataaatgtgctcagcttggtgaaagtaagatttggacagaatccgaaacatgcatggacagcacagtgtttggagtctcttttgttttttttgtctttctttttgatagttttaaggttagagaagcttctgcactgcaggtactgtctgtggagagggcattctttttgtccttgcaacgagacagtgacagactacctttgatcttgatccatgattactttagcttatcctgtccagtgctttaacaactttccccccttcttttctatcatctacctaatcaaacgtaatatgattccaattcatacttcctttttcgcaatcgtatggttgctcgttagcttgcataacaacacgtcacatttgctgttatattattccgcacaatgcaagtttaacataatcaggataatcatacagagttatatttcttttttctggagatcaactagagaggttctcgttcttttttttaaaaaagagagagagagaatagagagcttctcgtgatcagtgaaaagaatataattaaaccaggaccaatgatttataaaagctaccgattttaaatttttaccatgtgcgtgctaccgcgcgaatgaatatatatatgaactttcatgaagcaattccatctttcagaatttgtgagcggcctgcaggccctgcagcagcatcgggttgacgacatggatactctgttcggcctgctgcacccgccgctccgccgcgcgccggagacggtggcggcggcagctgcaggctccacccactccggctcgacctcgcagcacagcagcgacgaccagaagcccaccgacgtcgtcggcctcggcctggacctggacctccaggtcgccggcagcaccgtctcgtcggaccaggaggactggggcctcgacgccgtctgtcagtggagcagcgtgtccaggatctgctgatcgcgtgcacggactgcagggatcggcgtagcgatgccgaatcgtcggtcaagacatcgtgcatgcatccggtgattctgagaactggaagagagagagaatgcctttttttttgaacgtttaaatttcttgctgctgtcagatgccaagcagcatgggcaaacggatttgtttcccgttcaatgttcatgacgactatggttggttagttaccgagtcggctgcgcaacccaacggaatttgcgtcagcgtctctggcatgtccctttcttcttcttttttcgcgaccgtacactgactgacacacgttttcattcaaagacacagtagagtttaaaagataattctaggattaccgtaaaagagagtagag

SEQ ID NO: 52847 - DNA, 1124 bp, Zea Mays
cgaagtgttacccatatcgtggaacaaaatcatgactctccagcaagaattacaagcgaacgcgcatcaaggaaaccaaaccggaattggcgtcgcgtcctcttaacatttctctcgattgtatcgtcctgtcactcaatttctgctgccttttaggagcccagagattcagaaaaagttgcatcatgagcgagggaagcagaagccagaagaggtagctcctcctacagtagaagacacccacccggccacacttctggttatataatccccaaatatcgttttctctgggagaaaggtaccagggttaggtatccatccacacagcaatgcatctgccttcaactccctctcgccccccaccccaacacacatctctctcttttctagggaaggaaatgacgaaggggacgacgacggcatgcttcggctagctcgttggtgctaggacaagggcggaggtattggcgcgcctcaatccgaaggcgtggctgatagattggcgcggcagccatgttcttggattgagccgcgtcaatatctcccgttgcctgtcccgtacctagctagcttgcttgcctcactgatcgatgtcgtccctatttcatggagaagctgatgattattcgcacaagcaagaactgtctgatctgttgcctgcatcaggatctatatgctggagagttcacaagaacacggacagaactcgtttcaacaaccgatcaatcgattgattaggagcttcggcacaagaatatcttcgatacaagacattggaggggtgacgaagctatcttcgtcatagcaacacagggagacaatgcaaggagaaggagtcatcctgaatgatgaaagcaaatgacaatgttgccctcgtattacttgtaaatcctttgtgtaatccttatgggtgtaaatgtaattttatacgaaggtgtatgtttctctataaataaatgaatagtgccctgcataaagtaccttttgaaggactggacaattgatgtgtgtaatcttttctctagagcacctttgttctaactcactctgtagagccaaaggtatgactataaactcataataagaaagaggagaaatgtgatattgatatatctgaaatgaat

SEQ ID NO: 52848 - DNA, 1575 bp, Zea Mays
agatggcgagatgctggcgatcgagcgaataataacatgctgggcatggggagcgcggtggagacgctgtgcgggcaggcgtacggggcgcacaagtacgacatgctgggcatctacctgcagcgctccaccgtcctgctgatggccacgggggtgccgctggcggcgctgtacgccttctcccgccccgtcctggtcctgctgggggagtcccccgagatcgcgtcggccgccgccgtcttcgtgtacggcctggtcccgcagatcttcgcgtacgccgccaacttccccatccagaagttcatgcaggcgcagagcatcatggggcccagcgcctacatctccgccgccgcgctcgccgcccacctcgccctcagctacctcgtcgtctaccgcctcggcctcggcctcctcggcgcctcgctcacgctcagcgccagctggtgggccatcgtcgccgcccagttcgcatacatcgtcaccagcagccgctgccgcctcacctggaggggcttctcgtggcaggccttctccggcctgcccagcttcttcaggctctccctcgcatccgccgtcatgctctgcctcgagacctggtacttccagattctcgtgctcatcgcaggcctcctcaaggaccccgagcttgccttggcctcactctctgtctgcatgacaatttcagggtgggtgttcatgatctccgttgggttcaatgcagcagccagcgtaagagtgagcaacgagctcggcgccggcaacccaagggcggcggcgttctccgtggtggtagtgacgctgctctccttcgtcctgtcggtcctcgtctccgccgtcatcctgctgtgccgggactacatcagctacatcttcaccgagggtgaggacgtgtcgcaggcggtctcccggctcaccccgctgctggcgttcacgctcatcctcaacggcatccagctccagcccgtcctctctggggtcgctgtggggtgtggatggcaggcgttcgtcgcgtacgtcaacgtcggctgctactacatcgtcggcatcccgctcgggtgcctcctaggcttctactttgacctaggagcagcgggtatttggagcggtatgatcggcggcaccttgatgcagaccttgatcttgatatgggttacattcaggaccaactggaacaaagaggttgaagaagcacagaagaggttaaacaaatgggacgacggcaaggctcctctgctgtcagcgcaagaatgaaacaactcgtctctctggtgcccaaccaaagaacaacgagacgtggatatgacctgtacggaactagggacgcccctcggcaggctcagcggagacgtcgacgtagtttgatatcaagtagcaattccaccatgtcctgaaatggacagaaccaggccaaatgcctggaatggacagaaccagatggctgatgaaattctacgtacattccatccggtccaatatataattcgtttcacttttttatattaagtttgaccgactcatctcattaaaaaatataattgttattaacttttactagaatatcgtttaagtatgttg

SEQ ID NO: 52849 - DNA, 2290 bp, Zea Mays
ctttattttattattattattttcctactacacaagggaccttttgagctgagatgatgcccaaaaacaaaaggacgctcatcatcagtgacgcccagtcgtcgccaagcagctagctagcatgccaataatttttttcttgttaatgttgtcgcagctggtactatactactactactacgccgtatatgaatgcgcttttgtctgcatgctcaggctgattccatccaacttgtctttcttctctcctctccacccatgccccgtccgtcgcagcaggggttatatagtgcccgcgaacggacgcgcaggcgccacgaagccgagatcgagcagctacctctccgatccgaggcctgagcgagcgagctgaggactgcagcctatataatatctagactagagtacaccacaacgacgaggcacatatatatacacgcggcggcggccagatccatcttggtatacacgtaatatatatacacgcacgatgggcagcgccggcggcggtggcgagagcaagctggagagcccgctgctgggcgcgtcgtcgacgggccacggcgaggcggtggtgagcgggcagctggagagcatcctgggcgacgcgtccgtgccgtgggggacgcggatggcgtcggcgtccgcggtggagatgcggctgctgatcttctcgggccacctcggcacgctcgagctcgccgccgcctcgctcggcaacaccggcatccaggtcttcgcctacggcctcatgctgggcatggggagcgcggtggagacgctgtgcgggcaggcgtacggggcgcacaagtacgacatgctgggcatctacctgcagcgctccaccgtcctgctgatggccacgggggtgccgctggcggcgctgtacgccttctcccgccccgtcctggtcctgctgggggagtcccccgagatcgcgtcggccgccgccgtcttcgtgtacggcctggtcccgcagatcttcgcgtacgccgccaacttccccatccagaagttcatgcaggcgcagagcatcatggggcccagcgcctacatctccgccgccgcgctcgccgcccacctcgccctcagctacctcgtcgtctaccgcctcggcctcggcctcctcggcgcctcgctcacgctcagcgccagctggtgggccatcgtcgccgcccagttcgcatacatcgtcaccagcagccgctgccgcctcacctggaggggcttctcgtggcaggccttctccggcctgcccagcttcttcaggctctccctcgcatccgccgtcatgctctgcctcgagacctggtacttccagattctcgtgctcatcgcaggcctcctcaaggaccccgagcttgccttggcctcactctctgtctgcatgacaatttcagggtgggtgttcatgatctccgttgggttcaatgcagcagccagcgtaagagtgagcaacgagctcggcgccggcaacccaagggcggcggcgttctccgtggtggtagtgacgctgctctccttcgtcctgtcggtcctcgtctccgccgtcatcctgctgtgccgggactacatcagctacatcttcaccgagggtgaggacgtgtcgcaggcggtctcccggctcaccccgctgctggcgttcacgctcatcctcaacggcatccagctccagcccgtcctctctggggtcgctgtggggtgtggatggcaggcgttcgtcgcgtacgtcaacgtcggctgctactacatcgtcggcatcccgctcgggtgcctcctaggcttctactttgacctaggagcagcgggtatttggagcggtatgatcggcggcaccttgatgcagaccttgatcttgatatgggttacattcaggaccaactggaacaaagaggttgaagaagcacagaagaggttaaacaaatgggacgacggcaaggctcctctgctgtcagcgcaagaatgaaacaactcgtctctctggtgcccaaccaaagaacaacgagacgtggatatgacctgtacggaactagggacgcccctcggcaggctcagcggagacgtcgacgtagtttgatatcaagtagcaattccaccatgtcctgaaatggacagaaccaggccaaatgcctggaatggacagaaccagatggctgatgaaattctacgtacattccatccggtccaatatataattcgtttcacttttttatattaagtttgaccgactcatctcattaaaaaatataattgttattaacttttactagaatatcgtttaagtatgttg

SEQ ID NO: 52850 - DNA, 1763 bp, Zea Mays
gctcgatgtacctctacgggacctttttcagccttttttctttattttattattattattttcctactacacaagggaccttttgagctgagatgatgcccaaaaacaaaaggacgctcatcatcagtgacgcccagtcgtcgccaagcagctagctagcatgccaataatttttttcttgttaatgttgtcgcagctggtactatactactactactacgccgtatatgaatgcgcttttgtctgcatgctcaggctgattccatccaacttgtctttcttctctcctctccacccatgccccgtccgtcgcagcaggggttatatagtgcccgcgaacggacgcgcaggcgccacgaagccgagatcgagcagctacctctccgatccgaggcctgagcgagcgagctgaggactgcagcctatataatatctagactagagtacaccacaacgacgaggcacatatatatacacgcggcggcggccagatccatcttggtatacacgtaatatatatacacgcacgatgggcagcgccggcggcggtggcgagagcaagctggagagcccgctgctgggcgcgtcgtcgacgggccacggcgaggcggtggtgagcgggcagctggagagcatcctgggcgacgcgtccgtgccgtgggggacgcggatggcgtcggcgtccgcggtggagatgcggctgctggtgcgcctggccgcgcccgccgtgctcgtgtacatgatcaactacctcatgtccatgtccacgcagatcttctcgggccacctcggcacgctcgagctcgccgccgcctcgctcggcaacaccggcatccaggtcttcgcctacggcctcatgcatgacaatttcagggtgggtgttcatgatctccgttgggttcaatgcagcagccagcgtaagagtgagcaacgagctcggcgccggcaacccaagggcggcggcgttctccgtggtggtagtgacgctgctctccttcgtcctgtcggtcctcgtctccgccgtcatcctgctgtgccgggactacatcagctacatcttcaccgagggtgaggacgtgtcgcaggcggtctcccggctcaccccgctgctggcgttcacgctcatcctcaacggcatccagctccagcccgtcctctctggggtcgctgtggggtgtggatggcaggcgttcgtcgcgtacgtcaacgtcggctgctactacatcgtcggcatcccgctcgggtgcctcctaggcttctactttgacctaggagcagcgggtatttggagcggtatgatcggcggcaccttgatgcagaccttgatcttgatatgggttacattcaggaccaactggaacaaagaggttgaagaagcacagaagaggttaaacaaatgggacgacggcaaggctcctctgctgtcagcgcaagaatgaaacaactcgtctctctggtgcccaaccaaagaacaacgagacgtggatatgacctgtacggaactagggacgcccctcggcaggctcagcggagacgtcgacgtagtttgatatcaagtagcaattccaccatgtcctgaaatggacagaaccaggccaaatgcctggaatggacagaaccagatggctgatgaaattctacgtacattccatccggtccaatatataattcgtttcacttttttatattaagtttgaccgactcatctcattaaaaaatataattgttattaacttttactagaatatcgtttaagtatgttg

SEQ ID NO: 52851 - DNA, 1443 bp, Zea Mays
cttgtgttcaattaattatactaaaacatttggttgtaccgttggtaacggagtaaacacacattcaggcattactctcatcttttcttggtaacttggagcatccattgtttggtccaatatgcgtcaagacttcaacgactgtgctgccatgccaaactacattgagcactcaaaagtgtgaagtgtaaaaaatggaacctcaccttactttggctgcattgttggtcgagttgcaaatagaatcaaggatggaaagttcactctaaatggggtgcagtacaatctgagtatcaacaacccacctaacactcttcatggtgggtttaaagggtttgacaaaactatatgggaagttgccgagtataacaaaggggacaagccctcaatcaccttcaagtattacagtaaagatggagaggaaggttacccaggtgatgtttctgtcactgcgagatactcgcttctcccaagcgcgacactgaagcttgagatggaagctataccactgaacaaggccacacccatcagcctagcacagcacacctactggaacctggcaggccacagctcaggagacgtgctctcgcactcggtccagatctggggctctcagataaccccggtagaccagacctcaatacctacaggcgagctcatgccagtgactggcacccccttcgattttctgaccgggaccaggatcggaagcaggatcgaccgggtccccggcggttacgatcacaactacatgctcgactccggcgaagtgaggtcaggcctgcggcatgtggcgcacgtcgtggacccgtccagctcgagggccctggacatctgggccgacgcgcctggcgtgcagttctacaccggaaattctcttggtggcgtcgtgggcaaaggaggcgcggtctatgggaagcacgctggcctctgcctcgagacgcagggtttccccaacgctgttaaccagccgaattttccctcggtcgtgtttggccccggtgagaggtacagccatacgatgctgttcgagctctctaccgagtgagtcatgtagcccgtctgcctgcccgtgtagatagatagatatacaccgtttttattttccttgttgttttgtgcttgcgagtagtcaagaaactgtggcgcgcgcggcggttgttcaattgattcttggtttagggctgaatgttgtagcaggaatgcagcaagactagtaggaaaggaacggatttggggggaggtactaggttactaggtctgcatctcgttctgatgtgaacctgtcacttgtgtgtgtgttgagtttagttcattcaggatttagcagttcttgcatgaggtaggctaacatcgcatttcctgtcgagagaaaaactcgatcgaaacctgagtttagtatggtttcaggatgcagcaatcgacttatcgacattcacgttc

SEQ ID NO: 52852 - DNA, 2228 bp, Zea Mays
ctcattactctgggtagataattctcctcttctgtcttccatttaattgtacacgatgtaactgcctttgtgaatcaataaagctagccacaaggcttttcctaaaaaaacagtatggatacttccatatgcttaagaacatttaacaaaactagaaaatcataaacgccgtacacagacagttgacatacatgagcagtgtacaaataatcaaatatgaccgaagtataaacccatcccttgtctccttttgatgatcgggtacaacccgactgagcgacgctagagtcgtgcgtcgtgtccccttggcgcggcgcccacctctgacctcgccactggagatgctgctgcgccagagctgaactaaaaccccgggaaatcaggcagcaggccgccggaggaaatggagcagctggtgggagttcaccatcaccaccactcgctctcccctcgggctcctcgcaccccgacccgcccgcagccgcagccgcagccgcacccgctcctccaccatctcccgtccaacaggttccgggatctccactcccagattcacaatcacattcaccccgcggtccccgcggccagcagggtgctccgcgccaccccgcccttcttcctcatcctcctcgccgccgtctacctgcttgcctccgtcaccatcttctccgcccccacgccgctgctccgcctccgattggcctctcccaggccgctgatcctcccgaagcccgcgccaccgccgccgccgcctgcgccggagctctttgatttagacggcgggagtgtccgggtccgcctcaccaatgtcggcgccgccgtcacctcgttcctcgtcccggacaagaacggggttctcgctgatgtggtgctcggattcgactcgctggatccgtacctgtttgtaaattgtgatttacgtgtatctcagcgatcaagaattgctttggtgctaacagttggagtctctttgatcagaatggaacctcaccttactttggctgcattgttggtcgagttgcaaatagaatcaaggatggaaagttcactctaaatggggtgcagtacaatctgagtatcaacaacccacctaacactcttcatggtgggtttaaagggtttgacaaaactatatgggaagttgccgagtataacaaaggggacaagccctcaatcaccttcaagtattacagtaaagatggagaggaaggttacccaggtgatgtttctgtcactgcgagatactcgcttctcccaagcgcgacactgaagcttgagatggaagctataccactgaacaaggccacacccatcagcctagcacagcacacctactggaacctggcaggccacagctcaggagacgtgctctcgcactcggtccagatctggggctctcagataaccccggtagaccagacctcaatacctacaggcgagctcatgccagtgactggcacccccttcgattttctgaccgggaccaggatcggaagcaggatcgaccgggtccccggcggttacgatcacaactacatgctcgactccggcgaagtgaggtcaggcctgcggcatgtggcgcacgtcgtggacccgtccagctcgagggccctggacatctgggccgacgcgcctggcgtgcagttctacaccggaaattctcttggtggcgtcgtgggcaaaggaggcgcggtctatgggaagcacgctggcctctgcctcgagacgcagggtttccccaacgctgttaaccagccgaattttccctcggtcgtgtttggccccggtgagaggtacagccatacgatgctgttcgagctctctaccgagtgagtcatgtagcccgtctgcctgcccgtgtagatagatagatatacaccgtttttattttccttgttgttttgtgcttgcgagtagtcaagaaactgtggcgcgcgcggcggttgttcaattgattcttggtttagggctgaatgttgtagcaggaatgcagcaagactagtaggaaaggaacggatttggggggaggtactaggttactaggtctgcatctcgttctgatgtgaacctgtcacttgtgtgtgtgttgagtttagttcattcaggatttagcagttcttgcatgaggtaggctaacatcgcatttcctgtcgagagaaaaactcgatcgaaacctgagtttagtatggtttcaggatgcagcaatcgacttatcgacattcacgttc

SEQ ID NO: 52853 - DNA, 3091 bp, Zea Mays
atgctgccgctcgtcctggccaccctcaccagcgtactgctggccggcccagcagccgaccacggagccctcggcagcccgccgccggaccccgtgcagtgctcgtccggcggcggcacggccgactgcaccgtgtcgagcgcctacggcgtgttcccggaccgctccacgtgccgcgcgtccgccgctgtgtacccggcgtcggaggacgagctggtgcgcgccgtggccggcgccgccgcggccgggaccaagatgaaggtggccacccgctactcccacagcatcccgccgctggcgtgccccgggagcggccgcggcgagggcctcgtcatcagtaccaggcggctcgaccgcgtcgtgtccgtggacccggcggcggggcgcgtcacggtggagagcggcgtcacgctgcgagacctcgtcgaggaggccgccaaggccgggctcgcgctgccctacgagccctactggtgggggctcaccgtcggcggcatgctcggcacgggcgcgcacggcagctcgctctggggcaacggcagcgccgtgcacgagtacgtcgtcgggatgcgcatcgtcacgccggcggccgccgccgagggctacgccaaggtgcgcgtgctcaccgccgctgacccggacctggacgccgccaaggtctctctcggcgtcctcggcgtcatctctcaggtgacgctggcgctacaacctctgttcaagcgctcggtgacgttcagcgagcgggacgacgacgacctggcggagcaggtgggcacgttcgggtaccggcacgagttcgccgacatcgcgtggttcccagggcatgggcgggcggtgtaccgcatcgacgaccgcctgccgctgagcgcgcccgacgacggcgccatggacttcatcggcttccgcgccacccccacgctcgcgatccaggcaacccgcctcgccgaggacctcttcgagcgcgccgacaacggcagcggcaagtgcctgacgtcgcgggtgacgcacgcgacgctgtcggcggccgggtacgggctgcagtggcggagcggcgggctgttcgcggggtaccccgtggtggggccgcagcaccggatgcaggcgtcgggcggcctccccgtgcgccgcgccgtgctgttcgtcgccgaggtgcgccggcttcgggacctggagcccagggcgctgtgcggcgtggagctctacgacggcatcctcatacgctacgtgaaggcgtccacggcgcatctgggcaagcccgcgccgcgcggggaaccgtccggggacatggtggacttcgacatcacctactaccgcagccgtgactccgggcggccgcgcctgttcgaggacgtgctggaggaggtcgagcagatgggcatcttcaagtacggcggcctgccgcactggggcaagaaccgcaacctcgccttcgtcggtgccgcgcgcaagtactccggcctgccgcgcttcctgcgcgtcaaggacgcctacgaccccgatggcctcttctccagcgactggagcaacatgatgctcggcatcggcgggaggtcgcccacgacggacgcgcccgggtgcgcgctcgaggggatgtgcgtgtgctcgcgggacgagcactgcgcgccggagcagggctatgtctgccgccccggcaaggtgtacaaggaggccagagtctgcaccagggcaacgcaaagcccggagcccggcggcttcccccaacgctatccggcaccgccgctggctgctccagcaaaagcccgagctcagttcatcaatgtcggcactgccggccccaccgccggcgccaccggcacgctcctgcggcggtatcctcgactcccagaaccgtcttgctcctctttgtgctctagaaagcgccgggtctatccttcgccacctctgcggcctcctcctcctccgccgcctgccaggcgacctccgctcctttggatgctacgcgtcgccacaggcatcctcgatggtcgccaaccttgtggagggcgtgtcgtaccccttcttctactcgctcgccgacatgggtaccctccccgaccaccccacaagaacatcgctcgcctcctcaaggccaagcgcttccgcaagcccgacatctccgagaccatccaggagctgctcggcggcaaggtggggagggggcaactatccggtgggttggtggtggacgtgggagccaatgttggcatggcatcatttgtggccgccgtgatggggtttcgggtgctggcattcgatgattcgagcccgtgttcgagaatctgcagcggatattcgacggggtgtacctcaaccgggtgcagcaccgcattgtggtgtatcacgctgcgtggctgcagcttctgatcgagttgggactattacgatgcacagggtgattggtcgactggacaacagtgctatatctgcagacggtgcaaagttagcattaagtctaatgcagaaattgctgttgaagtttccacaattcctttggatgaacttgttccagatactgagagagttcttctgatcaaagttgatgttcaaggctgggaataccacgtactaggaggcgcatcaaatttgctttcaaggaggaaagtgattccaacgcagggcagttccataagaccaacttatgcagggattgcatgctggacagagtggaaggaagtgattgcagtgtgttggaaccagatatacataagctctggagtgattttagctgtaggagggcatcattgtcgtctgcactgaaggagataatctggcaagtaacagggggcaattgaatatgcaaagagatgagacactggacctgccagtggtcacatgtgccaactttacatcatggtggtgtccagctaccacctttgcggcaagaggaaggccactgagtgtctcagcaattttccttccaatgttctccagttttgagtcgatggtaaggagcctctgatacacagaaagcatggagcatctgacatcctttggctggattcgtggagtacagtttgtaggagttttggtatgaagaataagtctagatgttttgggtcgagtttcttcgcatcagtttacaggagattcc

SEQ ID NO: 52854 - DNA, 3049 bp, Zea Mays
atgctgccgctcgtcctggccaccctcaccagcgtactgctggccggcccagcagccgaccacggagccctcggcagcccgccgccggaccccgtgcagtgctcgtccggcggcggcacggccgactgcaccgtgtcgagcgcctacggcgtgttcccggaccgctccacgtgccgcgcgtccgccgctgtgtacccggcgtcggaggacgagctggtgcgcgccgtggccggcgccgccgcggccgggaccaagatgaaggtggccacccgctactcccacagcatcccgccgctggcgtgccccgggagcggccgcggcgagggcctcgtcatcagtaccaggcggctcgaccgcgtcgtgtccgtggacccggcggcggggcgcgtcacggtggagagcggcgtcacgctgcgagacctcgtcgaggaggccgccaaggccgggctcgcgctgccctacgagccctactggtgggggctcaccgtcggcggcatgctcggcacgggcgcgcacggcagctcgctctggggcaacggcagcgccgtgcacgagtacgtcgtcgggatgcgcatcgtcacgccggcggccgccgccgagggctacgccaaggtgcgcgtgctcaccgccgctgacccggacctggacgccgccaaggtctctctcggcgtcctcggcgtcatctctcaggtgacgctggcgctacaacctctgttcaagcgctcggtgacgttcagcgagcgggacgacgacgacctggcggagcaggtgggcacgttcgggtaccggcacgagttcgccgacatcgcgtggttcccagggcatgggcgggcggtgtaccgcatcgacgaccgcctgccgctgagcgcgcccgacgacggcgccatggacttcatcggcttccgcgccacccccacgctcgcgatccaggcaacccgcctcgccgaggacctcttcgagcgcgccgacaacggcagcggcaagtgcctgacgtcgcgggtgacgcacgcgacgctgtcggcggccgggtacgggctgcagtggcggagcggcgggctgttcgcggggtaccccgtggtggggccgcagcaccggatgcaggcgtcgggcggcctccccgtgcgccgcgccgtgctgttcgtcgccgaggtgcgccggcttcgggacctggagcccagggcgctgtgcggcgtggagctctacgacggcatcctcatacgctacgtgaaggcgtccacggcgcatctgggcaagcccgcgccgcgcggggaaccgtccggggacatggtggacttcgacatcacctactaccgcagccgtgactccgggcggccgcgcctgttcgaggacgtgctggaggaggtcgagcagatgggcatcttcaagtacggcggcctgccgcactggggcaagaaccgcaacctcgccttcgtcggtgccgcgcgcaagtactccggcctgccgcgcttcctgcgcgtcaaggacgcctacgaccccgatggcctcttctccagcgactggagcaacatgatgctcggcatcggcgggaggtcgcccacgacggacgcgcccgggtgcgcgctcgaggggatgtgcgtgtgctcgcgggacgagcactgcgcgccggagcagggctatgtctgccgccccggcaaggtgtacaaggaggccagagtctgcaccagggcaacgcaaagcccggagcccggcggcttcccccaacgctatccggcaccgccgctggctgctccagcaaaagcccgagctcagttcatcaatgtcggcactgccggccccaccgccggcgccaccggcacgctcctgcggcggtatcctcgactcccagaaccgtcttgctcctctttgtgctctagaaagcgccgggtctatccttcgccacctctgcggcctcctcctcctccgccgcctgccaggcgacctccgctcctttggatgctacgcgtcgccacaggcatcctcgatggtcgccaaccttgtggagggcgtgtcgtaccccttcttctactcgctcgccgacatgggtaccctccccgaccaccccacaagaacatcgctcgcctcctcaaggccaagcgcttccgcaagcccgacatctccgagaccatccaggagctgctcggcggcaaggtggggagggggcaactatccggtgggttggtggtggacgtgggagccaatgttggcatggcatcatttgtggccgccgtgatggggtttcgggtgctggcattcgatgattcgagcccgtgttcgagaatctgcagcggatattcgacggggtgtacctcaaccgggtgcagcaccgcattgtggtgtatcacgctgcgtggctgcagcttctgatcgagttgggactattacgatgcacagggtgattggtcgactggacaacagtgctatatctgcagacggtgcaaagttagcattaagtctaatgcagaaattgctgttgaagtttccacaattcctttggatgaacttgttccagatactgagagagttcttctgatcaaagttgatgttcaaggctgggaataccacgtactaggaggcgcatcaaatttgctttcaaggaggaaagggattgcatgctggacagagtggaaggaagtgattgcagtgtgttggaaccagatatacataagctctggagtgattttagctgtaggagggcatcattgtcgtctgcactgaaggagataatctggcaagtaacagggggcaattgaatatgcaaagagatgagacactggacctgccagtggtcacatgtgccaactttacatcatggtggtgtccagctaccacctttgcggcaagaggaaggccactgagtgtctcagcaattttccttccaatgttctccagttttgagtcgatggtaaggagcctctgatacacagaaagcatggagcatctgacatcctttggctggattcgtggagtacagtttgtaggagttttggtatgaagaataagtctagatgttttgggtcgagtttcttcgcatcagtttacaggagattcc

SEQ ID NO: 52855 - DNA, 2931 bp, Zea Mays
atgctgccgctcgtcctggccaccctcaccagcgtactgctggccggcccagcagccgaccacggagccctcggcagcccgccgccggaccccgtgcagtgctcgtccggcggcggcacggccgactgcaccgtgtcgagcgcctacggcgtgttcccggaccgctccacgtgccgcgcgtccgccgctgtgtacccggcgtcggaggacgagctggtgcgcgccgtggccggcgccgccgcggccgggaccaagatgaaggtggccacccgctactcccacagcatcccgccgctggcgtgccccgggagcggccgcggcgagggcctcgtcatcagtaccaggcggctcgaccgcgtcgtgtccgtggacccggcggcggggcgcgtcacggtggagagcggcgtcacgctgcgagacctcgtcgaggaggccgccaaggccgggctcgcgctgccctacgagccctactggtgggggctcaccgtcggcggcatgctcggcacgggcgcgcacggcagctcgctctggggcaacggcagcgccgtgcacgagtacgtcgtcgggatgcgcatcgtcacgccggcggccgccgccgagggctacgccaaggtgcgcgtgctcaccgccgctgacccggacctggacgccgccaaggtctctctcggcgtcctcggcgtcatctctcaggtgacgctggcgctacaacctctgttcaagcgctcggtgacgttcagcgagcgggacgacgacgacctggcggagcaggtgggcacgttcgggtaccggcacgagttcgccgacatcgcgtggttcccagggcatgggcgggcggtgtaccgcatcgacgaccgcctgccgctgagcgcgcccgacgacggcgccatggacttcatcggcttccgcgccacccccacgctcgcgatccaggcaacccgcctcgccgaggacctcttcgagcgcgccgacaacggcagcggcaagtgcctgacgtcgcgggtgacgcacgcgacgctgtcggcggccgggtacgggctgcagtggcggagcggcgggctgttcgcggggtaccccgtggtggggccgcagcaccggatgcaggcgtcgggcggcctccccgtgcgccgcgccgtgctgttcgtcgccgaggtgcgccggcttcgggacctggagcccagggcgctgtgcggcgtggagctctacgacggcatcctcatacgctacgtgaaggcgtccacggcgcatctgggcaagcccgcgccgcgcggggaaccgtccggggacatggtggacttcgacatcacctactaccgcagccgtgactccgggcggccgcgcctgttcgaggacgtgctggaggaggtcgagcagatgggcatcttcaagtacggcggcctgccgcactggggcaagaaccgcaacctcgccttcgtcggtgccgcgcgcaagtactccggcctgccgcgcttcctgcgcgtcaaggacgcctacgaccccgatggcctcttctccagcgactggagcaacatgatgctcggcatcggcgggaggtcgcccacgacggacgcgcccgggtgcgcgctcgaggggatgtgcgtgtgctcgcgggacgagcactgcgcgccggagcagggctatgtctgccgccccggcaaggtgtacaaggaggccagagtctgcaccagggcaacgcaaagcccggagcccggcggcttcccccaacgctatccggcaccgccgctggctgctccagcaaaagcccgagctcagttcatcaatgtcggcactgccggccccaccgccggcgccaccggcacgctcctgcggcggtatcctcgactcccagaaccgtcttgctcctctttgtgctctagaaagcgccgggtctatccttcgccacctctgcggcctcctcctcctccgccgcctgccaggcgacctccgctcctttggatgctacgcgtcgccacaggcatcctcgatggtcgccaaccttgtggagggcgtgtcgtaccccttcttctactcgctcgccgacatgggtaccctccccgaccaccccacaagaacatcgctcgcctcctcaaggccaagcgcttccgcaagcccgacatctccgagaccatccaggagctgctcggcggcaaggtggggagggggcaactatccggtgggttggtggtggacgtgggagccaatgttggcatggcatcatttgtggccgccgtgatggggtttcgggtgctggcattcgatgattcgagcccgtgttcgagaatctgcagcggatattcgacggggtgtacctcaaccgggtgcagcaccgcattgtggtgtatcacgctgcgtggctgcagcttctgatcgagttgggactattacgatgcacagggtgattggtcgactggacaacagtgctatatctgcagacggtgcaaagttagcattaagtctaatgcagaaattgctgttgaagtttccacaattcctttggatgaacttgttccagatactgagagagttcttctgatcaaagttgatgttcaaggctgggaataccacgtactaggaggcgcatcaaatttgctttcaaggaggaaagataatctggcaagtaacagggggcaattgaatatgcaaagagatgagacactggacctgccagtggtcacatgtgccaactttacatcatggtggtgtccagctaccacctttgcggcaagaggaaggccactgagtgtctcagcaattttccttccaatgttctccagttttgagtcgatggtaaggagcctctgatacacagaaagcatggagcatctgacatcctttggctggattcgtggagtacagtttgtaggagttttggtatgaagaataagtctagatgttttgggtcgagtttcttcgcatcagtttacaggagattcc

SEQ ID NO: 52856 - DNA, 3176 bp, Zea Mays
atgctgccgctcgtcctggccaccctcaccagcgtactgctggccggcccagcagccgaccacggagccctcggcagcccgccgccggaccccgtgcagtgctcgtccggcggcggcacggccgactgcaccgtgtcgagcgcctacggcgtgttcccggaccgctccacgtgccgcgcgtccgccgctgtgtacccggcgtcggaggacgagctggtgcgcgccgtggccggcgccgccgcggccgggaccaagatgaaggtggccacccgctactcccacagcatcccgccgctggcgtgccccgggagcggccgcggcgagggcctcgtcatcagtaccaggcggctcgaccgcgtcgtgtccgtggacccggcggcggggcgcgtcacggtggagagcggcgtcacgctgcgagacctcgtcgaggaggccgccaaggccgggctcgcgctgccctacgagccctactggtgggggctcaccgtcggcggcatgctcggcacgggcgcgcacggcagctcgctctggggcaacggcagcgccgtgcacgagtacgtcgtcgggatgcgcatcgtcacgccggcggccgccgccgagggctacgccaaggtgcgcgtgctcaccgccgctgacccggacctggacgccgccaaggtctctctcggcgtcctcggcgtcatctctcaggtgacgctggcgctacaacctctgttcaagcgctcggtgacgttcagcgagcgggacgacgacgacctggcggagcaggtgggcacgttcgggtaccggcacgagttcgccgacatcgcgtggttcccagggcatgggcgggcggtgtaccgcatcgacgaccgcctgccgctgagcgcgcccgacgacggcgccatggacttcatcggcttccgcgccacccccacgctcgcgatccaggcaacccgcctcgccgaggacctcttcgagcgcgccgacaacggcagcggcaagtgcctgacgtcgcgggtgacgcacgcgacgctgtcggcggccgggtacgggctgcagtggcggagcggcgggctgttcgcggggtaccccgtggtggggccgcagcaccggatgcaggcgtcgggcggcctccccgtgcgccgcgccgtgctgttcgtcgccgaggtgcgccggcttcgggacctggagcccagggcgctgtgcggcgtggagctctacgacggcatcctcatacgctacgtgaaggcgtccacggcgcatctgggcaagcccgcgccgcgcggggaaccgtccggggacatggtggacttcgacatcacctactaccgcagccgtgactccgggcggccgcgcctgttcgaggacgtgctggaggaggtcgagcagatgggcatcttcaagtacggcggcctgccgcactggggcaagaaccgcaacctcgccttcgtcggtgccgcgcgcaagtactccggcctgccgcgcttcctgcgcgtcaaggacgcctacgaccccgatggcctcttctccagcgactggagcaacatgatgctcggcatcggcgggaggtcgcccacgacggacgcgcccgggtgcgcgctcgaggggatgtgcgtgtgctcgcgggacgagcactgcgcgccggagcagggctatgtctgccgccccggcaaggtgtacaaggaggccagagtctgcaccagggcaacgcaaagcccggagcccggcggcttcccccaacgctatccggcaccgccgctggctgctccagcaaaagcccgagctcagttcatcaatgtcggcactgccggccccaccgccggcgccaccggcacgctcctgcggcggtatcctcgactcccagaaccgtcttgctcctctttgtgctctagaaagcgccgggtctatccttcgccacctctgcggcctcctcctcctccgccgcctgccaggcgacctccgctcctttggatgctacgcgtcgccacaggcatcctcgatggtcgccaaccttgtggagggcgtgtcgtaccccttcttctactcgctcgccgacatgggtaccctccccgaccaccccacaagaacatcgctcgcctcctcaaggccaagcgcttccgcaagcccgacatctccgagaccatccaggagctgctcggcggcaaggtggggagggggcaactatccggtgggttggtggtggacgtgggagccaatgttggcatggcatcatttgtggccgccgtgatggggtttcgggtgctggcattcgatgattcgagcccgtgttcgagaatctgcagcggatattcgacggggtgtacctcaaccgggtgcagcaccgcattgtggtgtatcacgctgcgtggctgcagcttctgatcgagttgggactattacgatgcacagggtgattggtcgactggacaacagtgctatatctgcagacggtgcaaagttagcattaagtctaatgcagaaattgctgttgaagtttccacaattcctttggatgaacttgttccagatactgagagagttcttctgatcaaagttgatgttcaaggctgggaataccacgtactaggaggcgcatcaaatttgctttcaaggaggaaaggtgaagctccctatccctaccttatatatgaagaagatgaacacctactgcaggctggcaacagcagtgcacaggacataaggacatttctcactagtgttggttacaaccactgtaaaaggcatggaaatggtgctcacggtaaaaggaatagacaaatttgtttctgactgatgctcttatgctcctaagctaggtttgtatatgaactgtgaagaatcagctgagttctggcagttttggccctttgttacttagcaatgccagatgtttatacatgtcatgtgcccaatagttgtattgcactgagttctatggtaccccttggctttaacttttaggttaatttgttggttgctggaccttttgtcattactgtctctggtagggaaaagatgatgttcttactggagttgagttaactaaccatttgctgtcagaagcgatgtttttacctgaccagagggagtctatgctatagatacttgattgaaaatacactatcttcatatttgcaatctctgcaaaatttcaccatctatttcaatccaagggatgtgtgcaatctttggcc

SEQ ID NO: 52857 - DNA, 2750 bp, Zea Mays
ctgctagctagctgcttcgaatggaacgaatgcactgtactccgtcggcgggctggcgaagcatgctgccgctcgtcctggccaccctcaccagcgtactgctggccggcccagcagccgaccacggagccctcggcagcccgccgccggaccccgtgcagtgctcgtccggcggcggcacggccgactgcaccgtgtcgagcgcctacggcgtgttcccggaccgctccacgtgccgcgcgtccgccgctgtgtacccggcgtcggaggacgagctggtgcgcgccgtggccggcgccgccgcggccgggaccaagatgaaggtggccacccgctactcccacagcatcccgccgctggcgtgccccgggagcggccgcggcgagggcctcgtcatcagtaccaggcggctcgaccgcgtcgtgtccgtggacccggcggcggggcgcgtcacggtggagagcggcgtcacgctgcgagacctcgtcgaggaggccgccaaggccgggctcgcgctgccctacgagccctactggtgggggctcaccgtcggcggcatgctcggcacgggcgcgcacggcagctcgctctggggcaacggcagcgccgtgcacgagtacgtcgtcgggatgcgcatcgtcacgccggcggccgccgccgagggctacgccaaggtgcgcgtgctcaccgccgctgacccggacctggacgccgccaaggtctctctcggcgtcctcggcgtcatctctcaggtgacgctggcgctacaacctctgttcaagcgctcggtgacgttcagcgagcgggacgacgacgacctggcggagcaggtgggcacgttcgggtaccggcacgagttcgccgacatcgcgtggttcccagggcatgggcgggcggtgtaccgcatcgacgaccgcctgccgctgagcgcgcccgacgacggcgccatggacttcatcggcttccgcgccacccccacgctcgcgatccaggcaacccgcctcgccgaggacctcttcgagcgcgccgacaacggcagcggcaagtgcctgacgtcgcgggtgacgcacgcgacgctgtcggcggccgggtacgggctgcagtggcggagcggcgggctgttcgcggggtaccccgtggtggggccgcagcaccggatgcaggcgtcgggcggcctccccgtgcgccgcgccgtgctgttcgtcgccgaggtgcgccggcttcgggacctggagcccagggcgctgtgcggcgtggagctctacgacggcatcctcatacgctacgtgaaggcgtccacggcgcatctgggcaagcccgcgccgcgcggggaaccgtccggggacatggtggacttcgacatcacctactaccgcagccgtgactccgggcggccgcgcctgttcgaggacgtgctggaggaggtcgagcagatgggcatcttcaagtacggcggcctgccgcactggggcaagaaccgcaacctcgccttcgtcggtgccgcgcgcaagtactccggcctgccgcgcttcctgcgcgtcaaggacgcctacgaccccgatggcctcttctccagcgactggagcaacatgatgctcggcatcggcgggaggtcgcccacgacggacgcgcccgggtgcgcgctcgaggggatgtgcgtgtgctcgcgggacgagcactgcgcgccggagcagggctatgtctgccgccccggcaaggtgtacaaggaggccagagtctgcaccagggcaacgcaaagcccggagcccggcggcttcccccaacgctatccggcaccgccgctggctgctccagcaaaagcccgagctcagttcatcaatgtcggcactgccggccccaccgccggcgccaccggcacgctcctgcggcggtatcctcgactcccagaaccgtcttgctcctctttgtgctctagaaagcgccgggtctatccttcgccacctctgcggcctcctcctcctccgccgcctgccaggcgacctccgctcctttggatgctacgcgtcgccacaggcatcctcgatggtcgccaaccttgtggagggcgtgtcgtaccccttcttctactcgctcgccgacatgggtaccctccccgaccaccccacaagaacatcgctcgcctcctcaaggccaagcgcttccgcaagcccgacatctccgagaccatccaggagctgctcggcggcaaggtggggagggggcaactatccggtgggttggtggtggacgtgggagccaatgttggcatggcatcatttgtggccgccgtgatggggtttcgggtgctggcattcgatgattcgagcccgtgttcgagaatctgcagcggatattcgacggggtgtacctcaaccgggtgcagcaccgcattgtggtgtatcacgctgcgtggctgcagcttctgatcgagttgggactattacgatgcacagggtgattggtcgactggacaacagtgctatatctgcagacggtgcaaagttagcattaagtctaatgcagaaattgctgttgaagtttccacaattcctttggatgaacttgttccagatactgagagagttcttctgatcaaagttgatgttcaaggctgggaataccacgtactaggaggcgcatcaaatttgctttcaaggaggaaagattgaaaatacactatcttcatatttgcaatctctgcaaaatttcaccatctatttcaatccaagggatgtgtgcaatctttggcc

SEQ ID NO: 52858 - DNA, 3611 bp, Zea Mays
atgctgccgctcgtcctggccaccctcaccagcgtactgctggccggcccagcagccgaccacggagccctcggcagcccgccgccggaccccgtgcagtgctcgtccggcggcggcacggccgactgcaccgtgtcgagcgcctacggcgtgttcccggaccgctccacgtgccgcgcgtccgccgctgtgtacccggcgtcggaggacgagctggtgcgcgccgtggccggcgccgccgcggccgggaccaagatgaaggtggccacccgctactcccacagcatcccgccgctggcgtgccccgggagcggccgcggcgagggcctcgtcatcagtaccaggcggctcgaccgcgtcgtgtccgtggacccggcggcggggcgcgtcacggtggagagcggcgtcacgctgcgagacctcgtcgaggaggccgccaaggccgggctcgcgctgccctacgagccctactggtgggggctcaccgtcggcggcatgctcggcacgggcgcgcacggcagctcgctctggggcaacggcagcgccgtgcacgagtacgtcgtcgggatgcgcatcgtcacgccggcggccgccgccgagggctacgccaaggtgcgcgtgctcaccgccgctgacccggacctggacgccgccaaggtctctctcggcgtcctcggcgtcatctctcaggtgacgctggcgctacaacctctgttcaagcgctcggtgacgttcagcgagcgggacgacgacgacctggcggagcaggtgggcacgttcgggtaccggcacgagttcgccgacatcgcgtggttcccagggcatgggcgggcggtgtaccgcatcgacgaccgcctgccgctgagcgcgcccgacgacggcgccatggacttcatcggcttccgcgccacccccacgctcgcgatccaggcaacccgcctcgccgaggacctcttcgagcgcgccgacaacggcagcggcaagtgcctgacgtcgcgggtgacgcacgcgacgctgtcggcggccgggtacgggctgcagtggcggagcggcgggctgttcgcggggtaccccgtggtggggccgcagcaccggatgcaggcgtcgggcggcctccccgtgcgccgcgccgtgctgttcgtcgccgaggtgcgccggcttcgggacctggagcccagggcgctgtgcggcgtggagctctacgacggcatcctcatacgctacgtgaaggcgtccacggcgcatctgggcaagcccgcgccgcgcggggaaccgtccggggacatggtggacttcgacatcacctactaccgcagccgtgactccgggcggccgcgcctgttcgaggacgtgctggaggaggtcgagcagatgggcatcttcaagtacggcggcctgccgcactggggcaagaaccgcaacctcgccttcgtcggtgccgcgcgcaagtactccggcctgccgcgcttcctgcgcgtcaaggacgcctacgaccccgatggcctcttctccagcgactggagcaacatgatgctcggcatcggcgggaggtcgcccacgacggacgcgcccgggtgcgcgctcgaggggatgtgcgtgtgctcgcgggacgagcactgcgcgccggagcagggctatgtctgccgccccggcaaggtgtacaaggaggccagagtctgcaccagggcaacgcaaagcccggagcccggcggcttcccccaacgctatccggcaccgccgctggctgctccagcaaaagcccgagctcagttcatcaatgtcggcactgccggccccaccgccggcgccaccggcacgctcctgcggcggtatcctcgactcccagaaccgtcttgctcctctttgtgctctagaaagcgccgggtctatccttcgccacctctgcggcctcctcctcctccgccgcctgccaggcgacctccgctcctttggatgctacgcgtcgccacaggcatcctcgatggtcgccaaccttgtggagggcgtgtcgtaccccttcttctactcgctcgccgacatgggtaccctccccgaccaccccacaagaacatcgctcgcctcctcaaggccaagcgcttccgcaagcccgacatctccgagaccatccaggagctgctcggcggcaaggtggggagggggcaactatccggtgggttggtggtggacgtgggagccaatgttggcatggcatcatttgtggccgccgtgatggggtttcgggtgctggcattcgatgattcgagcccgtgttcgagaatctgcagcggatattcgacggggtgtacctcaaccgggtgcagcaccgcattgtggtgtatcacgctgcgtggctgcagcttctgatcgagttgggactattacgatgcacagggtgattggtcgactggacaacagtgctatatctgcagacggtgcaaagttagcattaagtctaatgcagaaattgctgttgaagtttccacaattcctttggatgaacttgttccagatactgagagagttcttctgatcaaagttgatgttcaaggctgggaataccacgtactaggaggcgcatcaaatttgctttcaaggaggaaaggtgaagctccctatccctaccttatatatgaagaagatgaacacctactgcaggctggcaacagcagtgcacaggacataaggacatttctcactagtgttggttacaaccactgtaaaaggcatggaaatggtgctcacggtaaaaggaatagacaaatttgtttctgactgatgctcttatgctcctaagctaggtttgtatatgaactgtgaagaatcagctgagttctggcagttttggccctttgttacttagcaatgccagatgtttatacatgtcatgtgcccaatagttgtattgcactgagttctatggtaccccttggctttaacttttaggttaatttgttggttgctggaccttttgtcattactgtctctggtagggaaaagatgatgttcttactggagttgagttaactaaccatttgctgtcagaagcgatgtttttacctgaccagagggagtctatgctatagatacttggtataacatcaactttagctattgattatgtagcttctcttaaaaatatgtgtgcatgcgcttggcatcttgaatcttaatgacatttccagataatagtcatttgttttctgaccttggaatgtatgcttagtactgaatatcattacatatatgcttcagtttttcctgtgttttgagaagcatctaggatttttttgttgaacagccaaaatagtttaactcagtttttgggttaccttgcatatttcctttcagttgcatagtttacccacatacatttttaacatgattactatgaatgagatttgacatgacttttaactgaaatgctaagatcttacaaacaagaaatatttggttaaaaaataacaagctgattctaccattttcagaagtactgtgatagtttaactagtagtactttggagttaaattaatattgtttccatatataattatttggaacaaatttcctttccgaagattaatgttacatcaacatctatctatattgaatc

SEQ ID NO: 52859 - DNA, 497 bp, Zea Mays
ctctgtcaagccatccaaagccggcaccggttttttgtgtgctcgtccagcgcccacgctcccagcactgccggacgccgacgcactgtccgtaggcgagtctacaggtgagcggcgcaccacagtccgcgggcgagtctttcggagttccggcgcaggcgcgcaacacagtttgcacgcaagcggcgcacccgccctatcggtcgccgctcggctgcccctaacctgaggagcagtccagggtccagcagtcgcttaggtacccttcctgttccagaatccaagctcccttccagaatccaagctcaagtaggatgaagataaatgaggagattttttagtcgctttaagaggttccgcaacaggtggtgctagtccaagtgaagtttcaaaatggccagagtaaacaagattaaaggtcctaatagtttagacggggcaagggcacaataagccaggagatctacacgaaagaccagaagaaggcaaatggttag

SEQ ID NO: 52860 - DNA, 798 bp, Zea Mays
ctctgtcaagccatccaaagccggcaccggttttttgtgtgctcgtccagcgcccacgctcccagcactgccggacgccgacgcactgtccgtaggcgagtctacaggtgagcggcgcaccacagtccgcgggcgagtctttcggagttccggcgcaggcgcgcaacacagtttgcacgcaagcggcgcacccgccctatcggtcgccgctcggctgcccctaacctgaggagcagtccagggtccagcagtcgcttaggtacccttcctgttccagaatccaagctcccttccagaatccaagctcaagtaggatgaagataaatgaggagattttttagtcgctttaagaggttccgcaacaggtggtgctagtccaagtgaagtttcaagtgagttgctagttggttttgcttgtcttgatccaaagaagtcattttctatgttcgatttggagaagcttgttaagcttggtgagttatatgatcaaaatttcacggtagttgatcgtgtaatgttaacagagcaactcaagacatatattgttcatgtgagaaggcgtgctgcttttagtacttgtgaagatatagcatctctttctatgaagatggtttagaccggaaagcatgttgtatttcctttagtctacaagctaattgagttggccctattattacatgtgtcaacgacaagtgttaagataacattttcagctgtgaatataattaaaagagaattgcgtaacaagattgaagatgactggtttaatgatttaatggtttgctacactgaaaaaga

SEQ ID NO: 52861 - DNA, 729 bp, Zea Mays
cttcacccagcgtgctctctctctccctcctccctctgtgcgacggctgggtgggcttccgccgccgccctacgccaagtgccggggccatatagccggtctcttcgccggcgacgagaacgcatcagctatctggcgaggctaacttccctgcgcaggcgaggctaacggcaacaccgagccaggccgtccgggtttaattggttcgcggcgatgggccgcccggagccggtcgtgctgttcgctcagacgatcctccactcccagctggacgagtacgtcgacgaggtgctattttctgagccagttgtgatcactgcttgtgagtttcttgagcagaatgcatctccttctacgccaaacatttcccttgttggtgctacatcgccaccttcatttgctttggaaatgtttgttcactgtgatggggagtctcggtttaggcgtctttgccatcctttcttatattcacattcttcatcgaatgtgctagaagttgaggtatgaataaattcatagtttctagtttgtcttccttttaagtgacacttcttatttctttgctatttttatccatatcttgctgaggtaaggattgctgtagtccaggttgggtaaggatcccaatgcatgagagtaggacgcctgtccttggttgactggtcaggagctcatctcctatgcagctcgccaagaatctgggccaggctgaagaaagaggctgacccg

SEQ ID NO: 52862 - DNA, 717 bp, Zea Mays
cttcacccagcgtgctctctctctccctcctccctctgtgcgacggctgggtgggcttccgccgccgccctacgccaagtgccggggccatatagccggtctcttcgccggcgacgagaacgcatcaggctaacttccctgcgcaggcgaggctaacggcaacaccgagccaggccgtccgggtttaattggttcgcggcgatgggccgcccggagccggtcgtgctgttcgctcagacgatcctccactcccagctggacgagtacgtcgacgaggtgctattttctgagccagttgtgatcactgcttgtgagtttcttgagcagaatgcatctccttctacgccaaacatttcccttgttggtgctacatcgccaccttcatttgctttggaaatgtttgttcactgtgatggggagtctcggtttaggcgtctttgccatcctttcttatattcacattcttcatcgaatgtgctagaagttgaggtatgaataaattcatagtttctagtttgtcttccttttaagtgacacttcttatttctttgctatttttatccatatcttgctgaggtaaggattgctgtagtccaggttgggtaaggatcccaatgcatgagagtaggacgcctgtccttggttgactggtcaggagctcatctcctatgcagctcgccaagaatctgggccaggctgaagaaagaggctgacccg

SEQ ID NO: 52863 - DNA, 742 bp, Zea Mays
aaaaaactcggatcggcctaccgccgtacgccgcatctgttcacttcacccagcgtgctctctctctccctcctccctctgtgcgacggctgggtgggcttccgccgccgccctacgccaagtgccggggccatatagccggtctcttcgccggcgacgagaacgcatcaggcgaggctaacggcaacaccgagccaggccgtccgggtttaattggttcgcggcgatgggccgcccggagccggtcgtgctgttcgctcagacgatcctccactcccagctggacgagtacgtcgacgaggtgctattttctgagccagttgtgatcactgcttgtgagtttcttgagcagaatgcatctccttctacgccaaacatttcccttgttggtgctacatcgccaccttcatttgctttggaaatgtttgttcactgtgatggggagtctcggtttaggcgtctttgccatcctttcttatattcacattcttcatcgaatgtgctagaagttgaggtatgaataaattcatagtttctagtttgtcttccttttaagtgacacttcttatttctttgctatttttatccatatcttgctgaggtaaggattgctgtagtccaggttgggtaaggatcccaatgcatgagagtaggacgcctgtccttggttgactggtcaggagctcatctcctatgcagctcgccaagaatctgggccaggctgaagaaagaggctgacccg

SEQ ID NO: 52864 - DNA, 517 bp, Zea Mays
gttattatccctaacattctcccgtttctgtggatgtcaagtgccaacgatgcttcagcatgtccaattcgcttgtggcataggaatctcatcctagattcaatagaggggctgcaatgccggcatcgccatagctggaaatcgagcactgacggacaccgggcgccgagatgggccgtcttgtccaccgccgcaagaaccgcatgcgttggagccatccttacacctgctcctacttccgcgccagcaacccaacacgccgacgacacgagctcctccttataaaagtgacatctttattgtatagataacgaatggttatagttatttattcttgtgtccaagtggtattggatttttttagcttggggttaaagaaaagacagtcatgtactttgcatcttttttgtatttatgttttatgctaaattgtggaataacactatattagttgttagcaaagaatttctgagatattaaggttgatgataatatatgttgttatttcatttaatca

SEQ ID NO: 52865 - DNA, 2213 bp, Zea Mays
cgcgattccccaccccgcgcccgcagcccccccccccgtcctcccggccgcagccgagcacagccgccgcgcccacaaatcacgcgactcccgcttccatgtcctcgcgtcctccattgcagccgcatacatagcgtcgccccttccatcgatggcagccagccgcgcccgcaaatcacgcgactcccccttccatggcgtcgcccccttccatccatggcaggtccgcgcccctacgccccaaatcacgcggatggaaggtatgcgcctcctctccctattgctcagtgtaggcagtccccaaatccgcgcgtccgcgccacctcctactctgcgctccccgttccatgtcacgcgcacctgctcccgcaccggagaacccaccgcaagccgacctcgtcctgagatggcggtggcgctgtgcttcccaggggtcgcgagggagtctctctctggacgcgcccgtcgccgcctccaagctcaggagggagcggcgcccggcccccgcgagcgtgaacccggggccacaatgcttgaggcggaggaggggcctggcggttcgctgccagacggggtccaccgcagcgcccttcctcaggacggaggagccccccgcggctgcggcgggggcaaggaatgcccaggcggggttcaccttcgtcatgaagttcggcggctcgtcgctcgcgtcagccgagcggatgcgggaggtggccggcctcatccttagcttcctcgacgagatgcctgtcgccgtcctctccgccatggggaagaccaccaataacctcctcctaggaccttccatttctagctctcagcgcctgagtcagggccgaagagaaggcggtgagctgcggcggaggaggggcatctgaaatccctgagctcgctgtcatcagggagctacatcttaggacaattgatgagctcggtttagataagtcgattgtttcaggtatgttgttgtttgctccactctgctcttggaacgcctcagttgttcctcttgctctatcatgaatgcttctgttatacaatgggatgtcgttctcttggatgtgccaaagttttctctccccttagtctgaataacaattcctggtggatgtatgtatgtattctcttggatgtgcgaaagttttccccttggatgtgcgaaacacatttactcctcaccgcaatctgcgcctccactctcgacccctcctccttcctcctctccctagggacccttctccccaacacgcaggggtagcgtaggaggtgttgtggcggcattatctaggaagcggtctgtggacatgaggcagatcaacccgaaggtgcctaaggaggaggctgtcaccatctccggtcgactcgtccagatcctctccgaccatgggcccctcaccatcggcaacacctagaacaacacgaaggtacccaatcaaccagtcagtcaggcagagtggcaaaagctggggagcgatgcaggcgtcagagcagcaacaacggaggagtaagctctgccagtgtagatgagaaggaaacacgcaaagagcatcaaaagcaagttcaacgatcttatgtcaacccatccacctctgaatgaggcatattcagatgtgtgtgtattcagtttacagagctcaatatgttacatcgaccttcccaacccgccggcagagcttaagaagctcaagcacaagaagtgcctcgtccagtccccccaactccttcatggatgtcaagtgccaacgatgcttcagcatgtccaattcgcttgtggcataggaatctcatcctagattcaatagaggggctgcaatgccggcatcgccatagctggaaatcgagcactgacggacaccgggcgccgagatgggccgtcttgtccaccgccgcaagaaccgcatgcgttggagccatccttacacctgctcctacttccgcgccagcaacccaacacgccgacgacacgagctcctccttataaaagtgacatctttattgtatagataacgaatggttatagttatttattcttgtgtccaagtggtattggatttttttagcttggggttaaagaaaagacagtcatgtactttgcatcttttttgtatttatgttttatgctaaattgtggaataacactatattagttgttagcaaagaatttctgagatattaaggttgatgataatatatgttgttatttcatttaatca

SEQ ID NO: 52866 - DNA, 1819 bp, Zea Mays
cgcgattccccaccccgcgcccgcagcccccccccccgtcctcccggccgcagccgagcacagccgccgcgcccacaaatcacgcgactcccgcttccatgtcctcgcgtcctccattgcagccgcatacatagcgtcgccccttccatcgatggcagccagccgcgcccgcaaatcacgcgactcccccttccatggcgtcgcccccttccatccatggcaggtccgcgcccctacgccccaaatcacgcggatggaaggtatgcgcctcctctccctattgctcagtgtaggcagtccccaaatccgcgcgtccgcgccacctcctactctgcgctccccgttccatgtcacgcgcacctgctcccgcaccggagaacccaccgcaagccgacctcgtcctgagatggcggtggcgctgtgcttcccaggggtcgcgagggagtctctctctggacgcgcccgtcgccgcctccaagctcaggagggagcggcgcccggcccccgcgagcgtgaacccggggccacaatgcttgaggcggaggaggggcctggcggttcgctgccagacggggtccaccgcagcgcccttcctcaggacggaggagccccccgcggctgcggcgggggcaaggaatgcccaggcggggttcaccttcgtcatgaagttcggcggctcgtcgctcgcgtcagccgagcggatgcgggaggtggccggcctcatccttagcttcctcgacgagatgcctgtcgccgtcctctccgccatggggaagaccaccaataacctcctcctaggaccttccatttctagctctcagcgcctgagtcagggccgaagagaaggcggtgagctgcggcggaggaggggcatctgaaatccctgagctcgctgtcatcagggagctacatcttaggacaattgatgagctcggtttagataagtcgattgtttcagggacccttctccccaacacgcaggggtagcgtaggaggtgttgtggcggcattatctaggaagcggtctgtggacatgaggcagatcaacccgaaggtgcctaaggaggaggctgtcaccatctccggtcgactcgtccagatcctctccgaccatgggcccctcaccatcggcaacacctagaacaacacgaaggtacccaatcaaccagtcagtcaggcagagtggcaaaagctggggagcgatgcaggcgtcagagcagcaacaacggaggaatgagaaggaaacacgcaaagagcatcaaaagcaagttcaacgatcttatgtcaacccatccacctctgaatgaggcatattcagatgtgtgtgtattcaggatgtcaagtgccaacgatgcttcagcatgtccaattcgcttgtggcataggaatctcatcctagattcaatagaggggctgcaatgccggcatcgccatagctggaaatcgagcactgacggacaccgggcgccgagatgggccgtcttgtccaccgccgcaagaaccgcatgcgttggagccatccttacacctgctcctacttccgcgccagcaacccaacacgccgacgacacgagctcctccttataaaagtgacatctttattgtatagataacgaatggttatagttatttattcttgtgtccaagtggtattggatttttttagcttggggttaaagaaaagacagtcatgtactttgcatcttttttgtatttatgttttatgctaaattgtggaataacactatattagttgttagcaaagaatttctgagatattaaggttgatgataatatatgttgttatttcatttaatca

SEQ ID NO: 52867 - DNA, 1826 bp, Zea Mays
cgcgattccccaccccgcgcccgcagcccccccccccgtcctcccggccgcagccgagcacagccgccgcgcccacaaatcacgcgactcccgcttccatgtcctcgcgtcctccattgcagccgcatacatagcgtcgccccttccatcgatggcagccagccgcgcccgcaaatcacgcgactcccccttccatggcgtcgcccccttccatccatggcaggtccgcgcccctacgccccaaatcacgcggatggaaggggtcgcgagggagtctctctctggacgcgcccgtcgccgcctccaagctcaggagggagcggcgcccggcccccgcgagcgtgaacccggggccacaatgcttgaggcggaggaggggcctggcggttcgctgccagacggggtccaccgcagcgcccttcctcaggacggaggagccccccgcggctgcggcgggggcaaggaatgcccaggcggggttcaccttcgtcatgaagttcggcggctcgtcgctcgcgtcagccgagcggatgcgggaggtggccggcctcatccttagcttcctcgacgagatgcctgtcgccgtcctctccgccatggggaagaccaccaataacctcctcctaggaccttccatttctagctctcagcgcctgagtcagggtgctcgattctttcgcttactagctaacaaggctagatgcgcgtgtgcctgattcgttgtctgtgtaggccgaagagaaggcggtgagctgcggcggaggaggggcatctgaaatccctgagctcgctgtcatcagggagctacatcttaggacaattgatgagctcggtttagataagtcgattgtttcagggacccttctccccaacacgcaggggtagcgtaggaggtgttgtggcggcattatctaggaagcggtctgtggacatgaggcagatcaacccgaaggtgcctaaggaggaggctgtcaccatctccggtcgactcgtccagatcctctccgaccatgggcccctcaccatcggcaacacctagaacaacacgaaggtacccaatcaaccagtcagtcaggcagagtggcaaaagctggggagcgatgcaggcgtcagagcagcaacaacggaggatgtagatgagaaggaaacacgcaaagagcatcaaaagcaagttcaacgatcttatgtcaacccatccacctctgaatgaggcatattcagatgtgtgtgtattcagtttacagagctcaatatgttacatcgaccttcccaacccgccggcagagcttaagaagctcaagcacaagaagtgcctcgtccagtccccccaactccttcatggatgtcaagtgccaacgatgcttcagcatgtccaattcgcttgtggcataggaatctcatcctagattcaatagaggggctgcaatgccggcatcgccatagctggaaatcgagcactgacggacaccgggcgccgagatgggccgtcttgtccaccgccgcaagaaccgcatgcgttggagccatccttacacctgctcctacttccgcgccagcaacccaacacgccgacgacacgagctcctccttataaaagtgacatctttattgtatagataacgaatggttatagttatttattcttgtgtccaagtggtattggatttttttagcttggggttaaagaaaagacagtcatgtactttgcatcttttttgtatttatgttttatgctaaattgtggaataacactatattagttgttagcaaagaatttctgagatattaaggttgatgataatatatgttgttatttcatttaatca

SEQ ID NO: 52868 - DNA, 1633 bp, Zea Mays
cgcgattccccaccccgcgcccgcagcccccccccccgtcctcccggccgcagccgagcacagccgccgcgcccacaaatcacgcgactcccgcttccatgtcctcgcgtcctccattgcagccgcatacatagcgtcgccccttccatcgatggcagccagccgcgcccgcaaatcacgcgactcccccttccatggcgtcgcccccttccatccatggcaggtccgcgcccctacgccccaaatcacgcggatggaaggggtcgcgagggagtctctctctggacgcgcccgtcgccgcctccaagctcaggagggagcggcgcccggcccccgcgagcgtgaacccggggccacaatgcttgaggcggaggaggggcctggcggttcgctgccagacggggtccaccgcagcgcccttcctcaggacggaggagccccccgcggctgcggcgggggcaaggaatgcccaggcggggttcaccttcgtcatgaagttcggcggctcgtcgctcgcgtcagccgagcggatgcgggaggtggccggcctcatccttagcttcctcgacgagatgcctgtcgccgtcctctccgccatggggaagaccaccaataacctcctcctaggaccttccatttctagctctcagcgcctgagtcagggtgctcgattctttcgcttactagctaacaaggctagatgcgcgtgtgcctgattcgttgtctgtgtaggccgaagagaaggcggtgagctgcggcggaggaggggcatctgaaatccctgagctcgctgtcatcagggagctacatcttaggacaattgatgagctcggtttagataagtcgattgtttcaggtacccaatcaaccagtcagtcaggcagagtggcaaaagctggggagcgatgcaggcgtcagagcagcaacaacggaggactctgccagtgtagatgagaaggaaacacgcaaagagcatcaaaagcaagttcaacgatcttatgtcaacccatccacctctgaatgaggcatattcagatgtgtgtgtattcagagctcaatatgttacatcgaccttcccaacccgccggcagagcttaagaagctcaagcacaagaagtgcctcgtccagtccccccaactccttcatggatgtcaagtgccaacgatgcttcagcatgtccaattcgcttgtggcataggaatctcatcctagattcaatagaggggctgcaatgccggcatcgccatagctggaaatcgagcactgacggacaccgggcgccgagatgggccgtcttgtccaccgccgcaagaaccgcatgcgttggagccatccttacacctgctcctacttccgcgccagcaacccaacacgccgacgacacgagctcctccttataaaagtgacatctttattgtatagataacgaatggttatagttatttattcttgtgtccaagtggtattggatttttttagcttggggttaaagaaaagacagtcatgtactttgcatcttttttgtatttatgttttatgctaaattgtggaataacactatattagttgttagcaaagaatttctgagatattaaggttgatgataatatatgttgttatttcatttaatca

SEQ ID NO: 52869 - DNA, 1530 bp, Zea Mays
cgcgattccccaccccgcgcccgcagcccccccccccgtcctcccggccgcagccgagcacagccgccgcgcccacaaatcacgcgactcccgcttccatgtcctcgcgtcctccattgcagccgcatacatagcgtcgccccttccatcgatggcagccagccgcgcccgcaaatcacgcgactcccccttccatggcgtcgcccccttccatccatggcaggtccgcgcccctacgccccaaatcacgcggatggaaggccgaagagaaggcggtgagctgcggcggaggaggggcatctgaaatccctgagctcgctgtcatcagggagctacatcttaggacaattgatgagctcggtttagataagtcgattgtttcaggtatgttgttgtttgctccactctgctcttggaacgcctcagttgttcctcttgctctatcatgaatgcttctgttatacaatgggatgtcgttctcttggatgtgccaaagttttctctccccttagtctgaataacaattcctggtggatgtatgtatgtattctcttggatgtgcgaaagttttccccttggatgtgcgaaacacatttactcctcaccgcaatctgcgcctccactctcgacccctcctccttcctcctctccctagggacccttctccccaacacgcaggggtagcgtaggaggtgttgtggcggcattatctaggaagcggtctgtggacatgaggcagatcaacccgaaggtgcctaaggaggaggctgtcaccatctccggtcgactcgtccagatcctctccgaccatgggcccctcaccatcggcaacacctagaacaacacgaaggtacccaatcaaccagtcagtcaggcagagtggcaaaagctggggagcgatgcaggcgtcagagcagcaacaacggaggactctgccagtgtagatgagaaggaaacacgcaaagagcatcaaaagcaagttcaacgatcttatgtcaacccatccacctctgaatgaggcatattcagatgtgtgtgtattcaggatgtcaagtgccaacgatgcttcagcatgtccaattcgcttgtggcataggaatctcatcctagattcaatagaggggctgcaatgccggcatcgccatagctggaaatcgagcactgacggacaccgggcgccgagatgggccgtcttgtccaccgccgcaagaaccgcatgcgttggagccatccttacacctgctcctacttccgcgccagcaacccaacacgccgacgacacgagctcctccttataaaagtgacatctttattgtatagataacgaatggttatagttatttattcttgtgtccaagtggtattggatttttttagcttggggttaaagaaaagacagtcatgtactttgcatcttttttgtatttatgttttatgctaaattgtggaataacactatattagttgttagcaaagaatttctgagatattaaggttgatgataatatatgttgttatttcatttaatca

SEQ ID NO: 52870 - DNA, 1273 bp, Zea Mays
cgcgattccccaccccgcgcccgcagcccccccccccgtcctcccggccgcagccgagcacagccgccgcgcccacaaatcacgcgactcccgcttccatgtcctcgcgtcctccattgcagccgcatacatagcgtcgccccttccatcgatggcagccagccgcgcccgcaaatcacgcgactcccccttccatggcgtcgcccccttccatccatggcaggtccgcgcccctacgccccaaatcacgcggatggaaggacaattgatgagctcggtttagataagtcgattgtttcagggacccttctccccaacacgcaggggtagcgtaggaggtgttgtggcggcattatctaggaagcggtctgtggacatgaggcagatcaacccgaaggtgcctaaggaggaggctgtcaccatctccggtcgactcgtccagatcctctccgaccatgggcccctcaccatcggcaacacctagaacaacacgaaggtacccaatcaaccagtcagtcaggcagagtggcaaaagctggggagcgatgcaggcgtcagagcagcaacaacggaggactctgccagtgtagatgagaaggaaacacgcaaagagcatcaaaagcaagttcaacgatcttatgtcaacccatccacctctgaatgaggcatattcagatgtgtgtgtattcagagctcaatatgttacatcgaccttcccaacccgccggcagagcttaagaagctcaagcacaagaagtgcctcgtccagtccccccaactccttcatggatgtcaagtgccaacgatgcttcagcatgtccaattcgcttgtggcataggaatctcatcctagattcaatagaggggctgcaatgccggcatcgccatagctggaaatcgagcactgacggacaccgggcgccgagatgggccgtcttgtccaccgccgcaagaaccgcatgcgttggagccatccttacacctgctcctacttccgcgccagcaacccaacacgccgacgacacgagctcctccttataaaagtgacatctttattgtatagataacgaatggttatagttatttattcttgtgtccaagtggtattggatttttttagcttggggttaaagaaaagacagtcatgtactttgcatcttttttgtatttatgttttatgctaaattgtggaataacactatattagttgttagcaaagaatttctgagatattaaggttgatgataatatatgttgttatttcatttaatca

SEQ ID NO: 52871 - DNA, 1376 bp, Zea Mays
cgcgattccccaccccgcgcccgcagcccccccccccgtcctcccggccgcagccgagcacagccgccgcgcccacaaatcacgcgactcccgcttccatgtcctcgcgtcctccattgcagccgcatacatagcgtcgccccttccatcgatggcagccagccgcgcccgcaaatcacgcgactcccccttccatggcgtcgcccccttccatccatggcaggtccgcgcccctacgccccaaatcacgcggatggaaggccgaagagaaggcggtgagctgcggcggaggaggggcatctgaaatccctgagctcgctgtcatcagggagctacatcttaggacaattgatgagctcggtttagataagtcgattgtttcagggacccttctccccaacacgcaggggtagcgtaggaggtgttgtggcggcattatctaggaagcggtctgtggacatgaggcagatcaacccgaaggtgcctaaggaggaggctgtcaccatctccggtcgactcgtccagatcctctccgaccatgggcccctcaccatcggcaacacctagaacaacacgaaggtacccaatcaaccagtcagtcaggcagagtggcaaaagctggggagcgatgcaggcgtcagagcagcaacaacggaggagtaaggcgcgatcctctgccagtgtagatgagaaggaaacacgcaaagagcatcaaaagcaagttcaacgatcttatgtcaacccatccacctctgaatgaggcatattcagatgtgtgtgtattcagtttacagagctcaatatgttacatcgaccttcccaacccgccggcagagcttaagaagctcaagcacaagaagtgcctcgtccagtccccccaactccttcatggatgtcaagtgccaacgatgcttcagcatgtccaattcgcttgtggcataggaatctcatcctagattcaatagaggggctgcaatgccggcatcgccatagctggaaatcgagcactgacggacaccgggcgccgagatgggccgtcttgtccaccgccgcaagaaccgcatgcgttggagccatccttacacctgctcctacttccgcgccagcaacccaacacgccgacgacacgagctcctccttataaaagtgacatctttattgtatagataacgaatggttatagttatttattcttgtgtccaagtggtattggatttttttagcttggggttaaagaaaagacagtcatgtactttgcatcttttttgtatttatgttttatgctaaattgtggaataacactatattagttgttagcaaagaatttctgagatattaaggttgatgataatatatgttgttatttcatttaatca

SEQ ID NO: 52872 - DNA, 1451 bp, Zea Mays
cgcgattccccaccccgcgcccgcagcccccccccccgtcctcccggccgcagccgagcacagccgccgcgcccacaaatcacgcgactcccgcttccatgtcctcgcgtcctccattgcagccgcatacatagcgtcgccccttccatcgatggcagccagccgcgcccgcaaatcacgcgactcccccttccatggcgtcgcccccttccatccatggcaggtccgcgcccctacgccccaaatcacgcggatggaaggccgaagagaaggcggtgagctgcggcggaggaggggcatctgaaatccctgagctcgctgtcatcagggagctacatcttaggacaattgatgagctcggtttagataagtcgattgtttcagttttccccttggatgtgcgaaacacatttactcctcaccgcaatctgcgcctccactctcgacccctcctccttcctcctctccctagggacccttctccccaacacgcaggggtagcgtaggaggtgttgtggcggcattatctaggaagcggtctgtggacatgaggcagatcaacccgaaggtgcctaaggaggaggctgtcaccatctccggtcgactcgtccagatcctctccgaccatgggcccctcaccatcggcaacacctagaacaacacgaaggtacccaatcaaccagtcagtcaggcagagtggcaaaagctggggagcgatgcaggcgtcagagcagcaacaacggaggactctgccagtgtagatgagaaggaaacacgcaaagagcatcaaaagcaagttcaacgatcttatgtcaacccatccacctctgaatgaggcatattcagatgtgtgtgtattcagtttacagagctcaatatgttacatcgaccttcccaacccgccggcagagcttaagaagctcaagcacaagaagtgcctcgtccagtccccccaactccttcatggatgtcaagtgccaacgatgcttcagcatgtccaattcgcttgtggcataggaatctcatcctagattcaatagaggggctgcaatgccggcatcgccatagctggaaatcgagcactgacggacaccgggcgccgagatgggccgtcttgtccaccgccgcaagaaccgcatgcgttggagccatccttacacctgctcctacttccgcgccagcaacccaacacgccgacgacacgagctcctccttataaaagtgacatctttattgtatagataacgaatggttatagttatttattcttgtgtccaagtggtattggatttttttagcttggggttaaagaaaagacagtcatgtactttgcatcttttttgtatttatgttttatgctaaattgtggaataacactatattagttgttagcaaagaatttctgagatattaaggttgatgataatatatgttgttatttcatttaatca

SEQ ID NO: 52873 - DNA, 1730 bp, Zea Mays
cgcgattccccaccccgcgcccgcagcccccccccccgtcctcccggccgcagccgagcacagccgccgcgcccacaaatcacgcgactcccgcttccatgtcctcgcgtcctccattgcagccgcatacatagcgtcgccccttccatcgatggcagccagccgcgcccgcaaatcacgcgactcccccttccatggcgtcgcccccttccatccatggcaggtccgcgcccctacgccccaaatcacgcggatggaaggggtcgcgagggagtctctctctggacgcgcccgtcgccgcctccaagctcaggagggagcggcgcccggcccccgcgagcgtgaacccggggccacaatgcttgaggcggaggaggggcctggcggttcgctgccagacggggtccaccgcagcgcccttcctcaggacggaggagccccccgcggctgcggcgggggcaaggaatgcccaggcggggttcaccttcgtcatgaagttcggcggctcgtcgctcgcgtcagccgagcggatgcgggaggccgaagagaaggcggtgagctgcggcggaggaggggcatctgaaatccctgagctcgctgtcatcagggagctacatcttaggacaattgatgagctcggtttagataagtcgattgtttcagttttccccttggatgtgcgaaacacatttactcctcaccgcaatctgcgcctccactctcgacccctcctccttcctcctctccctagggacccttctccccaacacgcaggggtagcgtaggaggtgttgtggcggcattatctaggaagcggtctgtggacatgaggcagatcaacccgaaggtgcctaaggaggaggctgtcaccatctccggtcgactcgtccagatcctctccgaccatgggcccctcaccatcggcaacacctagaacaacacgaaggtacccaatcaaccagtcagtcaggcagagtggcaaaagctggggagcgatgcaggcgtcagagcagcaacaacggaggactctgccagtgtagatgagaaggaaacacgcaaagagcatcaaaagcaagttcaacgatcttatgtcaacccatccacctctgaatgaggcatattcagatgtgtgtgtattcagtttacagagctcaatatgttacatcgaccttcccaacccgccggcagagcttaagaagctcaagcacaagaagtgcctcgtccagtccccccaactccttcatggatgtcaagtgccaacgatgcttcagcatgtccaattcgcttgtggcataggaatctcatcctagattcaatagaggggctgcaatgccggcatcgccatagctggaaatcgagcactgacggacaccgggcgccgagatgggccgtcttgtccaccgccgcaagaaccgcatgcgttggagccatccttacacctgctcctacttccgcgccagcaacccaacacgccgacgacacgagctcctccttataaaagtgacatctttattgtatagataacgaatggttatagttatttattcttgtgtccaagtggtattggatttttttagcttggggttaaagaaaagacagtcatgtactttgcatcttttttgtatttatgttttatgctaaattgtggaataacactatattagttgttagcaaagaatttctgagatattaaggttgatgataatatatgttgttatttcatttaatca

SEQ ID NO: 52874 - DNA, 1766 bp, Zea Mays
cgcgattccccaccccgcgcccgcagcccccccccccgtcctcccggccgcagccgagcacagccgccgcgcccacaaatcacgcgactcccgcttccatgtcctcgcgtcctccattgcagccgcatacatagcgtcgccccttccatcgatggcagccagccgcgcccgcaaatcacgcgactcccccttccatggcgtcgcccccttccatccatggcaggtccgcgcccctacgccccaaatcacgcggatggaaggggtcgcgagggagtctctctctggacgcgcccgtcgccgcctccaagctcaggagggagcggcgcccggcccccgcgagcgtgaacccggggccacaatgcttgaggcggaggaggggcctggcggttcgctgccagacggggtccaccgcagcgcccttcctcaggacggaggagccccccgcggctgcggcgggggcaaggaatgcccaggcggggttcaccttcgtcatgaagttcggcggctcgtcgctcgcgtcagccgagcggatgcgggaggtggccggcctcatccttagcttcctcgacgagatgcctgtcgccgtcctctccgccatggggaagaccaccaataacctcctcctaggaccttccatttctagctctcagcgcctgagtcagggccgaagagaaggcggtgagctgcggcggaggaggggcatctgaaatccctgagctcgctgtcatcagggagctacatcttaggacaattgatgagctcggtttagataagtcgattgtttcagggacccttctccccaacacgcaggggtagcgtaggaggtgttgtggcggcattatctaggaagcggtctgtggacatgaggcagatcaacccgaaggtgcctaaggaggaggctgtcaccatctccggtcgactcgtccagatcctctccgaccatgggcccctcaccatcggcaacacctagaacaacacgaaggtacccaatcaaccagtcagtcaggcagagtggcaaaagctggggagcgatgcaggcgtcagagcagcaacaacggaggactctgccagtgtagatgagaaggaaacacgcaaagagcatcaaaagcaagttcaacgatcttatgtcaacccatccacctctgaatgaggcatattcagatgtgtgtgtattcagtttacagagctcaatatgttacatcgaccttcccaacccgccggcagagcttaagaagctcaagcacaagaagtgcctcgtccagtccccccaactccttcatggatgtcaagtgccaacgatgcttcagcatgtccaattcgcttgtggcataggaatctcatcctagattcaatagaggggctgcaatgccggcatcgccatagctggaaatcgagcactgacggacaccgggcgccgagatgggccgtcttgtccaccgccgcaagaaccgcatgcgttggagccatccttacacctgctcctacttccgcgccagcaacccaacacgccgacgacacgagctcctccttataaaagtgacatctttattgtatagataacgaatggttatagttatttattcttgtgtccaagtggtattggatttttttagcttggggttaaagaaaagacagtcatgtactttgcatcttttttgtatttatgttttatgctaaattgtggaataacactatattagttgttagcaaagaatttctgagatattaaggttgatgataatatatgttgttatttcatttaatca

SEQ ID NO: 52875 - DNA, 1759 bp, Zea Mays
cgcgattccccaccccgcgcccgcagcccccccccccgtcctcccggccgcagccgagcacagccgccgcgcccacaaatcacgcgactcccgcttccatgtcctcgcgtcctccattgcagccgcatacatagcgtcgccccttccatcgatggcagccagccgcgcccgcaaatcacgcgactcccccttccatggcgtcgcccccttccatccatggcaggtccgcgcccctacgccccaaatcacgcggatggaaggggtcgcgagggagtctctctctggacgcgcccgtcgccgcctccaagctcaggagggagcggcgcccggcccccgcgagcgtgaacccggggccacaatgcttgaggcggaggaggggcctggcggttcgctgccagacggggtccaccgcagcgcccttcctcaggacggaggagccccccgcggctgcggcgggggcaaggaatgcccaggcggggttcaccttcgtcatgaagttcggcggctcgtcgctcgcgtcagccgagcggatgcgggaggtggccggcctcatccttagcttcctcgacgagatgcctgtcgccgtcctctccgccatggggaagaccaccaataacctcctcctaggaccttccatttctagctctcagcgcctgagtcagggccgaagagaaggcggtgagctgcggcggaggaggggcatctgaaatccctgagctcgctgtcatcagggagctacatcttaggacaattgatgagctcggtttagataagtcgattgtttcagggacccttctccccaacacgcaggggtagcgtaggaggtgttgtggcggcattatctaggaagcggtctgtggacatgaggcagatcaacccgaaggtgcctaaggaggaggctgtcaccatctccggtcgactcgtccagatcctctccgaccatgggcccctcaccatcggcaacacctagaacaacacgaaggtacccaatcaaccagtcagtcaggcagagtggcaaaagctggggagcgatgcaggcgtcagagcagcaacaacggaggactctgccagtgtagatgagaaggaaacacgcaaagagcatcaaaagcaagttcaacgatcttatgtcaacccatccacctctgaatgaggcatattcagatgtgtgtgtattcagagctcaatatgttacatcgaccttcccaacccgccggcagagcttaagaagctcaagcacaagaagtgcctcgtccagtccccccaactccttcatggatgtcaagtgccaacgatgcttcagcatgtccaattcgcttgtggcataggaatctcatcctagattcaatagaggggctgcaatgccggcatcgccatagctggaaatcgagcactgacggacaccgggcgccgagatgggccgtcttgtccaccgccgcaagaaccgcatgcgttggagccatccttacacctgctcctacttccgcgccagcaacccaacacgccgacgacacgagctcctccttataaaagtgacatctttattgtatagataacgaatggttatagttatttattcttgtgtccaagtggtattggatttttttagcttggggttaaagaaaagacagtcatgtactttgcatcttttttgtatttatgttttatgctaaattgtggaataacactatattagttgttagcaaagaatttctgagatattaaggttgatgataatatatgttgttatttcatttaatca

SEQ ID NO: 52876 - DNA, 1841 bp, Zea Mays
cgcgattccccaccccgcgcccgcagcccccccccccgtcctcccggccgcagccgagcacagccgccgcgcccacaaatcacgcgactcccgcttccatgtcctcgcgtcctccattgcagccgcatacatagcgtcgccccttccatcgatggcagccagccgcgcccgcaaatcacgcgactcccccttccatggcgtcgcccccttccatccatggcaggtccgcgcccctacgccccaaatcacgcggatggaaggggtcgcgagggagtctctctctggacgcgcccgtcgccgcctccaagctcaggagggagcggcgcccggcccccgcgagcgtgaacccggggccacaatgcttgaggcggaggaggggcctggcggttcgctgccagacggggtccaccgcagcgcccttcctcaggacggaggagccccccgcggctgcggcgggggcaaggaatgcccaggcggggttcaccttcgtcatgaagttcggcggctcgtcgctcgcgtcagccgagcggatgcgggaggtggccggcctcatccttagcttcctcgacgagatgcctgtcgccgtcctctccgccatggggaagaccaccaataacctcctcctaggaccttccatttctagctctcagcgcctgagtcagggtgctcgattctttcgcttactagctaacaaggctagatgcgcgtgtgcctgattcgttgtctgtgtaggccgaagagaaggcggtgagctgcggcggaggaggggcatctgaaatccctgagctcgctgtcatcagggagctacatcttaggacaattgatgagctcggtttagataagtcgattgtttcagggacccttctccccaacacgcaggggtagcgtaggaggtgttgtggcggcattatctaggaagcggtctgtggacatgaggcagatcaacccgaaggtgcctaaggaggaggctgtcaccatctccggtcgactcgtccagatcctctccgaccatgggcccctcaccatcggcaacacctagaacaacacgaaggtacccaatcaaccagtcagtcaggcagagtggcaaaagctggggagcgatgcaggcgtcagagcagcaacaacggaggagtaaggcgcgatcctctgccagtgtagatgagaaggaaacacgcaaagagcatcaaaagcaagttcaacgatcttatgtcaacccatccacctctgaatgaggcatattcagatgtgtgtgtattcagagctcaatatgttacatcgaccttcccaacccgccggcagagcttaagaagctcaagcacaagaagtgcctcgtccagtccccccaactccttcatggatgtcaagtgccaacgatgcttcagcatgtccaattcgcttgtggcataggaatctcatcctagattcaatagaggggctgcaatgccggcatcgccatagctggaaatcgagcactgacggacaccgggcgccgagatgggccgtcttgtccaccgccgcaagaaccgcatgcgttggagccatccttacacctgctcctacttccgcgccagcaacccaacacgccgacgacacgagctcctccttataaaagtgacatctttattgtatagataacgaatggttatagttatttattcttgtgtccaagtggtattggatttttttagcttggggttaaagaaaagacagtcatgtactttgcatcttttttgtatttatgttttatgctaaattgtggaataacactatattagttgttagcaaagaatttctgagatattaaggttgatgataatatatgttgttatttcatttaatca

SEQ ID NO: 52877 - DNA, 1627 bp, Zea Mays
cgcgattccccaccccgcgcccgcagcccccccccccgtcctcccggccgcagccgagcacagccgccgcgcccacaaatcacgcgactcccgcttccatgtcctcgcgtcctccattgcagccgcatacatagcgtcgccccttccatcgatggcagccagccgcgcccgcaaatcacgcgactcccccttccatggcgtcgcccccttccatccatggcaggtccgcgcccctacgccccaaatcacgcggatggaaggccgaagagaaggcggtgagctgcggcggaggaggggcatctgaaatccctgagctcgctgtcatcagggagctacatcttaggacaattgatgagctcggtttagataagtcgattgtttcaggtatgttgttgtttgctccactctgctcttggaacgcctcagttgttcctcttgctctatcatgaatgcttctgttatacaatgggatgtcgttctcttggatgtgccaaagttttctctccccttagtctgaataacaattcctggtggatgtatgtatgtattctcttggatgtgcgaaagttttccccttggatgtgcgaaacacatttactcctcaccgcaatctgcgcctccactctcgacccctcctccttcctcctctccctagggacccttctccccaacacgcaggggtagcgtaggaggtgttgtggcggcattatctaggaagcggtctgtggacatgaggcagatcaacccgaaggtgcctaaggaggaggctgtcaccatctccggtcgactcgtccagatcctctccgaccatgggcccctcaccatcggcaacacctagaacaacacgaaggtacccaatcaaccagtcagtcaggcagagtggcaaaagctggggagcgatgcaggcgtcagagcagcaacaacggaggactctgccagtgtagatgagaaggaaacacgcaaagagcatcaaaagcaagttcaacgatcttatgtcaacccatccacctctgaatgaggcatattcagatgtgtgtgtattcagagctcaatatgttacatcgaccttcccaacccgccggcagagcttaagaagctcaagcacaagaagtgcctcgtccagtccccccaactccttcatggatgtcaagtgccaacgatgcttcagcatgtccaattcgcttgtggcataggaatctcatcctagattcaatagaggggctgcaatgccggcatcgccatagctggaaatcgagcactgacggacaccgggcgccgagatgggccgtcttgtccaccgccgcaagaaccgcatgcgttggagccatccttacacctgctcctacttccgcgccagcaacccaacacgccgacgacacgagctcctccttataaaagtgacatctttattgtatagataacgaatggttatagttatttattcttgtgtccaagtggtattggatttttttagcttggggttaaagaaaagacagtcatgtactttgcatcttttttgtatttatgttttatgctaaattgtggaataacactatattagttgttagcaaagaatttctgagatattaaggttgatgataatatatgttgttatttcatttaatca

SEQ ID NO: 52878 - DNA, 2033 bp, Zea Mays
cgcgattccccaccccgcgcccgcagcccccccccccgtcctcccggccgcagccgagcacagccgccgcgcccacaaatcacgcgactcccgcttccatgtcctcgcgtcctccattgcagccgcatacatagcgtcgccccttccatcgatggcagccagccgcgcccgcaaatcacgcgactcccccttccatggcgtcgcccccttccatccatggcaggtccgcgcccctacgccccaaatcacgcggatggaaggggtcgcgagggagtctctctctggacgcgcccgtcgccgcctccaagctcaggagggagcggcgcccggcccccgcgagcgtgaacccggggccacaatgcttgaggcggaggaggggcctggcggttcgctgccagacggggtccaccgcagcgcccttcctcaggacggaggagccccccgcggctgcggcgggggcaaggaatgcccaggcggggttcaccttcgtcatgaagttcggcggctcgtcgctcgcgtcagccgagcggatgcgggaggtggccggcctcatccttagcttcctcgacgagatgcctgtcgccgtcctctccgccatggggaagaccaccaataacctcctcctaggaccttccatttctagctctcagcgcctgagtcagggccgaagagaaggcggtgagctgcggcggaggaggggcatctgaaatccctgagctcgctgtcatcagggagctacatcttaggacaattgatgagctcggtttagataagtcgattgtttcaggtatgttgttgtttgctccactctgctcttggaacgcctcagttgttcctcttgctctatcatgaatgcttctgttatacaatgggatgtcgttctcttggatgtgccaaagttttctctccccttagtctgaataacaattcctggtggatgtatgtatgtattctcttggatgtgcgaaagttttccccttggatgtgcgaaacacatttactcctcaccgcaatctgcgcctccactctcgacccctcctccttcctcctctccctagggacccttctccccaacacgcaggggtagcgtaggaggtgttgtggcggcattatctaggaagcggtctgtggacatgaggcagatcaacccgaaggtgcctaaggaggaggctgtcaccatctccggtcgactcgtccagatcctctccgaccatgggcccctcaccatcggcaacacctagaacaacacgaaggtacccaatcaaccagtcagtcaggcagagtggcaaaagctggggagcgatgcaggcgtcagagcagcaacaacggaggagtaagtgtagatgagaaggaaacacgcaaagagcatcaaaagcaagttcaacgatcttatgtcaacccatccacctctgaatgaggcatattcagatgtgtgtgtattcagtttacagagctcaatatgttacatcgaccttcccaacccgccggcagagcttaagaagctcaagcacaagaagtgcctcgtccagtccccccaactccttcatggatgtcaagtgccaacgatgcttcagcatgtccaattcgcttgtggcataggaatctcatcctagattcaatagaggggctgcaatgccggcatcgccatagctggaaatcgagcactgacggacaccgggcgccgagatgggccgtcttgtccaccgccgcaagaaccgcatgcgttggagccatccttacacctgctcctacttccgcgccagcaacccaacacgccgacgacacgagctcctccttataaaagtgacatctttattgtatagataacgaatggttatagttatttattcttgtgtccaagtggtattggatttttttagcttggggttaaagaaaagacagtcatgtactttgcatcttttttgtatttatgttttatgctaaattgtggaataacactatattagttgttagcaaagaatttctgagatattaaggttgatgataatatatgttgttatttcatttaatca

SEQ ID NO: 52879 - DNA, 1847 bp, Zea Mays
cgcgattccccaccccgcgcccgcagcccccccccccgtcctcccggccgcagccgagcacagccgccgcgcccacaaatcacgcgactcccgcttccatgtcctcgcgtcctccattgcagccgcatacatagcgtcgccccttccatcgatggcagccagccgcgcccgcaaatcacgcgactcccccttccatggcgtcgcccccttccatccatggcaggtccgcgcccctacgccccaaatcacgcggatggaaggggtcgcgagggagtctctctctggacgcgcccgtcgccgcctccaagctcaggagggagcggcgcccggcccccgcgagcgtgaacccggggccacaatgcttgaggcggaggaggggcctggcggttcgctgccagacggggtccaccgcagcgcccttcctcaggacggaggagccccccgcggctgcggcgggggcaaggaatgcccaggcggggttcaccttcgtcatgaagttcggcggctcgtcgctcgcgtcagccgagcggatgcgggaggtggccggcctcatccttagcttcctcgacgagatgcctgtcgccgtcctctccgccatggggaagaccaccaataacctcctcctaggaccttccatttctagctctcagcgcctgagtcagggccgaagagaaggcggtgagctgcggcggaggaggggcatctgaaatccctgagctcgctgtcatcagggagctacatcttaggacaattgatgagctcggtttagataagtcgattgtttcagttttccccttggatgtgcgaaacacatttactcctcaccgcaatctgcgcctccactctcgacccctcctccttcctcctctccctagggacccttctccccaacacgcaggggtagcgtaggaggtgttgtggcggcattatctaggaagcggtctgtggacatgaggcagatcaacccgaaggtgcctaaggaggaggctgtcaccatctccggtcgactcgtccagatcctctccgaccatgggcccctcaccatcggcaacacctagaacaacacgaaggtacccaatcaaccagtcagtcaggcagagtggcaaaagctggggagcgatgcaggcgtcagagcagcaacaacggaggactctgccagtgtagatgagaaggaaacacgcaaagagcatcaaaagcaagttcaacgatcttatgtcaacccatccacctctgaatgaggcatattcagatgtgtgtgtattcagagctcaatatgttacatcgaccttcccaacccgccggcagagcttaagaagctcaagcacaagaagtgcctcgtccagtccccccaactccttcatggatgtcaagtgccaacgatgcttcagcatgtccaattcgcttgtggcataggaatctcatcctagattcaatagaggggctgcaatgccggcatcgccatagctggaaatcgagcactgacggacaccgggcgccgagatgggccgtcttgtccaccgccgcaagaaccgcatgcgttggagccatccttacacctgctcctacttccgcgccagcaacccaacacgccgacgacacgagctcctccttataaaagtgacatctttattgtatagataacgaatggttatagttatttattcttgtgtccaagtggtattggatttttttagcttggggttaaagaaaagacagtcatgtactttgcatcttttttgtatttatgttttatgctaaattgtggaataacactatattagttgttagcaaagaatttctgagatattaaggttgatgataatatatgttgttatttcatttaatca

SEQ ID NO: 52880 - DNA, 1011 bp, Zea Mays
tgagagagatcgagcacatgctactgcagcagtgtaatgctaatcagctgaaggaactatgcaatagttcagtatcatcttcagtattaattccccaccttaacaaccttgtgcaacagactatgtttcagcaggatctaatcatgaacctacttagtaacttgcaacaaagtgagaaagttgatggaacacaaccaataatatcttctcaagtccgaacaatggagaatgataaagtagctgatacagttaactctgtgaaggaacggtcattacttgttaaaatttcagagttgcagtctaggatgataatactgactgatgaattaattgcagctaagctaaaacatgttcagttgcagcaagagctaaatgcactgtactgccgagaagaaattgtggatatcagggatgaggataacgaagaaacataatgaggatccatgccgtatgaattatccgcctctctctgagatgcataaattacctgcctctccctgaggtcaatggagaacaggagaaggaaagcggcggggagaacaagagaagaaaagtggaggtgccgcaaatatttgctggatctagagagtagctgcggttgtgttttttttctttgaaggttgtcttccccttgcttgctgtcatcagtcatcagtgtgtataaccgtctctttttcagtagttcgaggtttttttttgggtgactacaagatgaggcgtggtcatgctgctatttttctgtcatccccatcattggaagtagctgtgattatgtagtacgtaggctaccggggtggttaatctatgtagaattgcaggtgactgcataataaattgtattttatgtagcaataggatgtatattaaatattggcgcattcgttgatataatatcatatagggctatttgcaaacatccaaacaaggttgtttgcatatatctaataataaagtatgtatctactccatttgttgttgtcacgtttcaaatggttattttataggtggagt

SEQ ID NO: 52881 - DNA, 1043 bp, Zea Mays
acaaagtgtgctttaaatctgaacgggtgcagctgcatgcccggagaagcgaatcaatcacgcgtgtaatgctaatcagctgaaggaactatgcaatagttcagtatcatcttcagtattaattccccaccttaacaaccttgtgcaacagactatgtttcagcaggatctaatcatgaacctacttagtaacttgcaacaaagtgagaaagttgatggaacacaaccaataatatcttctcaagtccgaacaatggagaatgataaagtagctgatacagttaactctgtgaaggaacggtcattacttgttaaaatttcagagttgcagtctaggatgataatactgactgatgaattaattgcagctaagctaaaacatgttcagttgcagcaagagctaaatgcactgtactgccgagaagaaattgtggatatcagggatgaggataacgaagaaacataatgaggatccatgccgtatgaattatccgcctctctctgagatgcataaattacctgcctctccctgaggtcaatggagaacaggagaaggaaagcggcggggagaacaagagaagaaaagtggaggtgccgcaaatatttgctggatctagagagtagctgcggttgtgttttttttctttgaaggttgtcttccccttgcttgctgtcatcagtcatcagtgtgtataaccgtctctttttcagtagttcgaggtttttttttgggtgactacaagatgaggcgtggtcatgctgctatttttctgtcatccccatcattggaagtagctgtgattatgtagtacgtaggctaccggggtggttaatctatgtagaattgcaggtgactgcataataaattgtattttatgtagcaataggatgtatattaaatattggcgcattcgttgatataatatcatatagggctatttgcaaacatccaaacaaggttgtttgcatatatctaataataaagtatgtatctactccatttgttgttgtcacgtttcaaatggttattttataggtggagt

SEQ ID NO: 52882 - DNA, 1240 bp, Zea Mays
atggcgtcggcggccagggcaaaggaagggccggggaagctgggagccacgggaaaagcgggttatgtagattcatcaggcgataagtccaaacgaagtgtagtagagattaaaggtcgcttctcagtgacatctgagaatgtcgatcttgcaaaggttcaggaaggtccacttagtagtctctcccggaaatcaccagagggttcactgttaagaaaatctgccagcactggtgattattttgttaatcctaagctgatgtgtaatgctaatcagctgaaggaactatgcaatagttcagtatcatcttcagtattaattccccaccttaacaaccttgtgcaacagactatgtttcagcaggatctaatcatgaacctacttagtaacttgcaacaaagtgagaaagttgatggaacacaaccaataatatcttctcaagtccgaacaatggagaatgataaagtagctgatacagttaactctgtgaaggaacggtcattacttgttaaaatttcagagttgcagtctaggatgataatactgactgatgaattaattgcagctaagctaaaacatgttcagttgcagcaagagctaaatgcactgtactgccgagaagaaattgtggatatcagggatgaggataacgaagaaacataatgaggatccatgccgtatgaattatccgcctctctctgagatgcataaattacctgcctctccctgaggtcaatggagaacaggagaaggaaagcggcggggagaacaagagaagaaaagtggaggtgccgcaaatatttgctggatctagagagtagctgcggttgtgttttttttctttgaaggttgtcttccccttgcttgctgtcatcagtcatcagtgtgtataaccgtctctttttcagtagttcgaggtttttttttgggtgactacaagatgaggcgtggtcatgctgctatttttctgtcatccccatcattggaagtagctgtgattatgtagtacgtaggctaccggggtggttaatctatgtagaattgcaggtgactgcataataaattgtattttatgtagcaataggatgtatattaaatattggcgcattcgttgatataatatcatatagggctatttgcaaacatccaaacaaggttgtttgcatatatctaataataaagtatgtatctactccatttgttgttgtcacgtttcaaatggttattttataggtggagt

SEQ ID NO: 52883 - DNA, 2973 bp, Zea Mays
cttcctcctcctcctcctcccccttcccgagctcctctctcttgccgtccacgctcgactgcgcgagacactggtcaacgcccgggtggcaggcggctctggtggtgtgttgtgtgtgtggtggtggggtcgggtgagtctagctccgtcgcttgcgccggaagaacttgtcgggagctgtctctagccctcgggttccatggggaggaacggtagcgtgaagcgctcggcgtcttcgagcgctgcgggtgctgctgcggggccgccgtccttctctgtgaatcccgccgactaccggttgatggaggaggtggggtacggtgcgcacgccgtcgtgtaccgcgcgatcttcctgccgaccgaggatgttgtggctgtcaagtgcctggatctcgatcagctcaataacaacatcgatgaaatacaaagggaggctcaaataatgagcttgatagatcatcctaatgtaatcagggcttactgctcatttgttgtagagcacagcctctgggtgataatgccattcatgacagagggttcttgtttacacttaatgaagatctcataccaagaaggttttgatgagccggtcattggctccattctaaaggaaactcttaaggctctggaataccttcaccggcagggtcaaatacatcgtgatgttaaggctggtaatatccttattgatggtgctggggtagtgaagcttggagactttggtgtttctgcttgtatgtttgatagaggtgacaggcaaagatctaggaatacatttgtaggaacaccatgctgaagtgctccaacctggcactggatataatttcaaagctgacatatggtcatttggaatcactgctcttgaactagcacatggccatgctccattttcgaaatacccccctatgaaggttcttctcatgacactccagaatgcaccacctggtcttgattatgaacgtgacagaagattctcgaagtcatttaaagagatggttgcaatgtgcttggtcaaagatcaaacaaagagaccaacagctgagaagttgctaaagcattcatttttcaaaaatgcaaagcctccggagttgactattaagaatatcttatctggtttacctcctctctgggaccgtgtaaaggctctccagcttaaagatgcagcacaattggctttgaagaaaatgccttcttctgaacaggaggctctctccctgagtgaatatcaacgcggtgttagtgcatggaacttcgatatcgaggatctcaaggctcaagcatcattgattcatgatgacgagccaccagaaataaaagaagatgatgacattccaagaaacattgaggatttatcttcacggaaccatttggcaaagtcatctgcaaatgaatgcaactccagccagcgagcttttgccaccactttaaattcggatggaaacagccccaccatgaacgaagcttttgattttgatattagcgatgctgacactacaagaagggctgatggatatgaaagcaacacaaggcagaatgattcgttgccctctacatcaaagagagatccagagtcgaatcattgggcaagtgatggccagagacaactgacttctggtgggaacaatagctcaacatctgaaaggggctatggttttgagagggatgcatctgtgcaaatgatatctgacaaacaaagaagtgagatgagaaaaacagcaagccttagtggtccactttcactgccaactcgtgcttctgcaaatagtctgtcagctcctattcgatcttcaggaggttatgtagattcatcaggcgataagtccaaacgaagtgtagtagagattaaaggtcgcttctcagtgacatctgagaatgtcgatcttgcaaaggttcaggaaggtccacttagtagtctctcccggaaatcaccagagggttcactgttaagaaaatctgccagcactggtgattattttgttaatcctaagctgatgtgtaatgctaatcagctgaaggaactatgcaatagttcagtatcatcttcagtattaattccccaccttaacaaccttgtgcaacagactatgtttcagcaggatctaatcatgaacctacttagtaacttgcaacaaagtgagaaagttgatggaacacaaccaataatatcttctcaagtccgaacaatggagaatgataaagtagctgatacagttaactctgtgaaggaacggtcattacttgttaaaatttcagagttgcagtctaggatgataatactgactgatgaattaattgcagctaagctaaaacatgttcagttgcagcaagagctaaatgcactgtactgccgagaagaaattgtggatatcagggatgaggataacgaagaaacataatgaggatccatgccgtatgaattatccgcctctctctgagatgcataaattacctgcctctccctgaggtcaatggagaacaggagaaggaaagcggcggggagaacaagagaagaaaagtggaggtgccgcaaatatttgctggatctagagagtagctgcggttgtgttttttttctttgaaggttgtcttccccttgcttgctgtcatcagtcatcagtgtgtataaccgtctctttttcagtagttcgaggtttttttttgggtgactacaagatgaggcgtggtcatgctgctatttttctgtcatccccatcattggaagtagctgtgattatgtagtacgtaggctaccggggtggttaatctatgtagaattgcaggtgactgcataataaattgtattttatgtagcaataggatgtatattaaatattggcgcattcgttgatataatatcatatagggctatttgcaaacatccaaacaaggttgtttgcatatatctaataataaagtatgtatctactccatttgttgttgtcacgtttcaaatggttattttataggtggagt

SEQ ID NO: 52884 - DNA, 3062 bp, Zea Mays
cttcctcctcctcctcctcccccttcccgagctcctctctcttgccgtccacgctcgactgcgcgagacactggtcaacgcccgggtggcaggcggctctggtggtgtgttgtgtgtgtggtggtggggtcgggtgagtctagctccgtcgcttgcgccggaagaacttgtcgggagctgtctctagccctcgggttccatggggaggaacggtagcgtgaagcgctcggcgtcttcgagcgctgcgggtgctgctgcggggccgccgtccttctctgtgaatcccgccgactaccggttgatggaggaggtggggtacggtgcgcacgccgtcgtgtaccgcgcgatcttcctgccgaccgaggatgttgtggctgtcaagtgcctggatctcgatcagctcaataacaacatcgatgaaatacaaagggaggctcaaataatgagcttgatagatcatcctaatgtaatcagggcttactgctcatttgttgtagagcacagcctctgggtgataatgccattcatgacagagggttcttgtttacacttaatgaagatctcataccaagaaggttttgatgagccggtcattggctccattctaaaggaaactcttaaggctctggaataccttcaccggcagggtcaaatacatcgtgatgttaaggctggtaatatccttattgatggtgctggggtagtgaagcttggagactttggtgtttctgcttgtatgtttgatagaggtgacaggcaaagatctaggaatacatttgtaggaacaccatgctggatggctccagaagtgctccaacctggcactggatataatttcaaagctgacatatggtcatttggaatcactgctcttgaactagcacatggccatgctccattttcgaaatacccccctatgaaggttcttctcatgacactccagaatgcaccacctggtcttgattatgaacgtgacagaagattctcgaagtcatttaaagagatggttgcaatgtgcttggtcaaagatcaaacaaagagaccaacagctgagaagttgctaaagcattcatttttcaaaaatgcaaagcctccggagttgactattaagaatatcttatctggtttacctcctctctgggaccgtgtaaaggctctccagcttaaagatgcagcacaattggctttgaagaaaatgccttcttctgaacaggaggctctctccctgagtgaatatcaacgcggtgttagtgcatggaacttcgatatcgaggatctcaaggctcaagcatcattgattcatgatgacgagccaccagaaataaaagaagatgatgacattccaagaaacattgaggatttatcttcacggaaccatttggcaaagtcatctgcaaatgaatgcaactccagccagcgagcttttgccaccactttaaattcggatggaaacagccccaccatgaacgaagcttttgattttgatattagcgatgctgacactacaagaagggctgatggatatgaaagcaacacaaggcagaatgattcgttgccctctacatcaaagagagatccagagtcgaatcattgggcaagtgatggccagagacaactgacttctggtgggaacaatagctcaacatctgaaaggggctatggttttgagaggcaaaaactttgggcatggttaatggattgtcaatatttagttatgctgagtgcttattactgttcggggtatgacagggatgcatctgtgcaaatgatatctgacaaacaaagaagtgagatgagaaaaacagcaagccttagtggtccactttcactgccaactcgtgcttctgcaaatagtctgtcagctcctattcgatcttcaggaggttatgtagattcatcaggcgataagtccaaacgaagtgtagtagagattaaaggtcgcttctcagtgacatctgagaatgtcgatcttgcaaaggttcaggaaggtccacttagtagtctctcccggaaatcaccagagggttcactgttaagaaaatctgccagcactggtgattattttgttaatcctaagctgatgtgtaatgctaatcagctgaaggaactatgcaatagttcagtatcatcttcagtattaattccccaccttaacaaccttgtgcaacagactatgtttcagcaggatctaatcatgaacctacttagtaacttgcaacaaagtgagaaagttgatggaacacaaccaataatatcttctcaagtccgaacaatggagaatgataaagtagctgatacagttaactctgtgaaggaacggtcattacttgttaaaatttcagagttgcagtctaggatgataatactgactgatgaattaattgcagctaagctaaaacatgttcagttgcagcaagagctaaatgcactgtactgccgagaagaaattgtggatatcagggatgaggataacgaagaaacataatgaggatccatgccgtatgaattatccgcctctctctgagatgcataaattacctgcctctccctgaggtcaatggagaacaggagaaggaaagcggcggggagaacaagagaagaaaagtggaggtgccgcaaatatttgctggatctagagagtagctgcggttgtgttttttttctttgaaggttgtcttccccttgcttgctgtcatcagtcatcagtgtgtataaccgtctctttttcagtagttcgaggtttttttttgggtgactacaagatgaggcgtggtcatgctgctatttttctgtcatccccatcattggaagtagctgtgattatgtagtacgtaggctaccggggtggttaatctatgtagaattgcaggtgactgcataataaattgtattttatgtagcaataggatgtatattaaatattggcgcattcgttgatataatatcatatagggctatttgcaaacatccaaacaaggttgtttgcatatatctaataataaagtatgtatctactccatttgttgttgtcacgtttcaaatggttattttataggtggagt

SEQ ID NO: 52885 - DNA, 2925 bp, Zea Mays
caagagtccgctctctcgtcttcctcctcctcctcctcccccttcccgagctcctctctcttgccgtccacgctcgactgcgcgagacactggtcaacgcccgggtggcaggcggctctggtggtgtgttgtgtgtgtggtggtggggtcgggtgagtctagctccgtcgcttgcgccggaagaacttgtcgggagctgtctctagccctcgggttccatggggaggaacggtagcgtgaagcgctcggcgtcttcgagcgctgcgggtgctgctgcggggccgccgtccttctctgtgaatcccgccgactaccggttgatggaggaggtggggtacggtgcgcacgccgtcgtgtaccgcgcgatcttcctgccgaccgaggatgttgtggctgtcaagtgcctggatctcgatcagctcaataacaacatcgatgaaatacaaagggaggctcaaataatgagcttgatagatcatcctaatgtaatcagggcttactgctcatttgttgtagagcacagcctctgggtgataatgccattcatgacagagggttcttgtttacacttaatgaagatctcataccaagaaggttttgatgagccggtcattggctccattctaaaggaaactcttaaggctctggaataccttcaccggcagggtcaaatacatcgtgatgttaaggctggtaatatccttattgatggtgctggggtagtgaagcttggagactttggtgtttctgcttgtatgtttgatagaggtgacaggcaaagatctaggaatacatttgtaggaacaccatgctggatggctccagaagtgctccaacctggcactggatataatttcaaagctgacatatggtcatttggaatcactgctcttgaactagcacatggccatgctccattttcgaaatacccccctatgaaggttcttctcatgacactccagaatgcaccacctggtcttgattatgaacgtgacagaagattctcgaagtcatttaaagagatggttgcaatgtgcttggtcaaagatcaaacaaagagaccaacagctgagaagttgctaaagcattcatttttcaaaaatgcaaagcctccggagttgactattaagaatatcttatctggtttacctcctctctgggaccgtgtaaaggctctccagcttaaagatgcagcacaattggctttgaagaaaatgccttcttctgaacaggaggctctctccctgagtgaatatcaacgcggtgttagtgcatggaacttcgatatcgaggatctcaaggctcaagcatcattgattcatgatgacgagccaccagaaataaaagaagatgatgacattccaagaaacattgaggatttatcttcacggaaccatttggcaaagtcatctgcaaatgaatgcaactccagcgatgctgacactacaagaagggctgatggatatgaaagcaacacaaggcagaatgattcgttgccctctacatcaaagagagatccagagtcgaatcattgggcaagtgatggccagagacaactgacttctggtgggaacaatagctcaacatctgaaaggggctatggttttgagagggatgcatctgtgcaaatgatatctgacaaacaaagaagtgagatgagaaaaacagcaagccttagtggtccactttcactgccaactcgtgcttctgcaaatagtctgtcagctcctattcgatcttcaggaggttatgtagattcatcaggcgataagtccaaacgaagtgtagtagagattaaaggtcgcttctcagtgacatctgagaatgtcgatcttgcaaaggttcaggaaggtccacttagtagtctctcccggaaatcaccagagggttcactgttaagaaaatctgccagcactggtgattattttgttaatcctaagctgatgtgtaatgctaatcagctgaaggaactatgcaatagttcagtatcatcttcagtattaattccccaccttaacaaccttgtgcaacagactatgtttcagcaggatctaatcatgaacctacttagtaacttgcaacaaagtgagaaagttgatggaacacaaccaataatatcttctcaagtccgaacaatggagaatgataaagtagctgatacagttaactctgtgaaggaacggtcattacttgttaaaatttcagagttgcagtctaggatgataatactgactgatgaattaattgcagctaagctaaaacatgttcagttgcagcaagagctaaatgcactgtactgccgagaagaaattgtggatatcagggatgaggataacgaagaaacataatgaggatccatgccgtatgaattatccgcctctctctgagatgcataaattacctgcctctccctgaggtcaatggagaacaggagaaggaaagcggcggggagaacaagagaagaaaagtggaggtgccgcaaatatttgctggatctagagagtagctgcggttgtgttttttttctttgaaggttgtcttccccttgcttgctgtcatcagtcatcagtgtgtataaccgtctctttttcagtagttcgaggtttttttttgggtgactacaagatgaggcgtggtcatgctgctatttttctgtcatccccatcattggaagtagctgtgattatgtagtacgtaggctaccggggtggttaatctatgtagaattgcaggtgactgcataataaattgtattttatgtagcaataggatgtatattaaatattggcgcattcgttgatataatatcatatagggctatttgcaaacatccaaacaaggttgtttgcatatatctaataataaagtatgtatctactccatttgttgttgtcacgtttcaaatggttattttataggtggagt

SEQ ID NO: 52886 - DNA, 3148 bp, Zea Mays
cggtacaagagcccacttgtcatggtgtcaaactttctgtaccatcacatcgccgcaagtcggtcctgcaccgcacctctcctctcgctcccgccacgtcaccgccgaaattaattaatttcagtccttttacgacctcgtttcccaagagtccgctctctcgtcttcctcctcctcctcctcccccttcccgagctcctctctcttgccgtccacgctcgactgcgcgagacactggtcaacgcccgggtggcaggcggctctggtggtgtgttgtgtgtgtggtggtggggtcgggtgagtctagctccgtcgcttgcgccggaagaacttgtcgggagctgtctctagccctcgggttccatggggaggaacggtagcgtgaagcgctcggcgtcttcgagcgctgcgggtgctgctgcggggccgccgtccttctctgtgaatcccgccgactaccggttgatggaggaggtggggtacggtgcgcacgccgtcgtgtaccgcgcgatcttcctgccgaccgaggatgttgtggctgtcaagtgcctggatctcgatcagctcaataacaacatcgatgaaatacaaagggaggctcaaataatgagcttgatagatcatcctaatgtaatcagggcttactgctcatttgttgtagagcacagcctctgggtgataatgccattcatgacagagggttcttgtttacacttaatgaagatctcataccaagaaggttttgatgagccggtcattggctccattctaaaggaaactcttaaggctctggaataccttcaccggcagggtcaaatacatcgtgatgttaaggctggtaatatccttattgatggtgctggggtagtgaagcttggagactttggtgtttctgcttgtatgtttgatagaggtgacaggcaaagatctaggaatacatttgtaggaacaccatgctggatggctccagaagtgctccaacctggcactggatataatttcaaagctgacatatggtcatttggaatcactgctcttgaactagcacatggccatgctccattttcgaaatacccccctatgaaggttcttctcatgacactccagaatgcaccacctggtcttgattatgaacgtgacagaagattctcgaagtcatttaaagagatggttgcaatgtgcttggtcaaagatcaaacaaagagaccaacagctgagaagttgctaaagcattcatttttcaaaaatgcaaagcctccggagttgactattaagaatatcttatctggtttacctcctctctgggaccgtgtaaaggctctccagcttaaagatgcagcacaattggctttgaagaaaatgccttcttctgaacaggaggctctctccctgagtgaatatcaacgcggtgttagtgcatggaacttcgatatcgaggatctcaaggctcaagcatcattgattcatgatgacgagccaccagaaataaaagaagatgatgacattccaagaaacattgaggatttatcttcacggaaccatttggcaaagtcatctgcaaatgaatgcaactccagccagcgagcttttgccaccactttaaattcggatggaaacagccccaccatgaacgaagcttttgattttgatattagcgatgctgacactacaagaagggctgatggatatgaaagcaacacaaggcagaatgattcgttgccctctacatcaaagagagatccagagtcgaatcattgggcaagtgatggccagagacaactgacttctggtgggaacaatagctcaacatctgaaaggggctatggttttgagagggatgcatctgtgcaaatgatatctgacaaacaaagaagtgagatgagaaaaacagcaagccttagtggtccactttcactgccaactcgtgcttctgcaaatagtctgtcagctcctattcgatcttcaggaggttatgtagattcatcaggcgataagtccaaacgaagtgtagtagagattaaaggtcgcttctcagtgacatctgagaatgtcgatcttgcaaaggttcaggaaggtccacttagtagtctctcccggaaatcaccagagggttcactgttaagaaaatctgccagcactggtgattattttgttaatcctaagctgatgtgtaatgctaatcagctgaaggaactatgcaatagttcagtatcatcttcagtattaattccccaccttaacaaccttgtgcaacagactatgtttcagcaggatctaatcatgaacctacttagtaacttgcaacaaagtgagaaagttgatggaacacaaccaataatatcttctcaagtccgaacaatggagaatgataaagtagctgatacagttaactctgtgaaggaacggtcattacttgttaaaatttcagagttgcagtctaggatgataatactgactgatgaattaattgcagctaagctaaaacatgttcagttgcagcaagagctaaatgcactgtactgccgagaagaaattgtggatatcagggatgaggataacgaagaaacataatgaggatccatgccgtatgaattatccgcctctctctgagatgcataaattacctgcctctccctgaggtcaatggagaacaggagaaggaaagcggcggggagaacaagagaagaaaagtggaggtgccgcaaatatttgctggatctagagagtagctgcggttgtgttttttttctttgaaggttgtcttccccttgcttgctgtcatcagtcatcagtgtgtataaccgtctctttttcagtagttcgaggtttttttttgggtgactacaagatgaggcgtggtcatgctgctatttttctgtcatccccatcattggaagtagctgtgattatgtagtacgtaggctaccggggtggttaatctatgtagaattgcaggtgactgcataataaattgtattttatgtagcaataggatgtatattaaatattggcgcattcgttgatataatatcatatagggctatttgcaaacatccaaacaaggttgtttgcatatatctaataataaagtatgtatctactccatttgttgttgtcacgtttcaaatggttattttataggtggagt

SEQ ID NO: 52887 - DNA, 2444 bp, Zea Mays
gtccgctctctcgtcttcctcctcctcctcctcccccttcccgagctcctctctcttgccgtccacgctcgactgcgcgagacactggtcaacgcccgggtggcaggcggctctggtggtgtgttgtgtgtgtggtggtggggtcgggtgagtctagctccgtcgcttgcgccggaagaacttgtcgggagctgtctctagccctcgggttccatggggaggaacggtagcgtgaagcgctcggcgtcttcgagcgctgcgggtgctgctgcggggccgccgtccttctctgtgaatcccgccgactaccggttgatggaggaggtggggtacggtgcgcacgccgtcgtgtaccgcgcgatcttcctgccgaccgaggatgttgtggctgtcaagtgcctggatctcgatcagctcaataacaacatcgatgaaatacaaagggaggctcaaataatgagcttgatagatcatcctaatgtaatcagggcttactgctcatttgttgtagagcacagcctctgggtgataatgccattcatgacagagggttcttgtttacacttaatgaagatctcataccaagaaggttttgatgagccggtcattggctccattctaaaggaaactcttaaggctctggaataccttcaccggcagggtcaaatacatcgtgatgttaaggctggtaatatccttattgatggtgctggggtagtgaagcttggagactttggtgtttctgcttgtatgtttgatagaggtgacaggcaaagatctaggaatacatttgtaggaacaccatgctggatggctccagaagtgctccaacctggcactggatataatttcaaagctgacatatggtcatttggaatcactgctcttgaactagcacatggccatgctccattttcgaaatacccccctatgaaggttcttctcatgacactccagaatgcaccacctggtcttgattatgaacgtgacagaagattctcgaagtcatttaaagagatggttgcaatgtgcttggtcaaagatcaaacaaagagaccaacagctgagaagttgctaaagcattcatttttcaaaaatgcaaagcctccggagttgactattaagaatatcttatctggtttacctcctctctgggaccgtgtaaaggctctccagcttaaagatgcagcacaattggctttgaagaaaatgccttcttctgaacaggaggctctctccctgagtgaatatcaacgcggtgttagtgcatggaacttcgatatcgaggatctcaaggctcaagcatcattgattcatgatgacgagccaccagaaataaaagaagatgatgacattccaagaaacattgaggatttatcttcacggaaccatttggcaaagtcatctgcaaatgaatgcaactccagccagcgagcttttgccaccactttaaattcggatggaaacagccccaccatgaacgaagcttttgattttgatattagcgatgctgacactacaagaagggctgatggatatgaaagcaacacaaggcagaatgattcgttgccctctacatcaaagagagatccagagtcgaatcattgggcaagtgatggccagagacaactgacttctggtgggaacaatagctcaacatctgaaaggggctatggttttgagaggcaaaaactttgggcatggttaatggattgtcaatatttagttatgctgagtgcttattactgttcggggtatgacagggatgcatctgtgcaaatgatatctgacaaacaaagaagtgagatgagaaaaacagcaagccttagtggtccactttcactgccaactcgtgcttctgcaaatagtctgtcagctcctattcgatcttcaggaggttatgtagattcatcaggcgataagtccaaacgaagtgtagtagagattaaaggtcgcttctcagtgacatctgagaatgtcgatcttgcaaaggttcaggaaggtccacttagtagtctctcccggaaatcaccagagggttcactgttaagaaaatctgccagcactggtgattattttgttaatcctaagctgatggcagtggctgggagtagggaggcacatatatcaccattttcatggttggggcggaggaaactcggagtaatcaatggggactggggaatgttgaagttgaaggaggctgaaaggcatgatcttaatattaagagaaaaaaagatctcttagaagaccaaatacaagacgtcatgaaggcggcccataaatcacaggccaccaccagcggccccacacacaacccagagatccaccaacaaacacctaagaagcctaaggcctaaggccagtggcggaggaaataataatgagttatggctcaagaaagaaaaaaagagagaaaaacatgatgcaacacataggactc

SEQ ID NO: 52888 - DNA, 2002 bp, Zea Mays
ctcctctctcttgccgtccacgctcgactgcgcgagacactggtcaacgcccgggtggcaggcggctctggtggtgtgttgtgtgtgtggtggtggggtcgggtgagtctagctccgtcgcttgcgccggaagaacttgtcgggagctgtctctagccctcgggttccatggggaggaacggtagcgtgaagcgctcggcgtcttcgagcgctgcgggtgctgctgcggggccgccgtccttctctgtgaatcccgccgactaccggttgatggaggaggtggggtacggtgcgcacgccgtcgtgtaccgcgcgatcttcctgccgaccgaggatgttgtggctgtcaagtgcctggatctcgatcagctcaataacaacatcgatgaaatacaaagggaggctcaaataatgagcttgatagatcatcctaatgtaatcagggcttactgctcatttgttgtagagcacagcctctgggtgataatgccattcatgacagagggttcttgtttacacttaatgaagatctcataccaagaaggttttgatgagccggtcattggctccattctaaaggaaactcttaaggctctggaataccttcaccggcagggtcaaatacatcgtgatgttaaggctggtaatatccttattgatggtgctggggtagtgaagcttggagactttggtgtttctgcttgtatgtttgatagaggtgacaggcaaagatctaggaatacatttgtaggaacaccatgctggatggctccagaagtgctccaacctggcactggatataatttcaaagctgacatatggtcatttggaatcactgctcttgaactagcacatggccatgctccattttcgaaatacccccctatgaaggttcttctcatgacactccagaatgcaccacctggtcttgattatgaacgtgacagaagattctcgaagtcatttaaagagatggttgcaatgtgcttggtcaaagatcaaacaaagagaccaacagctgagaagttgctaaagcattcatttttcaaaaatgcaaagcctccggagttgactattaagaatatcttatctggtttacctcctctctgggaccgtgtaaaggctctccagcttaaagatgcagcacaattggctttgaagaaaatgccttcttctgaacaggaggctctctccctgagtgaatatcaacgcggtgttagtgcatggaacttcgatatcgaggatctcaaggctcaagcatcattgattcatgatgacgagccaccagaaataaaagaagatgatgacattccaagaaacattgaggatttatcttcacggaaccatttggcaaagtcatctgcaaatgaatgcaactccagccagcgagcttttgccaccactttaaattcggatggaaacagccccaccatgaacgaagcttttgattttgatattagcgatgctgacactacaagaagggctgatggatatgaaagcaacacaaggcagaatgattcgttgccctctacatcaaagagagatccagagtcgaatcattgggcaagtgatggccagagacaactgacttctggtgggaacaatagctcaacatctgaaaggggctatggttttgagagggatgcatctgtgcaaatgatatctgacaaacaaagaagtgagatgagaaaaacagcaagccttagtggtccactttcactgccaactcgtgcttctgcaaatagtctgtcagctcctattcgatcttcaggaggttatgtagattcatcaggcgataagtccaaacgaagtgtagtagagattaaaggtcgcttctcagtgacatctgagaatgtcgatcttgcaaaggttcaggaaggtccacttagtagtctctcccggaaatcaccagagggttcactgttaagaaaatctgccagcactggtgattattttgttaatcctaagctgatggatccacggacaggacatgtgattcttt

SEQ ID NO: 52889 - DNA, 2046 bp, Zea Mays
gtccgctctctcgtcttcctcctcctcctcctcccccttcccgagctcctctctcttgccgtccacgctcgactgcgcgagacactggtcaacgcccgggtggcaggcggctctggtggtgtgttgtgtgtgtggtggtggggtcgggtgagtctagctccgtcgcttgcgccggaagaacttgtcgggagctgtctctagccctcgggttccatggggaggaacggtagcgtgaagcgctcggcgtcttcgagcgctgcgggtgctgctgcggggccgccgtccttctctgtgaatcccgccgactaccggttgatggaggaggtggggtacggtgcgcacgccgtcgtgtaccgcgcgatcttcctgccgaccgaggatgttgtggctgtcaagtgcctggatctcgatcagctcaataacaacatcgatgaaatacaaagggaggctcaaataatgagcttgatagatcatcctaatgtaatcagggcttactgctcatttgttgtagagcacagcctctgggtgataatgccattcatgacagagggttcttgtttacacttaatgaagatctcataccaagaaggttttgatgagccggtcattggctccattctaaaggaaactcttaaggctctggaataccttcaccggcagggtcaaatacatcgtgatgttaaggctggtaatatccttattgatggtgctggggtagtgaagcttggagactttggtgtttctgcttgtatgtttgatagaggtgacaggcaaagatctaggaatacatttgtaggaacaccatgctggatggctccagaagtgctccaacctggcactggatataatttcaaagctgacatatggtcatttggaatcactgctcttgaactagcacatggccatgctccattttcgaaatacccccctatgaaggttcttctcatgacactccagaatgcaccacctggtcttgattatgaacgtgacagaagattctcgaagtcatttaaagagatggttgcaatgtgcttggtcaaagatcaaacaaagagaccaacagctgagaagttgctaaagcattcatttttcaaaaatgcaaagcctccggagttgactattaagaatatcttatctggtttacctcctctctgggaccgtgtaaaggctctccagcttaaagatgcagcacaattggctttgaagaaaatgccttcttctgaacaggaggctctctccctgagtgaatatcaacgcggtgttagtgcatggaacttcgatatcgaggatctcaaggctcaagcatcattgattcatgatgacgagccaccagaaataaaagaagatgatgacattccaagaaacattgaggatttatcttcacggaaccatttggcaaagtcatctgcaaatgaatgcaactccagccagcgagcttttgccaccactttaaattcggatggaaacagccccaccatgaacgaagcttttgattttgatattagcgatgctgacactacaagaagggctgatggatatgaaagcaacacaaggcagaatgattcgttgccctctacatcaaagagagatccagagtcgaatcattgggcaagtgatggccagagacaactgacttctggtgggaacaatagctcaacatctgaaaggggctatggttttgagagggatgcatctgtgcaaatgatatctgacaaacaaagaagtgagatgagaaaaacagcaagccttagtggtccactttcactgccaactcgtgcttctgcaaatagtctgtcagctcctattcgatcttcaggaggttatgtagattcatcaggcgataagtccaaacgaagtgtagtagagattaaaggtcgcttctcagtgacatctgagaatgtcgatcttgcaaaggttcaggaaggtccacttagtagtctctcccggaaatcaccagagggttcactgttaagaaaatctgccagcactggtgattattttgttaatcctaagctgatgtgcatgcagccagccacatgcgcctgg

SEQ ID NO: 52890 - DNA, 1716 bp, Zea Mays
ctcctctctcttgccgtccacgctcgactgcgcgagacactggtcaacgcccgggtggcaggcggctctggtggtgtgttgtgtgtgtggtggtggggtcgggtgagtctagctccgtcgcttgcgccggaagaacttgtcgggagctgtctctagccctcgggttccatggggaggaacggtagcgtgaagcgctcggcgtcttcgagcgctgcgggtgctgctgcggggccgccgtccttctctgtgaatcccgccgactaccggttgatggaggaggtggggtacggtgcgcacgccgtcgtgtaccgcgcgatcttcctgccgaccgaggatgttgtggctgtcaagtgcctggatctcgatcagctcaataacaacatcgatgaaatacaaagggaggctcaaataatgagcttgatagatcatcctaatgtaatcagggcttactgctcatttgttgtagagcacagcctctgggtgataatgccattcatgacagagggttcttgtttacacttaatgaagatctcataccaagaaggttttgatgagccggtcattggctccattctaaaggaaactcttaaggctctggaataccttcaccggcagggtcaaatacatcgtgatgttaaggctggtaatatccttattgatggtgctggggtagtgaagcttggagactttggtgtttctgcttgtatgtttgatagaggtgacaggcaaagatctaggaatacatttgtaggaacaccatgctggatggctccagaagtgctccaacctggcactggatataatttcaaagctgacatatggtcatttggaatcactgctcttgaactagcacatggccatgctccattttcgaaatacccccctatgaaggttcttctcatgacactccagaatgcaccacctggtcttgattatgaacgtgacagaagattctcgaagtcatttaaagagatggttgcaatgtgcttggtcaaagatcaaacaaagagaccaacagctgagaagttgctaaagcattcatttttcaaaaatgcaaagcctccggagttgactattaagaatatcttatctggtttacctcctctctgggaccgtgtaaaggctctccagcttaaagatgcagcacaattggctttgaagaaaatgccttcttctgaacaggaggctctctccctgagtgaatatcaacgcggtgttagtgcatggaacttcgatatcgaggatctcaaggctcaagcatcattgattcatgatgacgagccaccagaaataaaagaagatgatgacattccaagaaacattgaggatttatcttcacggaaccatttggcaaagtcatctgcaaatgaatgcaactccagcgatgctgacactacaagaagggctgatggatatgaaagcaacacaaggcagaatgattcgttgccctctacatcaaagagagatccagagtcgaatcattgggcaagtgatggccagagacaactgacttctggtgggaacaatagctcaacatctgaaaggggctatggttttgagagggatgcatctgtgcaaatgatatctgacaaacaaagaagtgagatgagaaaaacagcaagccttagtggtccactttcactgccaactcgtgcttctgcaaatagtctgtcagctcctattcgatcttcaggaggcagtcttgcactgctgtag

SEQ ID NO: 52891 - DNA, 2129 bp, Zea Mays
cgagctcctctctcttgccgtccacgctcgactgcgcgagacactggtcaacgcccgggtggcaggcggctctggtggtgtgttgtgtgtgtggtggtggggtcgggtgagtctagctccgtcgcttgcgccggaagaacttgtcgggagctgtctctagccctcgggttccatggggaggaacggtagcgtgaagcgctcggcgtcttcgagcgctgcgggtgctgctgcggggccgccgtccttctctgtgaatcccgccgactaccggttgatggaggaggtggggtacggtgcgcacgccgtcgtgtaccgcgcgatcttcctgccgaccgaggatgttgtggctgtcaagtgcctggatctcgatcagctcaataacaacatcgatgaaatacaaagggaggctcaaataatgagcttgatagatcatcctaatgtaatcagggcttactgctcatttgttgtagagcacagcctctgggtgataatgccattcatgacagagggttcttgtttacacttaatgaagatctcataccaagaaggttttgatgagccggtcattggctccattctaaaggaaactcttaaggctctggaataccttcaccggcagggtcaaatacatcgtgatgttaaggctggtaatatccttattgatggtgctggggtagtgaagcttggagactttggtgtttctgcttgtatgtttgatagaggtgacaggcaaagatctaggaatacatttgtaggaacaccatgctggatggctccagaagtgctccaacctggcactggatataatttcaaagctgacatatggtcatttggaatcactgctcttgaactagcacatggccatgctccattttcgaaatacccccctatgaaggttcttctcatgacactccagaatgcaccacctggtcttgattatgaacgtgacagaagattctcgaagtcatttaaagagatggttgcaatgtgcttggtcaaagatcaaacaaagagaccaacagctgagaagttgctaaagcattcatttttcaaaaatgcaaagcctccggagttgactattaagaatatcttatctggtttacctcctctctgggaccgtgtaaaggctctccagcttaaagatgcagcacaattggctttgaagaaaatgccttcttctgaacaggaggctctctccctgagtgaatatcaacgcggtgttagtgcatggaacttcgatatcgaggatctcaaggctcaagcatcattgattcatgatgacgagccaccagaaataaaagaagatgatgacattccaagaaacattgaggttgaaaagatcgtagattattttttccctatagaagttatttgattattatctttagaaagcttgaactttatttccaagagaaatgattgcaaaatattttgcagagttggcatgtgctcatctttgctgtagaactctgagtttgttaatgttgattacttaccttgtttcaaagttgtaattttgttaggttgaagcaaaatgcaattgaatatctgtatataactgtcactttttggtccttcaacaggatttatcttcacggaaccatttggcaaagtcatctgcaaatgaatgcaactccagccagcgagcttttgccaccactttaaattcggatggaaacagccccaccatgaacgaagcttttgattttgatattagcgatgctgacactacaagaagggctgatggatatgaaagcaacacaaggcagaatgattcgttgccctctacatcaaagagagatccagagtcgaatcattgggcaagtgatggccagagacaactgacttctggtgggaacaatagctcaacatctgaaaggggctatggttttgagaggcaaaaactttgggcatggttaatggattgtcaatatttagttatgctgagtgcttattactgttcggggtatgacagggatgcatctgtgcaaatgatatctgacaaacaaagaagtgagatgagaaaaacagcaagccttagtggtccactttcactgccaactcgtgcttctgcaaatagtctgtcagctcctattcgatcttcaggaggcagtcttgcactgctgtag

SEQ ID NO: 52892 - DNA, 1839 bp, Zea Mays
gtccgctctctcgtcttcctcctcctcctcctcccccttcccgagctcctctctcttgccgtccacgctcgactgcgcgagacactggtcaacgcccgggtggcaggcggctctggtggtgtgttgtgtgtgtggtggtggggtcgggtgagtctagctccgtcgcttgcgccggaagaacttgtcgggagctgtctctagccctcgggttccatggggaggaacggtagcgtgaagcgctcggcgtcttcgagcgctgcgggtgctgctgcggggccgccgtccttctctgtgaatcccgccgactaccggttgatggaggaggtggggtacggtgcgcacgccgtcgtgtaccgcgcgatcttcctgccgaccgaggatgttgtggctgtcaagtgcctggatctcgatcagctcaataacaacatcgatgaaatacaaagggaggctcaaataatgagcttgatagatcatcctaatgtaatcagggcttactgctcatttgttgtagagcacagcctctgggtgataatgccattcatgacagagggttcttgtttacacttaatgaagatctcataccaagaaggttttgatgagccggtcattggctccattctaaaggaaactcttaaggctctggaataccttcaccggcagggtcaaatacatcgtgatgttaaggctggtaatatccttattgatggtgctggggtagtgaagcttggagactttggtgtttctgcttgtatgtttgatagaggtgacaggcaaagatctaggaatacatttgtaggaacaccatgctggatggctccagaagtgctccaacctggcactggatataatttcaaagctgacatatggtcatttggaatcactgctcttgaactagcacatggccatgctccattttcgaaatacccccctatgaaggttcttctcatgacactccagaatgcaccacctggtcttgattatgaacgtgacagaagattctcgaagtcatttaaagagatggttgcaatgtgcttggtcaaagatcaaacaaagagaccaacagctgagaagttgctaaagcattcatttttcaaaaatgcaaagcctccggagttgactattaagaatatcttatctggtttacctcctctctgggaccgtgtaaaggctctccagcttaaagatgcagcacaattggctttgaagaaaatgccttcttctgaacaggaggctctctccctgagtgaatatcaacgcggtgttagtgcatggaacttcgatatcgaggatctcaaggctcaagcatcattgattcatgatgacgagccaccagaaataaaagaagatgatgacattccaagaaacattgaggatttatcttcacggaaccatttggcaaagtcatctgcaaatgaatgcaactccagccagcgagcttttgccaccactttaaattcggatggaaacagccccaccatgaacgaagcttttgattttgatattagcgatgctgacactacaagaagggctgatggatatgaaagcaacacaaggcagaatgattcgttgccctctacatcaaagagagatccagagtcgaatcattgggcaagtgatggccagagacaactgacttctggtgggaacaatagctcaacatctgaaaggggctatggttttgagagggatgcatctgtgcaaatgatatctgacaaacaaagaagtgagatgagaaaaacagcaagccttagtggtccactttcactgccaactcgtgcttctgcaaatagtctgtcagctcctattcgatcttcaggaggcagtcttgcactgctgtag

SEQ ID NO: 52893 - DNA, 637 bp, Zea Mays
cgtaaagctgctagctgcctgtctcgctgttcctgatacccagcaagccgttgtgctcggcatactttctccatgtggttctctcgcttcgtcggctttccgcgtgttagagcagagtacccagaagaagtgatttgtgaaggagcatgttccagttctactgatccagtggtggattccatctaactaattatcgtaatagaagatctcagatctcctcctgtgataaggcaagccccggtgcatttgccccttccttgcgttttacatgctttatcacctgatatgatgcattaggtgataggagttgtgtgataaacaattgatgcattaccattccttgaaaattcctaaatccctgttttataaaaacaattattactgcttagtcctgcttagaaactcaaaaatcatttgtttttccaaaagaatgatgtgtaacattggttaggggcttttgattcaaaagtgaaagcaaacttatgatgatgagtccatcagggctccagatgggttcatcatccaaaaagagtacccctgccgggtaccaaaaatggggaaatggttaataaatctagaccaggcgctgagcagacagagtcgcccgtctgtgttgattaaggaccgtaccgttgac

SEQ ID NO: 52894 - DNA, 1550 bp, Zea Mays
cgcgaacgcgacgtccgtccacctcggcccccgctggtttgcgttcgcgcagtgactgaccacgcggccgtgcgggcgcgagacgggaccagtgagtcagtgaccaccacgcgctcgtggctaccggcttcgctcccagatcccgccgcgcgcgcgagccccgaggactgaccatggaggagcccacggagtccaggccagctggcgcggaggatctcgcgaacggcgcgaaagacccggaggggcctccgccggaggttgaggaggaggaagtggaggagccgccacgatcggcgacggcgaagcaggaggaggcgaaggaggtactagggtcggaggggtctcgcccgttcaccatgcgggagctgctcggcgaactcagggaggacggcgagacggcggtcggcggcagcaccgcgagatctgcgttcggcgacgggaacggggtcggatccgctgatgccgagggctcgtcctacagccaagatagcgcacagttttcatcacaccatgatgtagcgatggacttgataaatagtgtaactggagttgacgaggaaggacgttctcgccaaaggattctttcttttgctgctaaaagatacgtaaatgcaattgaaagtaatcctgacgaccctgatgcatattataattgggctctagtcctccaggagagcgcagacaatgtggatcccaattcgagttcctctaaagatgcattgctggaggaggcttgcaaaaagtatgctgaagctactcgacttagtccaactctttatgatgcatattataactgggctattgctattgctgatcgggctaaaatgcgaggtcggacaaaagaagccgaagaactctggaagcaggcaatactgaattatgagaaggctgtccagcttaattggaatagcccacaggctctcaataactggggtcttgggctacaggagctgagtgcaattgttcctgcccgggataaacagaccatcataaaaacagctatcagtaagttccgtgctgcaattcagctgcaatttgatttccatcgggcaatatacaacctcggaactgtcttgtatggtttagctgaggataccatgagatctgggaagccagatgtctccccaaatgagctttacagtcagtctgctatctatgttgcagctgctcatgctctgaagccaaattactcggtctatcgtagtgccttgcgactagtccgctcaatgttgcctctgccatatctcaaagtggggtatttgactgctcctccagctaacaattccatcgcaccacacggggattgggaggtatcacagttcattttgaatcatgagggcctccagcaggctgatgcttctgaccagcctccatcgcaatcccctgggcatttggacaggggcagaaagcctgtcagaataaacgttgcagatattgtttcagtgtcagcatgtgccgatttaactttaccaagtggtgctggcctctgtatagaaactattcatggtcctacgttcttgggagtagaaaactcagccatcgcacgaaac

SEQ ID NO: 52895 - DNA, 1251 bp, Zea Mays
accaagttattattgtgcgagtaatgcaagtaaatcaggcaatactgaattatgagaaggctgtccagcttaattggaatagcccacaggctctcaataactggggtcttgggctacaggagctgagtgcaattgttcctgcccgggataaacagaccatcataaaaacagctatcattccgtgctgcaattcagctgcaatttgatttccatcgggcaatatacaacctcggaactgtcttgtatggtttagctgaggataccatgagatctgggaagccagatgtctccccaaatgagctttacagtcagtctgctatctatgttgcagctgctcatgctctgaagccaaattactcggtctatcgtagtgccttgcgactagtccgctcaatgttgcctctgccatatctcaaagtggggtatttgactgctcctccagctaacaattccatcgcaccacacggggattgggaggtatcacagttcattttgaatcatgagggcctccagcaggctgatgcttctgaccagcctccatcgcaatcccctgggcatttggacaggggcagaaagcctgtcagaataaacgttgcagatattgtttcagtgtcagcatgtgccgatttaactttaccaagtggtgctggcctctgtatagaaactattcatggtcctacgttcttggttgcccatagttgggaggctcttgacggctggctagatgccatacgccttgtctacactatttttgcgagagggaagagcgatgtgcttgccggtattattactggttaaatggcttgctgcaggagggaagagcgatgaactagccgggtgttgttactgccactggagaggcgcgaagttttggtgattcagcgtcagccttatcagttaaatgcccccttcgatttgttagtatgcctcccatctgtgatgtcagtcttcctagatatagggtatatcaatcatatattcggttgtaactcgtactttccagtgattggcgataggtccgttttttctttgtaaaagtggccgtgttactgtattatgcattcacagcatatgtatcggacattctttaagtttgattatatttctctgtaacaatgaatcgaggcaagatgggctctggccctgctgggctccacctccaatatgtagagccgaggaacaggagggaaagaacaatgatatactccctcattccaaattataatgtgtttttgtttgcttttctagaca

SEQ ID NO: 52896 - DNA, 2135 bp, Zea Mays
cgcgaacgcgacgtccgtccacctcggcccccgctggtttgcgttcgcgcagtgactgaccacgcggccgtgcgggcgcgagacgggaccagtgagtcagtgaccaccacgcgctcgtggctaccggcttcgctcccagatcccgccgcgcgcgcgagccccgaggactgaccatggaggagcccacggagtccaggccagctggcgcggaggatctcgcgaacggcgcgaaagacccggaggggcctccgccggaggttgaggaggaggaagtggaggagccgccacgatcggcgacggcgaagcaggaggaggcgaaggaggtactagggtcggaggggtctcgcccgttcaccatgcgggagctgctcggcgaactcagggaggacggcgagacggcggtcggcggcagcaccgcgagatctgcgttcggcgacgggaacggggtcggatccgctgatgccgagggctcgtcctacagccaagatagcgcacagttttcatcacaccatgatgtagcgatggacttgataaatagtgtaactggagttgacgaggaaggacgttctcgccaaaggattctttcttttgctgctaaaagatacgtaaatgcaattgaaagtaatcctgacgaccctgatgcatattataattgggctctagtcctccaggagagcgcagacaatgtggatcccaattcgagttcctctaaagatgcattgctggaggaggcttgcaaaaagtatgctgaagctactcgacttagtccaactctttatgatgcatattataactgggctattgctattgctgatcgggctaaaatgcgaggtcggacaaaagaagccgaagaactctggaagcaggcaatactgaattatgagaaggctgtccagcttaattggaatagcccacaggctctcaataactggggtcttgggctacaggagctgagtgcaattgttcctgcccgggataaacagaccatcataaaaacagctatcagtaagttccgtgctgcaattcagctgcaatttgatttccatcgggcaatatacaacctcggaactgtcttgtttaagttccatgacaatgacactcgtgcattttcttttataatgcttcagtatggtttagctgaggataccatgagatctgggaagccagatgtctccccaaatgagctttacagtcagtctgctatctatgttgcagctgctcatgctctgaagccaaattactcggtctatcgtagtgccttgcgactagtccgctcaatgttgcctctgccatatctcaaagtggggtatttgactgctcctccagctaacaattccatcgcaccacacggggattgggaggtatcacagttcattttgaatcatgagggcctccagcaggctgatgcttctgaccagcctccatcgcaatcccctgggcatttggacaggggcagaaagcctgtcagaataaacgttgcagatattgtttcagtgtcagcatgtgccgatttaactttaccaagtggtgctggcctctgtatagaaactattcatggtcctacgttcttggttgcccatagttgggaggctcttgacggctggctagatgccatacgccttgtctacactatttttgcgagagggaagagcgatgtgcttgccggtattattactggttaaatggcttgctgcaggagggaagagcgatgaactagccgggtgttgttactgccactggagaggcgcgaagttttggtgattcagcgtcagccttatcagttaaatgcccccttcgatttgttagtatgcctcccatctgtgatgtcagtcttcctagatatagggtatatcaatcatatattcggttgtaactcgtactttccagtgattggcgataggtccgttttttctttgtaaaagtggccgtgttactgtattatgcattcacagcatatgtatcggacattctttaagtttgattatatttctctgtaacaatgaatcgaggcaagatgggctctggccctgctgggctccacctccaatatgtagagccgaggaacaggagggaaagaacaatgatatactccctcattccaaattataatgtgtttttgtttgcttttctagaca

SEQ ID NO: 52897 - DNA, 1982 bp, Zea Mays
ttgcggaatcactgtggccaatatcttcaaaatcagctgtagcatctttccctggttacattcaagagtagagatcagctcaatatcaaggctgcaaacgtgaagtacaatcgatgtatggcttaccagttacagctagcaaaacctcatctccaccaggatgctcatccataaaaggagtgacatcatacacctgaaatgttaatagaaagagataacacatattggaaaacaaatgacagaaaatttcaatgatttattccatttttatgagtatattaataaaataaacaaggaacactgcagacagcagaagcataggttttcgatgcttcaatatcttacgtcaccacatccacttagggggtgtttggtttaaagaatcaatccattctagatgatgagaccacatccacttagggggtgtttggtttaaaaaatcaatccattctagatgatgaggtgatgcataatgagtatattccacaactttagtagaatgagctcattcctcgtattattactaattagtacctatgaggaataaaatattgatagatcaactcattccattacacaaaccaaacaagaaagtgatgagtgagaagatgatcaactacctcaatcctcaaaccaaacacactactatagtttacagagccaacacagttatttagcttatgttaggaagctctggtgatgtttaagtcttgtggtaacactacgaggtcgagaattgaggttgacttcaaagtaaacttagggccaaatatcctacttccaaaaatagcaaggccattaagcattagctacaccgagaagaacagaacatttgtcacaaacaaatggaaggaaagttactactttcttttttaataaaaagatcaacttcagtggaattagcacatggtacacattttttcataagaatgcttgatgataataatagcttaaaggatctgtatataggagaaatcaggaaaatggttagaaaatttctgaatgaaaaacattggatctaagaaaaatataccaattctagagtaacaactttttttttgtgggcagcggaaacctatataatatatgggcatgctagttcatccaagggcacataattaaaaacagaaaaaaatactgatccacatgtcataagcatgctatttatttggtcggatatgaaaatatcaaccatgaatcatcatttatgtaatttgtatatcagatttttgtgaggaattgtatatttaccatatcattttattctgccatggaccaaaaaaagcaggaaaaaacaaaccacatttttgtctgttttgtcatacattgtcatttcaattttcaaaatacaaaaaagtgcccagtttaaagcactatccttgtgctaaattatgaacatgcgataagaggtgattgtagtaagcttttgtactataacctactgagtaacatggagttgatctaaaggcagttgctggtcctcgatcagatcaacccaactgagcattggacatggagtagatctaaaaggtggtttctggacctgaattgagtcgcccactcatgaataactacaactgatatttgacaatccaaaacatctttggtagtatgccaggttagtttctgcaaatgaacaaatctgatttgagctaagtgccagcacaactgattcagtccaactgctgcaagaaaccaagcctaccatcaattattctccacaaaaccttatcatcgaagagaggtagcgtcgtaagctttccttaggccctaaaacctttgcaatcgaagaggaaacggaaggaattaccattccaccaacaagaacaccaaacaatttcacaaaaccatatcctacaaagccaccaaaggcatgccgccagccatccaaaatcctgtgccaccacaaaggggagggggagccgaggatgggagaggagcagaaaaacagcaccttgccggcgatgatgatccagcagtcc

SEQ ID NO: 52898 - DNA, 2337 bp, Zea Mays
cacgtagccacgcaccacttcctcgaaatctctgtgatgcgtcacctgacagcaaaaaggaagagtaacagggaggccggaatctttcgatcgagggcaccaccggcggcgggggtagtagcacaggaggggagccgtggagcgatccgtcgggcatctgcgcccgatgtgggcgtggggctgcgtcgagcgcgtggccgcgggcttcctcggcggccccctcgccgccggcggccgctggaacaccgccgtcgccgtcggggtcacggccgccgcgggcctcgtgctcgtcgccatcgtcgtctcttcccgcagaggcgggctcaaatctccgtggtggcggcggcggaggaaggcgccacttacggcgcaagagtggtgcgacctgttcacaccgcaggggaagcttcaggacggcggagtgaagcttctgaagaaagttcggagcggagggattgaaccgagtatcagagcgcaagtctggccgttccttctgggagtttatagccttgacagttctgaagcacaaagagatgtggtcaaggcccagaacagggatatttgttattgaggaaacattgcctgcgtaaattagcatacatcatggaagagagcaagcagtcaactaaaacagttaaagtcaaccatgaagggagcaatagttctgaaaaaggtgatgaatctggttgtgttagtccttttgaatctgaagatgttcttgaaaattctggcatgggagaggctacaactgaggaaggaattccatgcctcagtacagagcaagaagtgcaggatgacacttctgaaacaaagccagagcagatgaatggaaaccagtcttcatctagctcctctgatgaggaagggagtgaaagaagtgttgtgactcaagtagaagcatctcataagaacttggcctcagtttgtgagtcctcatttgaggatggacaagaaagcatcccaagatattcgaacacaggaggaaatatggatgatgttgtgttatctaaggctgcccgccctgtgaagtctgcacgggcaactgaggattttgagacatggcaacggattatccgtttggacgcagtccgtgctaacgacgaatggatttcctactctccatcccaagctgcagtttccaaggagagggcaattgaatctgctaaagctgtttttctcaaagactatgaccacttagaaccatatcggatccatcatgcgtcacgccttgttgctattcttgaggcctacgcaatatatgaccaagaaattggatattgtcaaggaatgagtgacctgcttgcgcctctccttgctgttctagaggacgatgacgaggccttctggtgctttgctggttttatgaggaaagcccgccacaactttaggcttgatgaagtgggtatacgccggcaactcaatatggttgccaggataatcaaatacaaggacttccatctctacagacatttggagatgctccaagctgaagactgctttttcgtttacagaatggtggttgtgatgttccggagggaactcaccttcgagcagaccctatgtctctgggaggtgatgtgggctgatcaggcagcaaaccgcgccgagatcgcaaactcatcctggcgtaaattgcagttgggagcgcctccaacagatgatctgttactgtatgcgattgctgctagtgtgttgcagaagcggaaactgataatagaaagctacaacagcatggatgagatcataagggagtgtaacagcatggctgggcagctggacatttggaagctcctggacgatgcgcacgatcttgtggtgacccttcacgataggatcgagtagctgtggtgttcattgcttgcgctatttgtcacgttaccatacttccattatacccaaacactttgtatgaagtacgtaccaacagtgaatagaagcacgttgtggagttagctaggcagcaatggcagcatttgtttttaactgagcatgcatactggagaggtgggcaaagaccaaaggagcatgcatactggagaggtgggcaaaagatcaaagagccatttgaatctatcgttgtgacattgtctaccattctgatgcattgcaaccttctctttctgttgtatcctagttacatactgcactattatgtggatgttgtgttgggggctcggtgcaaattggtggatttcaggatctgttcttgttagactgcactgttttataaagtagcgtttgaaataaatgatgagatgagtaacactattgtagatagccttagagaacgttttcgctatctggattacgtacacacacgcacaaaaaaaaaaacaa

SEQ ID NO: 52899 - DNA, 2332 bp, Zea Mays
cacgtagccacgcaccacttcctcgaaatctctgtgatgcgtcacctgacagcaaaaaggaagagtaacagggaggccggaatctttcgatcgagggcaccaccggcggcgggggtagtagcacaggaggggagccgtggagcgatccgtcgggcatctgcgcccgatgtgggcgtggggctgcgtcgagcgcgtggccgcgggcttcctcggcggccccctcgccgccggcggccgctggaacaccgccgtcgccgtcggggtcacggccgccgcgggcctcgtgctcgtcgccatcgtcgtctcttcccgcagaggcgggctcaaatctccgtggtggcggcggcggaggaaggcgccacttacggcgcaagagtggtgcgacctgttcacaccgcaggggaagcttcaggacggcggagtgaagcttctgaagaaagttcggagcggagggattgaaccgagtatcagagcgcaagtctggccgttccttctgggagttgacagttctgaagcacaaagagatgtggtcaaggcccagaacaggaagggatatttgttattgaggaaacattgcctgcgtaaattagcatacatcatggaagagagcaagcagtcaactaaaacagttaaagtcaaccatgaagggagcaatagttctgaaaaaggtgatgaatctggttgtgttagtccttttgaatctgaagatgttcttgaaaattctggcatgggagaggctacaactgaggaaggaattccatgcctcagtacagagcaagaagtgcaggatgacacttctgaaacaaagccagagcagatgaatggaaaccagtcttcatctagctcctctgatgaggaagggagtgaaagaagtgttgtgactcaagtagaagcatctcataagaacttggcctcagtttgtgagtcctcatttgaggatggacaagaaagcatcccaagatattcgaacacaggaggaaatatggatgatgttgtgttatctaaggctgcccgccctgtgaagtctgcacgggcaactgaggattttgagacatggcaacggattatccgtttggacgcagtccgtgctaacgacgaatggatttcctactctccatcccaagctgcagtttccaaggagagggcaattgaatctgctaaagctgtttttctcaaagactatgaccacttagaaccatatcggatccatcatgcgtcacgccttgttgctattcttgaggcctacgcaatatatgaccaagaaattggatattgtcaaggaatgagtgacctgcttgcgcctctccttgctgttctagaggacgatgacgaggccttctggtgctttgctggttttatgaggaaagcccgccacaactttaggcttgatgaagtgggtatacgccggcaactcaatatggttgccaggataatcaaatacaaggacttccatctctacagacatttggagatgctccaagctgaagactgctttttcgtttacagaatggtggttgtgatgttccggagggaactcaccttcgagcagaccctatgtctctgggaggtgatgtgggctgatcaggcagcaaaccgcgccgagatcgcaaactcatcctggcgtaaattgcagttgggagcgcctccaacagatgatctgttactgtatgcgattgctgctagtgtgttgcagaagcggaaactgataatagaaagctacaacagcatggatgagatcataagggagtgtaacagcatggctgggcagctggacatttggaagctcctggacgatgcgcacgatcttgtggtgacccttcacgataggatcgagtagctgtggtgttcattgcttgcgctatttgtcacgttaccatacttccattatacccaaacactttgtatgaagtacgtaccaacagtgaatagaagcacgttgtggagttagctaggcagcaatggcagcatttgtttttaactgagcatgcatactggagaggtgggcaaagaccaaaggagcatgcatactggagaggtgggcaaaagatcaaagagccatttgaatctatcgttgtgacattgtctaccattctgatgcattgcaaccttctctttctgttgtatcctagttacatactgcactattatgtggatgttgtgttgggggctcggtgcaaattggtggatttcaggatctgttcttgttagactgcactgttttataaagtagcgtttgaaataaatgatgagatgagtaacactattgtagatagccttagagaacgttttcgctatctggattacgtacacacacgcacaaaaaaaaaaacaa

SEQ ID NO: 52900 - DNA, 2322 bp, Zea Mays
cacgtagccacgcaccacttcctcgaaatctctgtgatgcgtcacctgacagcaaaaaggaagagtaacagggaggccggaatctttcgatcgagggcaccaccggcggcgggggtagtagcacaggaggggagccgtggagcgatccgtcgggcatctgcgcccgatgtgggcgtggggctgcgtcgagcgcgtggccgcgggcttcctcggcggccccctcgccgccggcggccgctggaacaccgccgtcgccgtcggggtcacggccgccgcgggcctcgtgctcgtcgccatcgtcgtctcttcccgcagaggcgggctcaaatctccgtggtggcggcggcggaggaaggcgccacttacggcgcaagagtggtgcgacctgttcacaccgcaggggaagcttcaggacggcggagtgaagcttctgaagaaagttcggagcggagggattgaaccgagtatcagagcgcaagtctggccgttccttctgggagtttctgaagcacaaagagatgtggtcaaggcccagaacagggatatttgttattgaggaaacattgcctgcgtaaattagcatacatcatggaagagagcaagcagtcaactaaaacagttaaagtcaaccatgaagggagcaatagttctgaaaaaggtgatgaatctggttgtgttagtccttttgaatctgaagatgttcttgaaaattctggcatgggagaggctacaactgaggaaggaattccatgcctcagtacagagcaagaagtgcaggatgacacttctgaaacaaagccagagcagatgaatggaaaccagtcttcatctagctcctctgatgaggaagggagtgaaagaagtgttgtgactcaagtagaagcatctcataagaacttggcctcagtttgtgagtcctcatttgaggatggacaagaaagcatcccaagatattcgaacacaggaggaaatatggatgatgttgtgttatctaaggctgcccgccctgtgaagtctgcacgggcaactgaggattttgagacatggcaacggattatccgtttggacgcagtccgtgctaacgacgaatggatttcctactctccatcccaagctgcagtttccaaggagagggcaattgaatctgctaaagctgtttttctcaaagactatgaccacttagaaccatatcggatccatcatgcgtcacgccttgttgctattcttgaggcctacgcaatatatgaccaagaaattggatattgtcaaggaatgagtgacctgcttgcgcctctccttgctgttctagaggacgatgacgaggccttctggtgctttgctggttttatgaggaaagcccgccacaactttaggcttgatgaagtgggtatacgccggcaactcaatatggttgccaggataatcaaatacaaggacttccatctctacagacatttggagatgctccaagctgaagactgctttttcgtttacagaatggtggttgtgatgttccggagggaactcaccttcgagcagaccctatgtctctgggaggtgatgtgggctgatcaggcagcaaaccgcgccgagatcgcaaactcatcctggcgtaaattgcagttgggagcgcctccaacagatgatctgttactgtatgcgattgctgctagtgtgttgcagaagcggaaactgataatagaaagctacaacagcatggatgagatcataagggagtgtaacagcatggctgggcagctggacatttggaagctcctggacgatgcgcacgatcttgtggtgacccttcacgataggatcgagtagctgtggtgttcattgcttgcgctatttgtcacgttaccatacttccattatacccaaacactttgtatgaagtacgtaccaacagtgaatagaagcacgttgtggagttagctaggcagcaatggcagcatttgtttttaactgagcatgcatactggagaggtgggcaaagaccaaaggagcatgcatactggagaggtgggcaaaagatcaaagagccatttgaatctatcgttgtgacattgtctaccattctgatgcattgcaaccttctctttctgttgtatcctagttacatactgcactattatgtggatgttgtgttgggggctcggtgcaaattggtggatttcaggatctgttcttgttagactgcactgttttataaagtagcgtttgaaataaatgatgagatgagtaacactattgtagatagccttagagaacgttttcgctatctggattacgtacacacacgcacaaaaaaaaaaacaa

SEQ ID NO: 52901 - DNA, 2337 bp, Zea Mays
cacgtagccacgcaccacttcctcgaaatctctgtgatgcgtcacctgacagcaaaaaggaagagtaacagggaggccggaatctttcgatcgagggcaccaccggcggcgggggtagtagcacaggaggggagccgtggagcgatccgtcgggcatctgcgcccgatgtgggcgtggggctgcgtcgagcgcgtggccgcgggcttcctcggcggccccctcgccgccggcggccgctggaacaccgccgtcgccgtcggggtcacggccgccgcgggcctcgtgctcgtcgccatcgtcgtctcttcccaggcgggctcaaatctccgtggtggcggcggcggaggaaggcgccacttacggcgcaagagtggtgcgacctgttcacaccgcaggggaagcttcaggacggcggagtgaagcttctgaagaaagttcggagcggagggattgaaccgagtatcagagcgcaagtctggccgttccttctgggagtttatagccttgacagttctgaagcacaaagagatgtggtcaaggcccagaacaggaagggatatttgttattgaggaaacattgcctgcgtaaattagcatacatcatggaagagagcaagcagtcaactaaaacagttaaagtcaaccatgaagggagcaatagttctgaaaaaggtgatgaatctggttgtgttagtccttttgaatctgaagatgttcttgaaaattctggcatgggagaggctacaactgaggaaggaattccatgcctcagtacagagcaagaagtgcaggatgacacttctgaaacaaagccagagcagatgaatggaaaccagtcttcatctagctcctctgatgaggaagggagtgaaagaagtgttgtgactcaagtagaagcatctcataagaacttggcctcagtttgtgagtcctcatttgaggatggacaagaaagcatcccaagatattcgaacacaggaggaaatatggatgatgttgtgttatctaaggctgcccgccctgtgaagtctgcacgggcaactgaggattttgagacatggcaacggattatccgtttggacgcagtccgtgctaacgacgaatggatttcctactctccatcccaagctgcagtttccaaggagagggcaattgaatctgctaaagctgtttttctcaaagactatgaccacttagaaccatatcggatccatcatgcgtcacgccttgttgctattcttgaggcctacgcaatatatgaccaagaaattggatattgtcaaggaatgagtgacctgcttgcgcctctccttgctgttctagaggacgatgacgaggccttctggtgctttgctggttttatgaggaaagcccgccacaactttaggcttgatgaagtgggtatacgccggcaactcaatatggttgccaggataatcaaatacaaggacttccatctctacagacatttggagatgctccaagctgaagactgctttttcgtttacagaatggtggttgtgatgttccggagggaactcaccttcgagcagaccctatgtctctgggaggtgatgtgggctgatcaggcagcaaaccgcgccgagatcgcaaactcatcctggcgtaaattgcagttgggagcgcctccaacagatgatctgttactgtatgcgattgctgctagtgtgttgcagaagcggaaactgataatagaaagctacaacagcatggatgagatcataagggagtgtaacagcatggctgggcagctggacatttggaagctcctggacgatgcgcacgatcttgtggtgacccttcacgataggatcgagtagctgtggtgttcattgcttgcgctatttgtcacgttaccatacttccattatacccaaacactttgtatgaagtacgtaccaacagtgaatagaagcacgttgtggagttagctaggcagcaatggcagcatttgtttttaactgagcatgcatactggagaggtgggcaaagaccaaaggagcatgcatactggagaggtgggcaaaagatcaaagagccatttgaatctatcgttgtgacattgtctaccattctgatgcattgcaaccttctctttctgttgtatcctagttacatactgcactattatgtggatgttgtgttgggggctcggtgcaaattggtggatttcaggatctgttcttgttagactgcactgttttataaagtagcgtttgaaataaatgatgagatgagtaacactattgtagatagccttagagaacgttttcgctatctggattacgtacacacacgcacaaaaaaaaaaacaa

SEQ ID NO: 52902 - DNA, 2334 bp, Zea Mays
cacgtagccacgcaccacttcctcgaaatctctgtgatgcgtcacctgacagcaaaaaggaagagtaacagggaggccggaatctttcgatcgagggcaccaccggcggcgggggtagtagcacaggaggggagccgtggagcgatccgtcgggcatctgcgcccgatgtgggcgtggggctgcgtcgagcgcgtggccgcgggcttcctcggcggccccctcgccgccggcggccgctggaacaccgccgtcgccgtcggggtcacggccgccgcgggcctcgtgctcgtcgccatcgtcgtctcttcccgcaaggcgggctcaaatctccgtggtggcggcggcggaggaaggcgccacttacggcgcaagagtggtgcgacctgttcacaccgcaggggaagcttcaggacggcggagtgaagcttctgaagaaagttcggagcggagggattgaaccgagtatcagagcgcaagtctggccgttccttctgggagtccttgacagttctgaagcacaaagagatgtggtcaaggcccagaacaggaagggatatttgttattgaggaaacattgcctgcgtaaattagcatacatcatggaagagagcaagcagtcaactaaaacagttaaagtcaaccatgaagggagcaatagttctgaaaaaggtgatgaatctggttgtgttagtccttttgaatctgaagatgttcttgaaaattctggcatgggagaggctacaactgaggaaggaattccatgcctcagtacagagcaagaagtgcaggatgacacttctgaaacaaagccagagcagatgaatggaaaccagtcttcatctagctcctctgatgaggaagggagtgaaagaagtgttgtgactcaagtagaagcatctcataagaacttggcctcagtttgtgagtcctcatttgaggatggacaagaaagcatcccaagatattcgaacacaggaggaaatatggatgatgttgtgttatctaaggctgcccgccctgtgaagtctgcacgggcaactgaggattttgagacatggcaacggattatccgtttggacgcagtccgtgctaacgacgaatggatttcctactctccatcccaagctgcagtttccaaggagagggcaattgaatctgctaaagctgtttttctcaaagactatgaccacttagaaccatatcggatccatcatgcgtcacgccttgttgctattcttgaggcctacgcaatatatgaccaagaaattggatattgtcaaggaatgagtgacctgcttgcgcctctccttgctgttctagaggacgatgacgaggccttctggtgctttgctggttttatgaggaaagcccgccacaactttaggcttgatgaagtgggtatacgccggcaactcaatatggttgccaggataatcaaatacaaggacttccatctctacagacatttggagatgctccaagctgaagactgctttttcgtttacagaatggtggttgtgatgttccggagggaactcaccttcgagcagaccctatgtctctgggaggtgatgtgggctgatcaggcagcaaaccgcgccgagatcgcaaactcatcctggcgtaaattgcagttgggagcgcctccaacagatgatctgttactgtatgcgattgctgctagtgtgttgcagaagcggaaactgataatagaaagctacaacagcatggatgagatcataagggagtgtaacagcatggctgggcagctggacatttggaagctcctggacgatgcgcacgatcttgtggtgacccttcacgataggatcgagtagctgtggtgttcattgcttgcgctatttgtcacgttaccatacttccattatacccaaacactttgtatgaagtacgtaccaacagtgaatagaagcacgttgtggagttagctaggcagcaatggcagcatttgtttttaactgagcatgcatactggagaggtgggcaaagaccaaaggagcatgcatactggagaggtgggcaaaagatcaaagagccatttgaatctatcgttgtgacattgtctaccattctgatgcattgcaaccttctctttctgttgtatcctagttacatactgcactattatgtggatgttgtgttgggggctcggtgcaaattggtggatttcaggatctgttcttgttagactgcactgttttataaagtagcgtttgaaataaatgatgagatgagtaacactattgtagatagccttagagaacgttttcgctatctggattacgtacacacacgcacaaaaaaaaaaacaa

SEQ ID NO: 52903 - DNA, 1880 bp, Zea Mays
atggtgctgtgggtcttcggctacggctccctcatctggaaccccggcttcgacttcgacgacaaaatcctcggcttcatcaagggctacaaccgcacctttaatctcgcttgcattgaccacagaggcacaccggagcatccggcgaggacctgcacgcttgaaaccgacgacgaggccatatgctggggaattgcatattgtgtcaagggtggtccagaaaaagagctaaaagcaatgtagtacttggagagaagagagtgtgagtacgaccagaagatatccattgatttctacaaggaaggagatcccttgaaaccagctgtgacgggcgtcttagtgttcatttccactccagatccaattggcaacaagtactatcttggccctgctcctttgcaggatatggcaaggcaaattgctacagccaatggccctactggctataatagggattacctgttctcaatggagaaggcattagccatcattagccacgaagatgattcgatcctagagcttgcaaacgaggtgaggaaggtgctcaacagaacaaaggagaccaagatcactgggtgcgtgaactcttctactacctcaagggtgagcaggtggactatggcgaggagcacagcaaggcttgtggccacaacaggtttgggagaatatatcacacagggcactatcctgtttgttacgagcacaacccagtgcattttgtggggcactctgttggcacacaggttgtgagggtgctgcatcagatgcttgccgacaagctaattgcacttgatatgggtgcattaattgctggtgccaaatatcatggagagtttgaggacagacccaaggctgttctcaaagaagttacatattctgatgggcagaccattcttttcattgatgagattcacaaattgcaaatgccatggctgcaaaaagcaaagttgctattgcgggagctgaaaactgtgaaggcagatttatcttttgcaaaggaacgctatgctcagcttgaagaagagaataaaatgttgcgtgagagttatgacatgggtgataatccagaagctaatgatcaggttatgttcctcaagtttgagcctcgacaatgcatgcttattctggcatcccgatttcttactgctacatttcgccctcttgcagtcaggttacgagcgcctttgctgcctaaggtgcatacaaacgtgaccaaaggaatcaccttgtgtgctctcagtgggcttgagagtagcatcatccttcaaacatgatgatgggtttccagctgatggtgtctctatagctcactggtatccttcaaaaagaaaggtaaatctaccaaggacacacatagttaagccttgctcagctgacgactgctaaggaatttctgttaagtgcagtttggggggtcttctcaaccattgcttgacttaaggcaacacattagaggatattcatcagcatcagagatctgcaagctcttttacttttacaagaaagaaccggaatggtttcacttgagattcaagtagtgttgtgaggcatgtaactaacccaaaaaggcacttcaagcgggcaagaaagtccaatgcccttctcaagcacttcgaagcggctctatacgtcctacacgttcttcgatcagaattctttttttcatttgtttttttgtcttgctaatgtgcacgtcacttacaatgatactattgaaaatataggaatcaagtatgtataaacacatgtgtggcagacattttctgactgcctttcggttctttgggcattagtacttggtccttctgaagttaagttgctcggttcctatcattttcactccattcggtgttaaaaaatggagtacatgcacaatagag

SEQ ID NO: 52904 - DNA, 2008 bp, Zea Mays
atggtgctgtgggtcttcggctacggctccctcatctggaaccccggcttcgacttcgacgacaaaatcctcggcttcatcaagggctacaaccgcacctttaatctcgcttgcattgaccacagaggcacaccggagcatccggcgaggacctgcacgcttgaaaccgacgacgaggccatatgctggggaattgcatattgtgtcaagggtggtccagaaaaagagctaaaagcaatgtagtacttggagagaagagagtgtgagtacgaccagaagatatccattgatttctacaaggaaggagatcccttgaaaccagctgtgacgggcgtcttagtgttcatttccactccagatccaattggcaacaagtactatcttggccctgctcctttgcaggatatggcaaggcaaattgctacagccaatggccctactggctataatagggattacctgttctcaatggagaaggcattagccatcattagccacgaagatgattcgatcctagagcttgcaaacgaggtgaggaaggtgctcaacagaacaaaggagaccaagatcactgggtgcgtgaactcttctactacctcaagggtgagcaggtggactatggcgaggagcacagcaaggcttgtggccacaacaggtttgggagaatatatcacacagggcactatcctgtttgttacgagcacaacccagtgcattttgtggggcactctgttggcacacaggttgtgagggtgctgcatcagatgcttgccgacaagctaattgcacttgatatgggtgcattaattgctggtgccaaatatcatggagagtttgaggacagacccaaggctgttctcaaagaagttacatattctgatgggcagaccattcttttcattgatgagattcacaaattgcaaatgccatggctgcaaaaagcaaagttgctattgcgggagctgaaaactgtgaaggcagatttatcttttgcaaaggaacgctatgctcagcttgaagaagagaataaaatgttgcgtgagagttatgacatgggtgataatccagaagctaatgatcaggttatgttcctcaagtttgagcctcgacaatgcatgcttattctggcatcccgatttcttactgctacatttcgccctcttgcagtcaggttacgagcgcctttgctgcctaaggtgcatacaaacgtgaccaaaggaatcaccttgtgtgctctcagtgggcttgagagtagcatcatccttcaaacatgatgatgggtttccagctgatggtgtctctatagctcactggtatccttcaaaaagaaagttattccaaagcaaaaaaagatccgccatgttttatggtcattgtcacaaagaagtgcttgcaaggaaccctgttgagactgagagcaccaaggttgtgagcgtttttggagcttaatggcttaatgggtaaatctaccaaggacacacatagttaagccttgctcagctgacgactgctaaggaatttctgttaagtgcagtttggggggtcttctcaaccattgcttgacttaaggcaacacattagaggatattcatcagcatcagagatctgcaagctcttttacttttacaagaaagaaccggaatggtttcacttgagattcaagtagtgttgtgaggcatgtaactaacccaaaaaggcacttcaagcgggcaagaaagtccaatgcccttctcaagcacttcgaagcggctctatacgtcctacacgttcttcgatcagaattctttttttcatttgtttttttgtcttgctaatgtgcacgtcacttacaatgatactattgaaaatataggaatcaagtatgtataaacacatgtgtggcagacattttctgactgcctttcggttctttgggcattagtacttggtccttctgaagttaagttgctcggttcctatcattttcactccattcggtgttaaaaaatggagtacatgcacaatagag

SEQ ID NO: 52905 - DNA, 3467 bp, Zea Mays
ccaaacatgggtagaggcatgtagcttccatgatgttcttattttcaacactgggcattgctgggattccacatcttaagtggtttggggtggaggggcagtacaatgtcatggtgattgatctgcttggtccaagtctgaagggcttatttaactactgcagcagaaagttctcacttaaaacagtactaatgcttgctgatcagatgatcagtgttgtttgctacctggcacgttggagtccagcgcgtatgccgcctccgataaactcaagtccatcggtcagtccgtcgatgaccacgatattgtcgctggtctcctctcgaacctacaagatcgtggattacgtcgaagcagatacagctcatctatctgcacctggtcttggggtggaatttgggtcaacacatgaccatgcatgttatgtatgcggttgcttgagcaatcaggaacagatagtggagttacttgaacgtgaaaaattggagaagaagctgcaggatccagctgcagaaccaatatgtttgccagtagaatttttgaaagccatcacatgcaatttttcaactgaacgagaacttggcagggtgagtacggagtagtgtacaagggagttctgcattgagctgtcgtagagagcgcagacaggcactctagccaacgttgttggctaggattgggacacaaaagcgagacgagggatgagaagcacaggaggagtcggtctgtcctcatcatcgatatatgcaagccatccagtgctttggagttgatatggtcggctgagaagttgaggaagaagtcatttctacctataagctaggggaatcagatacgccacaggctgcgcgatggtgctgtgggtcttcggctacggctccctcatctggaaccccggcttcgacttcgacgacaaaatcctcggcttcatcaagggctacaaccgcacctttaatctcgcttgcattgaccacagaggcacaccggagcatccggcgaggacctgcacgcttgaaaccgacgacgaggccatatgctggggaattgcatattgtgtcaagggtggtccagaaaaagagctaaaagcaatgtagtacttggagagaagagagtgtgagtacgaccagaagatatccattgatttctacaaggaaggagatcccttgaaaccagctgtgacgggcgtcttagtgttcatttccactccagatccaattggcaacaagtactatcttggccctgctcctttgcaggatatggcaaggcaaattgctacagccaatggccctactggctataatagggattacctgttctcaatggagaaggcattagccatcattagccacgaagatgattcgatcctagagcttgcaaacgaggtgaggaaggtgctcaacagaacaaaggagaccaagatcactgaaagattatgttcccctgaatataaatcactgagagtttattgttcctggcgatgcagggtgcgtgaactcttctactacctcaagggtgagcaggtggactatggcgaggagcacagcaaggcttgtggccacaacaggtttgggagaatatatcacacagggcactatcctgtttgttacgagcacaacccagtgcattttgtggggcactctgttggcacacaggttgtgagggtgctgcatcagatgcttgccgacaagctaattgcacttgatatgggtgcattaattgctggtgccaaatatcatggagagtttgaggacagacccaaggctgttctcaaagaagttacatattctgatgggcagaccattcttttcattgatgagattcacaaattgcaaatgccatggctgcaaaaagcaaagttgctattgcgggagctgaaaactgtgaaggcagatttatcttttgcaaaggaacgctatgctcagcttgaagaagagaataaaatgttgcgtgagagttatgacatgggtgataatccagaagctaatgatcaggttatgttcctcaagtttgagcctcgacaatgcatgcttattctggcatcccgatttcttactgctacatttcgccctcttgcagtcaggttacgagcgcctttgctgcctaaggtgcatacaaacgtgaccaaaggaatcaccttgtgtgctctcagtgggcttgagagtagcatcatccttcaaacatgatgatgggtttccagctgatggtgtctctatagctcactggtatccttcaaaaagaaaaataggttattccaaagcaaaaaaagatccgccatgttttatggtcattgtcacaaagaagtgcttgcaaggaaccctgttgagactgagagcaccaaggttgtgagcgtttttggagcttaatggcttaatggtttgatctcttggatcaattctatgtacaatacaaatggtttacatgtcaattagaaatcacaaatcaattgcaaatatatatataaacaaccattagcttatcattgcactatctatcatttatgctactgttggatatgttacaagtcttgacatatgtgctgattcgctaatctgttaacactggcttctgatgccaatgcaataggatctaatagatctgataataactctcttctgtctcgatagttgagagctttgtgtgtggcatacgtgctattcagaaaagttcatttctggagcttgcaacaaccatcttcctgccattcacttgttgtggctgcgtaagctatgatgtctgtatcaatgatcatgccgatgctttagcataacacggggtgcatgcacatgtatccgattccctgcatcactcacacctcactttttctgctaaattgtggcagtggtgataattgatatgcatagactgtacttatttaatgactatgaaataccatttaacatagctattgtgcctgacagggtaaatctaccaaggacacacatagttaagccttgctcagctgacgactgctaaggaatttctgttaagtgcagtttggggggtcttctcaaccattgcttgacttaaggcaacacattagaggatattcatcagcatcagagatctgcaagctcttttacttttacaagaaagaaccggaatggtttcacttgagattcaagtagtgttgtgaggcatgtaactaacccaaaaaggcacttcaagcgggcaagaaagtccaatgcccttctcaagcacttcgaagcggctctatacgtcctacacgttcttcgatcagaattctttttttcatttgtttttttgtcttgctaatgtgcacgtcacttacaatgatactattgaaaatataggaatcaagtatgtataaacacatgtgtggcagacattttctgactgcctttcggttctttgggcattagtacttggtccttctgaagttaagttgctcggttcctatcattttcactccattcggtgttaaaaaatggagtacatgcacaatagag

SEQ ID NO: 52906 - DNA, 4497 bp, Zea Mays
atggacgtggactcacgcatggcgacggagtccgactccgactccgacgcgcgcggtggcagcgggtccgggagcgagacccccacggcgtcctcgtccccatccgtagttagcttggcgccgacagcttcctcatctccttcttccacgcacccaacgccgaggaggacggcagcaaggtccaggccttcctcgcggagatggagagcgccccgaccaggagatcgaccacttgctcgaggtgaagccctgccctgcccctcactgaatcccgtgctccctcctcccccatcaacgctccctcctcacattccccgcacaccaagagacgaatctgtccatgctagggtttggattcgtgggtggagcccgagatgctcaagaatgatggtttcagtcatgtcattgctgaagaccgaactgaccagcttcatggttctctacaaccgcgacaacgtggagtccatcgggctagacgaagcggccaaatgcctcggcgtggagaggcgccggatctacgacattgtcaacgtgctcgagggcgttgggcatgtggcgcccccgctgcgaatttgcctctatgacaattgccatcctcgcatcccaaaccgtcgatgcccacccctaacacggttcctgacctccctgacagaggacttctctaaaggatataacaagtggtggtcaagaaatccaaatggagtccctctagaatctcttggatataagcaagctgggattccacatcttaagtggtttggggtggaggggcagtacaatgtcatggtgattgatctgcttggtccaagtctgaagggcttatttaactactgcagcagaaagttctcacttaaaacagtactaatgcttgctgatcagatgtgcttgagcaatcaggaacagatagtggagttacttgaacgtgaaaaattggagaagaagctgcaggatccagctgcagaaccaatatgtttgccagtagaatttttgaaagccatcacatgcaatttttcaactgaacgagaacttggcaggtgctttggagttgatatggtcggctgagaagttgaggaagaagtcatttctacctataagctaggggaatcagatacgccacaggctgcgcgatggtgctgtgggtcttcggctacggctccctcatctggaaccccggcttcgacttcgacgacaaaatcctcggcttcatcaagggctacaaccgcacctttaatctcgcttgcattgaccacagaggcacaccggagcatccggcgaggacctgcacgcttgaaaccgacgacgaggccatatgctggggaattgcatattgtgtcaagggtggtccagaaaaagagctaaaagcaatgtagtacttggagagaagagagtgtgagtacgaccagaagatatccattgatttctacaaggaaggagatcccttgaaaccagctgtgacgggcgtcttagtgttcatttccactccagatccaattggcaacaagtactatcttggccctgctcctttgcaggatatggcaaggcaaattgctacagccaatggccctactggctataatagggattacctgttctcaatggagaaggcattagccatcattagccacgaagatgattcgatcctagagcttgcaaacgaggtgaggaaggtgctcaacagaacaaaggagaccaagatcactgggtgcgtgaactcttctactacctcaagggtgagcaggtggactatggcgaggagcacagcaaggcttgtggccacaacaggtttgggagaatatatcacacagggcactatcctgtttgttacgagcacaacccagtgcattttgtggggcactctgttggcacacaggttgtgagggtgctgcatcagatgcttgccgacaagctaattgcacttgatatgggtgcattaattgctggtgccaaatatcatggagagtttgaggacagacccaaggctgttctcaaagaagttacatattctgatgggcagaccattcttttcattgatgagattcacaaattgcaaatgccatggctgcaaaaagcaaagttgctattgcgggagctgaaaactgtgaaggcagatttatcttttgcaaaggaacgctatgctcagcttgaagaagagaataaaatgttgcgtgagagttatgacatgggtgataatccagaagctaatgatcaggttatgttcctcaagtttgagcctcgacaatgcatgcttattctggcatcccgatttcttactgctacatttcgccctcttgcagtcaggttacgagcgcctttgctgcctaaggtgcatacaaacgtgaccaaaggaatcaccttgtgtgctctcagtgggcttgagagtagcatcatccttcaaacatgatgatgggtttccagctgatggtgtctctatagctcactggtatccttcaaaaagaaagtatggtgttgttttataagttctcatatttatgactaaataattctatagctcgctggtacgcaagttgattccttttctaattattatattgttttgttcatttctattcttttatgcatttccttcccatacacatgccaattttctcacaatatcttaagagtgctctgcaccaactgccgaaacaaaaaaggcaaaaaccagatcaactgcttctagacttcgaggaacttatttgttattggcatagtggcatatataatacctctgctcttttctatttagtgttcaaaatttgtaccaaaatacaaggtattctagatcctcactcaaccctctctctcctctgtcttttttctggcagcaaatattgagattccttttaaacttggtgtcacccaaaacagccagccaataacttaggaaaataacatctgaactactccatttgtcctaataagtagggtcaaggtggtatttagccaggctccttattttgtctaaattgcttggataccttgtgtttctgggcatagagtatgtttgcaactctgtatttgcttagatattataggcattgattcattgtaaatgttgcatggtctttcactgtttagggtgacaaacctgtagcagaatgtcatgactcatcatactgcagatagacatgacaaatattctttttatatgtggtggcgcttttgtagacttagaaaagactatttctgaaaggtattccgtatttcatatgtagaataggttattccaaagcaaaaaaagatccgccatgttttatggtcattgtcacaaagaagtgcttgcaaggtatgtcatacatagttagttttatacctatcccttttagtagttcctttattttattttctaaaccacaacatggtcactatttcagttattagtagttgtacgcaaaggtttattttagttcaaacatacttgtggacactacattatttcatccaatcagtgaactttataggtcttagttttatttttgttatattttgttgtgttgatatatgttgcttctcactttgatgcatgtggctgatgtgcttggtaaggtttaatactcatatctattatcgtttgaaacttgaaagcatggcattcatctacttgtgagcttttatgataacagtgaaagttggttttattgcaattggaatgaacatgacaaaagagaggtgtaacagaagaaacaaaattgtatgtaggtaaatacccgtgcgttgcaatagggaaaaaatagtgtaaatgttcctgttcggccaatatttttgggtgcttttatagaaattggtgtaggtgctgctccaccttccgttgcataaggctttaccaatccacatgtcagttgttctgcaaacaattaataagttgcagttttatagaacacaaggaaccctgttgagactgagagcaccaaggttgtgagcgtttttggagcttaatggcttaatgagggtaaatctaccaaggacacacatagttaagccttgctcagctgacgactgctaaggaatttctgttaagtgcagtttggggggtcttctcaaccattgcttgacttaaggcaacacattagaggatattcatcagcatcagagatctgcaagctcttttacttttacaagaaagaaccggaatggtttcacttgagattcaagtagtgttgtgaggcatgtaactaacccaaaaaggcacttcaagcgggcaagaaagtccaatgcccttctcaagcacttcgaagcggctctatacgtcctacacgttcttcgatcagaattctttttttcatttgtttttttgtcttgctaatgtgcacgtcacttacaatgatactattgaaaatataggaatcaagtatgtataaacacatgtgtggcagacattttctgactgcctttcggttctttgggcattagtacttggtccttctgaagttaagttgctcggttcctatcattttcactccattcggtgttaaaaaatggagtacatgcacaatagag

SEQ ID NO: 52907 - DNA, 3366 bp, Zea Mays
atggacgtggactcacgcatggcgacggagtccgactccgactccgacgcgcgcggtggcagcgggtccgggagcgagacccccacggcgtcctcgtccccatccgtagttagcttggcgccgacagcttcctcatctccttcttccacgcacccaacgccgaggaggacggcagcaaggtccaggccttcctcgcggagatggagagcgccccgaccaggagatcgaccacttgctcgaggtgaagccctgccctgcccctcactgaatcccgtgctccctcctcccccatcaacgctccctcctcacattccccgcacaccaagagacgaatctgtccatgctagggtttggattcgtgggtggagcccgagatgctcaagaatgatggtttcagtcatgtcattgctgaagaccgaactgaccagcttcatggttctctacaaccgcgacaacgtggagtccatcgggctagacgaagcggccaaatgcctcggcgtggagaggcgccggatctacgacattgtcaacgtgctcgagggcgttgggcatgtggcgcccccgctgcgaatttgcctctatgacaattgccatcctcgcatcccaaaccgtcgatgcccacccctaacacggttcctgacctccctgacagaggacttctctaaaggatataacaagtggtggtcaagaaatccaaatggagtccctctagaatctcttggatataagcaagctgggattccacatcttaagtggtttggggtggaggggcagtacaatgtcatggtgattgatctgcttggtccaagtctgaagggcttatttaactactgcagcagaaagttctcacttaaaacagtactaatgcttgctgatcagatgtgcttgagcaatcaggaacagatagtggagttacttgaacgtgaaaaattggagaagaagctgcaggatccagctgcagaaccaatatgtttgccagtagaatttttgaaagccatcacatgcaatttttcaactgaacgagaacttggcaggtgctttggagttgatatggtcggctgagaagttgaggaagaagtcatttctacctataagctaggggaatcagatacgccacaggctgcgcgatggtgctgtgggtcttcggctacggctccctcatctggaaccccggcttcgacttcgacgacaaaatcctcggcttcatcaagggctacaaccgcacctttaatctcgcttgcattgaccacagaggcacaccggagcatccggcgaggacctgcacgcttgaaaccgacgacgaggccatatgctggggaattgcatattgtgtcaagggtggtccagaaaaagagctaaaagcaatgtagtacttggagagaagagagtgtgagtacgaccagaagatatccattgatttctacaaggaaggagatcccttgaaaccagctgtgacgggcgtcttagtgttcatttccactccagatccaattggcaacaagtactatcttggccctgctcctttgcaggatatggcaaggcaaattgctacagccaatggccctactggctataatagggattacctgttctcaatggagaaggcattagccatcattagccacgaagatgattcgatcctagagcttgcaaacgaggtgaggaaggtgctcaacagaacaaaggagaccaagatcactgggtgcgtgaactcttctactacctcaagggtgagcaggtggactatggcgaggagcacagcaaggcttgtggccacaacaggtttgggagaatatatcacacagggcactatcctgtttgttacgagcacaacccagtgcattttgtggggcactctgttggcacacaggttgtgagggtgctgcatcagatgcttgccgacaagctaattgcacttgatatgggtgcattaattgctggtgccaaatatcatggagagtttgaggacagacccaaggctgttctcaaagaagttacatattctgatgggcagaccattcttttcattgatgagattcacaaattgcaaatgccatggctgcaaaaagcaaagttgctattgcgggagctgaaaactgtgaaggcagatttatcttttgcaaaggaacgctatgctcagcttgaagaagagaataaaatgttgcgtgagagttatgacatgggtgataatccagaagctaatgatcagctgaaaatgatccacatgatgggaagagaaagtgtgtagctctctggcctattttccgtatttctcatcaaaggagccacatcatatatggtctttactacagaaggaaggagatatcgcaggagctttatgagttcttggacccgggttatgcatactgtaagctgatcgcaaaatggaaaagtcaggttacgagcgcctttgctgcctaaggtgcatacaaacgtgaccaaaggaatcaccttgtgtgctctcagtgggcttgagagtagcatcatccttcaaacatgatgatgggtttccagctgatggtgtctctatagctcactggtatccttcaaaaagaaaaataggttattccaaagcaaaaaaagatccgccatgttttatggtcattgtcacaaagaagtgcttgcaaggaaccctgttgagactgagagcaccaaggttgtgagcgtttttggagcttaatggcttaatgggtaaatctaccaaggacacacatagttaagccttgctcagctgacgactgctaaggaatttctgttaagtgcagtttggggggtcttctcaaccattgcttgacttaaggcaacacattagaggatattcatcagcatcagaggcaattcttcccaatctgatttgagaaaaaaatttgttggcaacgaaaaattagtgttttcttgctgaatcttggggggcagagactcttgacgatgtgcaacctttcttgtttaatatttttgcagatctgcaagctcttttacttttacaagaaagaaccggaatggtttcacttgagattcaagtagtgttgtgaggcatgtaactaacccaaaaaggcacttcaagcgggcaagaaagtccaatgcccttctcaagcacttcgaagcggctctatacgtcctacacgttcttcgatcagaattctttttttcatttgtttttttgtcttgctaatgtgcacgtcacttacaatgatactattgaaaatataggaatcaagtatgtataaacacatgtgtggcagacattttctgactgcctttcggttctttgggcattagtacttggtccttctgaagttaagttgctcggttcctatcattttcactccattcggtgttaaaaaatggagtacatgcacaatagag

SEQ ID NO: 52908 - DNA, 163 bp, Zea Mays
gtcacaaagaagtgcttgcaagggtaaatctaccaaggacacacatagttaagccttgctcagctgacgactgctaaggaatttctgttaagtgcagtttggggggtcttctcaaccattgcttgacttaaggcaacacattagaggatattcatcagcatca

SEQ ID NO: 52909 - DNA, 1296 bp, Zea Mays
atggtgctgtgggtcttcggctacggctccctcatctggaaccccggcttcgacttcgacgacaaaatcctcggcttcatcaagggctacaaccgcacctttaatctcgcttgcattgaccacagaggcacaccggagcatccggcgaggacctgcacgcttgaaaccgacgacgaggccatatgccatctttgcatgcccccctttatttacacggtgacacagtgttacatgggcaagttaactttttttgcagtggggaattgcatattgtgtcaagggtggtccagaaaaagagctaaaagcaattacttggagagaagagagtgtgagtacgaccagaagatatccattgatttctacaaggaaggagatcccttgaaaccagctgtgacgggcgtcttagtgttcatttccactccagatccaattggcaacaagtactatcttggccctgctcctttgcaggatatggcaaggcaaattgctacagccaatggccctactggctataatagggattacctgttctcaatggagaaggcattagccatcattagccacgaagatgattcgatcctagagcttgcaaacgaggtgaggaaggtgctcaacagaacaaaggagaccaagatcactgaaagattatgttcccctgaatataaatcactgagagtttattgttcctggcgatgcagggtgcgtgaactcttctactacctcaagggtgagcaggtggactatggcgaggagcacagcaaggcttgtggccacaacaggtttgggagaatatatcacacagggcactatcctgtttgttacgagcacaacccagtgcattttgtggggcactctgttggcacacaggttgtgagggtgctgcatcagatgcttgccgacaagctaattgcacttgatatgggtgcattaattgctggtgccaaatatcatggagagtttgaggacagacccaaggctgttctcaaagaagttacatattctgatgggcagaccattcttttcattgatgagattcacaaattgcaaatgccatggctgcaaaaagcaaagttgctattgcgggagctgaaaactgtgaaggcagatttatcttttgcaaaggaacgctatgctcagcttgaagaagagaataaaatgttgcgtgagagttatgacatgggtgataatccagaagctaatgatcagctgaaaatgatccacatgatgggaagagaaagtgtgtagctctctggcctattttccgtatttctcatcaaaggagccacatcatatatg

SEQ ID NO: 52910 - DNA, 1163 bp, Zea Mays
atggtgctgtgggtcttcggctacggctccctcatctggaaccccggcttcgacttcgacgacaaaatcctcggcttcatcaagggctacaaccgcacctttaatctcgcttgcattgaccacagaggcacaccggagcatccggcgaggacctgcacgcttgaaaccgacgacgaggccatatgctggggaattgcatattgtgtcaagggtggtccagaaaaagagctaaaagcaattacttggagagaagagagtgtgagtacgaccagaagatatccattgatttctacaaggaaggagatcccttgaaaccagctgtgacgggcgtcttagtgttcatttccactccagatccaattggcaacaagtactatcttggccctgctcctttgcaggatatggcaaggccacgaagatgattcgatcctagagcttgcaaacgaggtgaggaaggtgctcaacagaacaaaggagaccaagatcactgaaagattatgttcccctgaatataaatcactgagagtttattgttcctggcgatgcagggtgcgtgaactcttctactacctcaagggtgagcaggtggactatggcgaggagcacagcaaggcttgtggccacaacaggtttgggagaatatatcacacagggcactatcctgtttgttacgagcacaacccagtgcattttgtggggcactctgttggcacacaggttgtgagggtgctgcatcagatgcttgccgacaagctaattgcacttgatatgggtgcattaattgctggtgccaaatatcatggagagtttgaggacagacccaaggctgttctcaaagaagttacatattctgatgggcagaccattcttttcattgatgagattcacaaagttaattgttggggcagttgcaaatgccatggctgcaaaaagcaaagttgctattgcgggagctgaaaactgtgaaggcagatttatcttttgcaaaggaacgctatgctcagcttgaagaagagaataaaatgttgcgtgagagttatgacatgggtgataatccagaagctaatgatcagctgaaaatgatccacatgatgggaagagaaagtgtgtagctctctggcctattttccgtatttctcatcaaaggagccacatcatatatg

SEQ ID NO: 52911 - DNA, 3328 bp, Zea Mays
gcggctgaaccagtgccagtcccacccgttcccagaccagcctcacgcgctcaccgtgctgcctccaccaccgatggctctccctcccggcgcaggggcggtggcgccggcgacgcccttcgccgcgaatccgtgccgtctccggcgggcgtctggtcctcctgccgccgcccttcggctcgggccgctcttctggccatgggaaaaggtgaaaatcggtcccctttctgtttcccccatgggttttggaacatgggcatggggaaaccagctactttggggctatcaagaaagcatggacaacgaacttcaggattgcttcaatctggctctaaggaatggcataaacctttttgacactgctgactcttacggaactggaaggctgaacggacagagcgaacggctactcggtaaattcatccttgagtttgaagggaggattaaatctccagatgatgtggtcatagcaactaagtttgctgcatatccttggcgacttacatcggggcagtttgtcagcgcctgcaagtattctcccgatttgtttgtttcatgtcttctttggaaagattacaacttgataggctcgggatagggcagctgcattggtctactgctaactatgcacccttgcaggagcgtgccctctgggatggactagttgaaatgtatgaaaaggtcactgaactttgaaacatccacttcagattgtgaacttaccatgccatgtcattgttgaaattgctggactccactctctgtgaccagctaggcacacattctgactgcatgctttgtttctcagggccttgtaagtgctgtcggtgtcagcaattacgggccgaagcagcttctgaagatccacagctatctagcttctagaggagttcccttgagctcagctcaggttcagttctcgttactgagcatgggtgacgatcagatggagctgaaaagtgtgtgtgattcattgggcattcgcatcatcgcatatagcccgcttggattaggaatgctcactgggaagtatggtgcttctaacctcccaaaaggaccaaggtcagtgctgttccgacaaatccttcctgggctggagcctctgctgtcttgcctgagaaggattgccgaaaagaaggggaagaccatgcctcagatgctcaagaatgatggtttcagtcatgtcattgctgaagaccgaactgaccagcttcatggttctctacaaccgcgacaacgtggagtccatcgggctagacgaagcggccaaatgcctcggcgtggagaggcgccggatctacgacattgtcaacgtgctcgagggcgttgggcatgtggcgcccccgctgcgaatttgcctctatgacaattgccatcctcgcatcccaaaccgtcgatgcccacccctaacacggttcctgacctccctgacagaggacttctctaaaggatataacaagtggtggtcaagaaatccaaatggagtccctctagaatctcttggatataagcaagctgggattccacatcttaagtggtttggggtggaggggcagtacaatgtcatggtgattgatctgcttggtccaagtctgaagggcttatttaactactgcagcagaaagttctcacttaaaacagtactaatgcttgctgatcagatgtgcttgagcaatcaggaacagatagtggagttacttgaacgtgaaaaattggagaagaagctgcaggatccagctgcagaaccaatatgtttgccagtagaatttttgaaagccatcacatgcaatttttcaactgaacgagaacttggcagggtgagtacggagtagtgtacaagggagttctgcattgagctgtcgtagagagcgcagacaggcactctagccaacgttgttggctaggattgggacacaaaagcgagacgagggatgagaagcacaggaggagtcggtctgtcctcatcatcgatatatgcaagccatccagtgctttggagttgatatggtcggctgagaagttgaggaagaagtcatttctacctataagctaggggaatcagatacgccacaggctgcgcgatggtgctgtgggtcttcggctacggctccctcatctggaaccccggcttcgacttcgacgacaaaatcctcggcttcatcaagggctacaaccgcacctttaatctcgcttgcattgaccacagaggcacaccggagcatccggcgaggacctgcacgcttgaaaccgacgacgaggccatatgctggggaattgcatattgtgtcaagggtggtccagaaaaagagctaaaagcaatgtagtacttggagagaagagagtgtgagtacgaccagaagatatccattgatttctacaaggaaggagatcccttgaaaccagctgtgacgggcgtcttagtgttcatttccactccagatccaattggcaacaagtactatcttggccctgctcctttgcaggatatggcaaggcaaattgctacagccaatggccctactggctataatagggattacctgttctcaatggagaaggcattagccatcattagccacgaagatgattcgatcctagagcttgcaaacgaggtgaggaaggtgctcaacagaacaaaggagaccaagatcactgaaagattatgttcccctgaatataaatcactgagagtttattgttcctggcgatgcagggtgcgtgaactcttctactacctcaagggtgagcaggtggactatggcgaggagcacagcaaggcttgtggccacaacaggtttgggagaatatatcacacagggcactatcctgtttgttacgagcacaacccagtgcattttgtggggcactctgttggcacacaggttgtgagggtgctgcatcagatgcttgccgacaagctaattgcacttgatatgggtgcattaattgctggtgccaaatatcatggagagtttgaggacagacccaaggctgttctcaaagaagttacatattctgatgggcagaccattcttttcattgatgagattcacaaagttaattgttggggcagttgcaaatgccatggctgcaaaaagcaaagttgctattgcgggagctgaaaactgtgaaggcagatttatcttttgcaaaggaacgctatgctcagcttgaagaagagaataaaatgttgcgtgagagttatgacatgggtgataatccagaagctaatgatcagctgaaaatgatccacatgatgggaagagaaagtgtgtagctctctggcctattttccgtatttctcatcaaaggagccacatcatatatg

SEQ ID NO: 52912 - DNA, 479 bp, Zea Mays
atggtgctgtgggtcttcggctacggctccctcatctggaaccccggcttcgacttcgacgacaaaatcctcggcttcatcaagggctacaaccgcacctttaatctcgcttgcattgaccacagaggcacaccggagcatccggcgaggacctgcacgcttgaaaccgacgacgaggccatatgctggggaattgcatattgtgtcaagggtggtccagaaaaagagctaaaagcaatgtagtacttggagagaagagagtgtgagtacgaccagaagatatccattgatttctacaaggaaggagatcccttgaaaccagctgtgacgggcgtcttagtgttcatttccactccagatccaattggcaacaagtactatcttggccctgctcctttgcaggatatggcaaggcaaattgctacagccaatggccctactggctataatagggattacctgttctcaatggagaaggc

SEQ ID NO: 52913 - DNA, 753 bp, Zea Mays
ggatattcctgaccaaacatgggtagaggcatgtagcttccatgatgttcttattttcaacactgggcattgctgggattccacatcttaagtggtttggggtggaggggcagtacaatgtcatggtgattgatctgcttggtccaagtctgaagggcttatttaactactgcagcagaaagttctcacttaaaacagtactaatgcttgctgatcagatgatcagtgttgtttgctacctggcacgttggagtccagcgcgtatgccgcctccgataaactcaagtccatcggtcagtccgtcgatgaccacgatattgtcgctggtctcctctcgaacctacaagatcgtggattacgtcgaagcagatacagctcatctatctgcacctggtcttggggtggaatttgggtcaacacatgaccatgcatgttatgtatgcggtgcgctgtttcaagtgcttgagcaatcaggaacagatagtggagttacttgaacgtgaaaaattggagaagaagctgcaggatccagctgcagaaccaatatgtttgccagtagaatttttgaaagccatcacatgcaatttttcaactgaacgagaacttggcaggggagttctgcattgagctgtcgtagagagcgcagacaggcactctagccaacgttgttggctaggattgggacacaaaagcgagacgagggatgagaagcacaggaggagtcggtctgtcctcatcatcgatatatgcaag

SEQ ID NO: 52914 - DNA, 1298 bp, Zea Mays
gcggctgaaccagtgccagtcccacccgttcccagaccagcctcacgcgctcaccgtgctgcctccaccaccgatggctctccctcccggcgcaggggcggtggcgccggcgacgcccttcgccgcgaatccgtgccgtctccggcgggcgtctggtcctcctgccgccgcccttcggctcgggccgctcttctggccatgggaaaaggtgaaaatcggtcccctttctgtttcccccatgggttttggaacatgggcatggggaaaccagctactttggggctatcaagaaagcatggacaacgaacttcaggattgcttcaatctggctctaaggaatggcataaacctttttgacactgctgactcttacggaactggaaggctgaacggacagagcgaacggctactcggtaaattcatccttgagtttgaagggaggattaaatctccagatgatgtggtcatagcaactaagtttgctgcatatccttggcgacttacatcggggcagtttgtcagcgcctgcaagtattctcccgatttgtttgtttcatgtcttctttggaaagattacaacttgataggctcgggatagggcagctgcattggtctactgctaactatgcacccttgcaggagcgtgccctctgggatggactagttgaaatgtatgaaaagggccttgtaagtgctgtcggtgtcagcaattacgggccgaagcagcttctgaagatccacagctatctagcttctagaggagttcccttgagctcagctcaggttcagttctcgttactgagcatgggtgacgatcagatggagctgaaaagtgtgtgtgattcattgggcattcgcatcatcgcatatagcccgcttggattaggaatgctcactgggaagtatggtgcttctaacctcccaaaaggaccaaggtcagtgctgttccgacaaatccttcctgggctggagcctctgctgtcttgcctgagaaggattgccgaaaagaaggggaagaccatgcctcaggtggccatcaactggtgcatgtgcaagggcacagttcctatcccaggcgtcaaaacggtgaggcatgtccaggagaacctgggcgcgctcggctggaggctgagttctgccgagatctcggagctcgagtccgcagcgatggcggctccgaggaagatgatccagaatgtcttccagactgcctgaccgtgctgaatacatgttaccagtgtgaactgcgaatacattctactgatatttgtgtcgtgcaattgtgaataagtaagcat

SEQ ID NO: 52915 - DNA, 1268 bp, Zea Mays
gcggctgaaccagtgccagtcccacccgttcccagaccagcctcacgcgctcaccgtgctgcctccaccaccgatggctctccctcccggcgcaggggcggtggcgccggcgacgcccttcgccgcgaatccgtgccgtctccggcgggcgtctggtcctcctgccgccgcccttcggctcgggccgctcttctggccatgggaaaaggtgaaaatcggtcccctttctgtttcccccatgggttttggaacatgggcatggggaaaccagctactttggggctatcaagaaagcatggacaacgaacttcaggattgcttcaatctggctctaaggaatggcataaacctttttgacactgctgactcttacggaactggaaggctgaacggacagagcgaacggctactcggtaaattcatccttgagtttgaagggaggattaaatctccagatgatgtggtcatagcaactaagtttgctgcatatccttggcgacttacatcggggcagtttgtcagcgcctgtcttctttggaaagattacaacttgataggctcgggatagggcagctgcattggtctactgctaactatgcacccttgcaggagcgtgccctctgggatggactagttgaaatgtatgaaaagggccttgtaagtgctgtcggtgtcagcaattacgggccgaagcagcttctgaagatccacagctatctagcttctagaggagttcccttgagctcagctcaggttcagttctcgttactgagcatgggtgacgatcagatggagctgaaaagtgtgtgtgattcattgggcattcgcatcatcgcatatagcccgcttggattaggaatgctcactgggaagtatggtgcttctaacctcccaaaaggaccaaggtcagtgctgttccgacaaatccttcctgggctggagcctctgctgtcttgcctgagaaggattgccgaaaagaaggggaagaccatgcctcaggtggccatcaactggtgcatgtgcaagggcacagttcctatcccaggcgtcaaaacggtgaggcatgtccaggagaacctgggcgcgctcggctggaggctgagttctgccgagatctcggagctcgagtccgcagcgatggcggctccgaggaagatgatccagaatgtcttccagactgcctgaccgtgctgaatacatgttaccagtgtgaactgcgaatacattctactgatatttgtgtcgtgcaattgtgaataagtaagcat

SEQ ID NO: 52916 - DNA, 1399 bp, Zea Mays
gcggctgaaccagtgccagtcccacccgttcccagaccagcctcacgcgctcaccgtgctgcctccaccaccgatggctctccctcccggcgcaggggcggtggcgccggcgacgcccttcgccgcgaatccgtgccgtctccggcgggcgtctggtcctcctgccgccgcccttcggctcgggccgctcttctggccatgggaaaaggtgaaaatcggtcccctttctgtttcccccatgggttttggaacatgggcatggggaaaccagctactttggggctatcaagaaagcatggacaacgaacttcaggattgcttcaatctggctctaaggaatggcataaacctttttgacactgctgactcttacggaactggaaggctgaacggacagagcgaacggctactcggtaaattcatccttgagtttgaagggaggattaaatctccagatgatgtggtcatagcaactaagtttgctgcatatccttggcgacttacatcggggcagtttgtcagcgcctgtcttctttggaaagattacaacttgataggctcgggatagggcagctgcattggtctactgctaactatgcacccttgcaggagcgtgccctctgggatggactagttgaaatgtatgaaaagggccttgtaagtgctgtcggtgtcagcaattacgggccgaagcagcttctgaagatccacagctatctagcttctagaggagttcccttgagctcagctcagtcgtacaggttcagttctcgttactgagcatgggtgacgatcagatggagctgaaaagtgtgtgtgattcattgggcattcgcatcatcgcatatagcccgcttggattaggaatgctcactgggaagtatggtgcttctaacctcccaaaaggaccaaggtcagtgctgttccgacaaatccttcctgggctggagcctctgctgtcttgcctgagaaggattgccgaaaagaaggggaagaccatgcctcaggtggccatcaactggtgcatgtgcaagggcacagttcctatcccaggcgtcaaaacggtgaggcatgtccaggagaacctgggcgcgctcggctggaggctgagttctgccgagatctcggagctcgagtccgcagcgatggcggctccgaggaagatgatccagaatgtcttccagactgcctgaccgtgctgaatacatgtgtgtgtatgcatgtttctgcaatcgtctttactgaaaaatctgaaaccgggcagccgtgaaccttttcttctcgtaagattcataatatagatagtcactgccatgttctattagttgtcgtttttgacaaagtttaaataaaacttataaaattttgactataaataaatgttttattatttagtttg

SEQ ID NO: 52917 - DNA, 887 bp, Zea Mays
tctatacatacccatgctccctcacgcaccttcttgcaaagaaatagagatgagctagagggggccggggccgggagagccaagggcccgagggagatggagaaagatgtgaagctatttgcttctgagtggaatgttgtctggttcaaggtcttttgctttgtgatccatctgtgtagagcttctaagtattccttggatctgcaagatctcggaccaggcttcattcccctcagaaatagcttcaaaaatgatatcgcggagagttaggagagctactagctagtgtataaatttgttctagttttttttttgaaatatttgtttgagtgttcgtgagattcctggccgttcttagtagtatgcatggtgtggagcaccgtacttccgctcctggatctttactactactccactgtgcttttttgtttgtttgtttgcttgcttgcttgctgcgaaatcgaggagcagcgcaagattggtgtaatgatggcctgccttttgacccctcctttctctgtgcatctctgtgcatctggcaggcatgcagcagcatatggctttgctgatatctgttgcttatttctaagttcgaggatagtttttgcgtggtgcgctggacctgctgcttcaaagtttttggagagcttgggacgagatccactatttataggcgtgtattttcttcatattatgttgacacccatggaggttgatgtaaacaacgggagctcatgcatgcatgtattcctagagccaacaataataacatgatatataacatcgatgtataataaatataatgctccacatcaggtgtgtgtttgttcttctcatcaggcgtttctgatacatgaggtatacctgttgcctattgatgcaaagca

SEQ ID NO: 52918 - DNA, 3492 bp, Zea Mays
agtctccaagtatcagacaccaaccacagagattccaaagcgaaaatttccagcctgtcttttctgcaaagtttcttctgtcagcaactgctacaaaaggcaatttcagaaagttcaagtcgatttggcaaattgtacacttttagcagattttccacttaaatcaagacaccacacaacttcgctaacagatttgcatgtatgcaagcacagcatgaaacacagactatggcaaacattacgtggaaacatgaaaggaaaaaaaaaggcatttaaatgaaacagttagcaccaacacatgcacacaaatcttggaagatcttgttacagaagaaaatgtttccaaatacttgatctcagttacgtaactaatgttaatgcagcattttggcttttcctttgaattttttcaaccaatgatggacatttttttaaaaaaaaatatttatttcttttacaaattataatttgatcaagatggaagtctttggaaatcccaaaatacaataggaaaacaaatcttgatctagcaggcatataagatttctaaagtggtccttttatggttcagattccatgcactaatgtgattgtgaacactttccagcaaacacggtatttgaaaaaatatactatctcaatatttatcgctcactagttcatttttgaactaaaacacgacaaataaaaaacggagggagtacctgcagataacagaaaattgactagcaatcttctaaccaagaaactatctccatgattgggcttttatgttttttttctctagctgcttctataggtttaaacttataggtgttgagcttaagaaaaggaaccttgtacatgctattcaatattggggacatgcactaaagaagaagatgaacttcagtgcagaactttcaggttaataaatcatttttccactaacagtaaaatttatgaccaaatgattgaaataatataaacattttccccaaattctgcccatgaaacttttgatcatcaatatgactgttaactagacccgtgatcagctttggaggacaaacgcatggattcgactagattcatgcaaagcaatcatttactatcagagcaactccagcaaaaaaaaaactcaaatcaaggcccctacttttgatttgagggaactgtcacataattttttttctcgaacgggtagaagagctgcgcatcattatattaagaaggaagagttaggccccaaatggaccaatacaagaaagctgccttattggccaaaaacacaaaaatataatttaggatttggttttttacatctattccagcagcgaaaaggcctcaagttgagacggtggcttgagtagcactcatgtcctggattcaactcagctagggttaaaaaagttccaccacctatctcacgccaaatcacatgtctaaggcctgggcctactagtggtcgttctcacataggttgtggtgttgtgtatgagtggggctgaggtttggaagttttctcgacctgcgtgagaaaaccatctttttaatgcaatacctaggagttgtcttacccccccccccccagtttaagtttttatatcggcttaaataatatttgatgaacactgacacaaagggctcgcttgtcattctttgttcttcccatcctcagtctcatcagtatttatgcgagcaaaggcagagtcacctaccaaccaccacaggaggtacacttccatcgagggaggagaccagacactaccaggaggagccgtgttgctcctcatccattcgctccgcttcgctcctctcctcatccacccacgctgcgccagctaccgcctaccactcgcacctatctctaagtctctaccatcgcgacgggtaccaggcgactccaggagccacacagctcctccacgtcccccacccacccgtgccgctcctctcttcatcaactcgcgtcgtgccactcctccacgccagctatcgcctacctcattgccgttgcgccgggcgttgagttggccgacgaggagatcgaagaggccttcaacgaggatgatggggcgggttgagaaggtgttggcttcaagccttgaaccatcgtttgagtgctagagggaggatttgggtggccacccaaatttgagggctctagtaagggccatgctggagttgtgtttttggtctgggcacctatatttagctatgagggctcaagttggggccatgatggagttgctctcacagtgactcagcctcctataaccctacaacaatacaatacattaacctagtttaagacaccagaggaattatagaagccaaacaattattctgtgaacaaaatgaatcccttctctccaatcagcaagcatactgttattttatgttaccttccacctttttagcaacatgcacatctatatatcccttcagaatcatatttcgtgcaaaggaaaaatgaggcttgaactgactctatggtttaaaacaaagaagttttatccttctaactaaaaggattaattaatttgtgtaaacccccaaagacctttgcttccttcaatagaacaagtagataagtatcactggcaaaggaaagtcaaagaaaattggaaacgaaggcatatcctgctcataccaagagcaagagtcaagttcaaggattgttatggtaacattgtacaaacagaatgtctttgtgcagaatcattaaaaataacaacaccatctttcagaattcagaaaatcagcaaaatagtaaaaaaagttattatggcactctattaaaggcacatgttgccataactaatatgagagtcattcattttgtatcatgttgaattaggcaacagaaggaaactgtgtaagaagtgtgtataattctgaaagtaaggtatgaaaatagaacattaaggacaatcatggtcattaaattaacaatgtgcacatgaaattagcttggaactccagtaactagggtgcctgcctgacacaaggcttttcccaagtaaaaatgaaatagttgttaactttattacatatcatttccatatctcattaatgttgaacttggggcagacccagtgccagaggctcccacatgagtgaggtctaggaaaaggataaacctaggcaagccttcccctgcaaatctggagaggctacatcaaatatgcgacctagtgactcaatgagacaactctcatcactgcatcattttattcatgttgaacttgaagttgttaaaaatattagcccacgaatgatggctcacttaatctgttcttggtagtagatgccctgtaagtaacaaggtggcaagaaacaataaaatgattgcatcaagcacatgatggaacaacaattgtattaggctgagaatcatattaatgttttatgctttgaagtgccttatatgacacaagtactattcatgcttaacactaacatgctatttttaaatgtaatccactaagagaggatacagaaactacc

SEQ ID NO: 52919 - DNA, 3152 bp, Zea Mays
ccgaccgacgctcgtcgacgcgggtatggggcgagtcggtcttgctcctggcctttctccgtgcgtgccgtcgaggaggacatattggcgtcttccacacttaggttatcttggcgacgaggagttcaggtctgagatattggacaaccaagacccacaacgcgatagcagtcggcatatgctatggagttggtggtggtgttgtgtcgcctcggcgagtccagggctgggaaggcactcgcattctctcgcccttctcggattgacgtctggtacgggtgtctctcggttcggagctgctccgattgggcttctttatccacttgtgtgctctctccgtatatgtatctagcgttatactacttatgtcgcctctagatactcaggtttttgttgtgtccttctccggcaacgaacaggtatgcccgcctcttccattcccttcctgctctacgaaaccttggaagtgggggaggcgagcgatgagggtccctgatttgctgcctatggtacccgttcgatggctcggcatcgcctgtctacatggactttcccttaccacggtgtcaaccacttctatgtatctgtcacacatccttctctcattgcaaaaattattgtgttgtttctctgttgttttgggtgttagttttttgtgctaaggacttaacataatttggatgtgttaatactttatttattgtttgtacgtggtttgtgttcttttatgatggctcatggatcctgcaaaatatgtgttaggatttgaagatccatgcgggcactaccacagagtgtttatcctttgtgttcttggctcttacatgcattatatcgtttctaagaccacattgtcgcaatggactctatggtgtttgaggttgctgaattggacggatcagcagtgatttgtcacgctaacagtaaaaggaaatgttatttgttgattttaaacgttagtaattgctacgaagtaccataatttatatggagcgcatccagtttttattgatgcctgactttagcaacactctatattttgatctatcttttttataagtttgagttcatgtaacttattttagaaatttgagctcacaaactttctcttatttggtttctgtatagtggaattatgtcattctataatctgttcgttcagtcagtcgttgtgaactctcttctaatcgctcccttcattggtcgtgttgtaccaagacatattggatagagtaaacaacatcagttagtcaaataaaaaatatgtggagagcggaaacaatcaataaaaaattttgagatctttttgatggatattttaagtgtcacgagcaacggactagtatatatatatactatacttaaagcaacagtttcaacggtcatcccgcgtcatctttttacaaataaaccttcacatctatttcaaattaacccgttgcacacctatagatggccaaacgacggcccggcacgggccagacgcctcgcgggccacaactctggcctaggcacgtcatatcggcctgctgactgtgccgggacagtccgttagcctgtcggcccatttgattaaatcagcgtaaaatgttaaaaacagtggaggaggtgaaagctgtctaaccaatagaacatcatgctcagatatttttaatattgaatataaattatatatatgtatatacgttttttgtaaaataaaaaatatgtaatcgtgtcggaccgcaccagcactacggcccgaggctacagcccaaacacgacacaacgttcttgactcttgcaagcattaggtcgtttctaagactacactgacgcaatggactccatggtgtttgaggttactaaattgaatggagcaacaatgatttgtcacatgaacagtaaaatgaacggttatttgtttgttttaaacgttagtaattgctacgaagtaacataatttatatggagcgcatccagtttttattgatgtctgactttagcaatcactccatattttgatctatcttttttataagtttgagttcatgtgacttattttagaaacttgagctcacaaattttctcttatttggtctctgtatggtgaaattatatcattttataatctctgttcgttcagtcagtcgttgtgaactctcttctaatcgctcacttcattgaccgtattgtaccaagacatattgaatagagtaaataataacatcagttagccaaatcaaaaaaatattatacggagggcggagacaattaataaaaaatattaaaatctttttgtaggataatttatatagatattgttgtaagccgtcgtaacgcacgggcaaccgactagtatatatatatcgacgagtgtttgttaccgtgtaatcctagtaaatattcttcactagctaggcgatatcgacccaagcagagagcgtcacggcgtggccgtggcctcttcagtcctcggtgtttcaaactaacgatgacaaataaaaaaaagaacggaaagattacatgcacataagatgggcaacaaaactccgtggacctgatgggccagaaagcattctactaggatgggattttggggccgtggatatatcaggcccacagaacgtgttcatttgttcactactgaaaataacaacgcaaaaaaaactctggagattggagagcataaatataaagcattgttccttccaacagatagcggatgtcgtcgctcaaaatgagcactcagccgcccggtcacgcattttcatgtaccagagaggatatacatccacatccgcgagctcctagaggcgttcacttttttccattgcacaaacggacgtcatggcacgggcaatgcacatccgcatccacgaacccctcgttaagggagttaggtccgtgttcatttaaactcaagcattagacatatcccaataaagtgacttcaacaccagacgaattattattaaaaaaatacactagatgaagatacaacttaaagagaaggccagttctgtccagctcgttgaaatttcacatcaaagtgaagaaatggttaaattcccctagaaatcggaaaaccttccaccggagttcgaacaggtgtggatgaatctaggactgtttaactccaaattctaaagtcaatcgttcaactattatac

SEQ ID NO: 52920 - DNA, 1397 bp, Zea Mays
gctgcacccacagtcccacacccactctttcccggatcccgcgcggttcgatccggaggggctggcgaggaggggatcccccggcttgtgaggaggagccccattagcggccgctgccgttaggggcgggactggtacttcctcccttcgatccctgatcatgttctgattggcagtcatcgtcgtggtcgtggcacagtgaaagctaccttgcactcagcttcgaggttcgaatattcggacagcttgccattctattattgttattgttaccctattgaactcagcttggagatgcaagggaggaactgtacatgtcgccagcggctgttactgattgcttaaatggatatctggaagagttgtaatgccctgcggctgttactactcaagtgtgtgctttaggtgacggtaccttttgtgaaaccacggggaatctttgcggacaggatatcctcattttttggtacgaccaaattctgtgagtctgaaacttcagaggtgtccaagacagcaatcacttggagaccgaagccaatttttgagcttggtgaattgttttcagcagagtcgtggtgggcgttggagcattgttttcagcagccggtcctaagccttcacttgctggacagttgctgcttcaaaaggccagtgttgcgcaccatacagcttttgtacaaccgcacaagggcaggaattgtggagggaccaacagtgggcaaaggaaaaaggataccacgtcgagccaatgacgggtcccgacccggcctggacaagaacaaccttggaggtttgctgcagctagcagctgggatggtcctcccaggcacacagcgcagagccagggcagtgctgtctctttcctcccaagaaagaagcttccagatttatctgtgattaacttcgctcttgggtgaaagaggaggatgatgggacagggaggctctgagttgctgggaagctattcatcagttccttcagcggcaagctctaattattcggcgggcttaggacttaggagtcacgtctcggcatgtgattcggtatcggaggtacgcgcgcgagccttctggcttaaccctggcgtgtggtccagcggcacaagccacaagcttctgctagatttgctgttccatctcgcaatcttgaatggctctgcttcatatgttactcgcaagcttgaagagaacaaagccacgaaagaaagaattttttatttgtcgtggtttagtttaaaaaataaactagtggacgacaaatatttatgtagtatatgtttagatggtctccagcaacacgggtgggaccatacgtgtttatctggaccatcattgttaccgtggctcactggcatggagtgtttgaatgcattagatctgatagttagtggttaaaac

SEQ ID NO: 52921 - DNA, 1381 bp, Zea Mays
ctcagacgctgcacccacagtcccacacccactctttcccggatcccgcgcggttcgatccggaggggctggcgaggaggggatcccccggcttgtgaggaggagccccattagcggccgctgccgttaggggcgggactgatcatgttctgattggcagtcatcgtcgtggtcgtggcacagtgaaagctaccttgcactcagcttcgaggttcgaatattcggacagcttgccattctattattgttattgttaccctattgaactcagcttggagatgcaagggaggaactgtacatgtcgccagcggctgttactgattgcttaaatggatatctggaagagttgtaatgccctgcggctgttactactcaagtgtgtgctttaggtgacggtaccttttgtgaaaccacggggaatctttgcggacaggatatcctcattttttggtacgaccaaattctgtgagtctgaaacttcagaggtgtccaagacagcaatcacttggagaccgaagccaatttttgagcttggtgaattgttttcagcagagtcgtggtgggcgttggagcattgttttcagcagccggtcctaagccttcacttgctggacagttgctgcttcaaaaggccagtgttgcgcaccatacagcttttgtacaaccgcacaagggcaggaattgtggagggaccaacagtgggcaaaggaaaaaggataccacgtcgagccaatgacgggtcccgacccggcctggacaagaacaaccttggaggtttgctgcagctagcagctgggatggtcctcccaggcacacagcgcagagccagggcagtgctgtctctttcctcccaagaaagaagcttccagatttatctgtgattaacttcgctcttgggtgaaagaggaggatgatgggacagggaggctctgagttgctgggaagctattcatcagttccttcagcggcaagctctaattattcggcgggcttaggacttaggagtcacgtctcggcatgtgattcggtatcggaggtacgcgcgcgagccttctggcttaaccctggcgtgtggtccagcggcacaagccacaagcttctgctagatttgctgttccatctcgcaatcttgaatggctctgcttcatatgttactcgcaagcttgaagagaacaaagccacgaaagaaagaattttttatttgtcgtggtttagtttaaaaaataaactagtggacgacaaatatttatgtagtatatgtttagatggtctccagcaacacgggtgggaccatacgtgtttatctggaccatcattgttaccgtggctcactggcatggagtgtttgaatgcattagatctgatagttagtggttaaaac

SEQ ID NO: 52922 - DNA, 1035 bp, Zea Mays
caggccaggcctttccgccgaggacttgccgaaccacgaaagcccatcgcgtggtgcttgtgtgctgctcccctcaatccaatcccacggccggcgcgcgcgcgcaggccgcaggcgagcagcgaactctccaagccctcgctcagacgctgcacccacagtcccacacccactctttcccggatcccgcgcggttcgatccggaggggctggcgaggaggggatcccccggcttgtgaggaggagccccattagcggccgctgccgttaggggcgggactggtacttcctcccttcgatccctggtctgcaatgttgccgatgtcgaacccttcagctaatcccacacagcttacaattttctatggtggatcagtatgtgtatgactcggtgccaccagaaaaggctcaggcaatcatgcttatagctgcagctgcggcagctgcggcagccaccaaaggcagtgctgccactgcttttaatcctccaatggtacatacagccactgtcgccccagcagcagtcttctctcctgtgcttacacggtctccatcactgcagagcacttctgtagcagctggacaagctcaggttgttgctgaccctagctcaataagcaagcttcacgctgatctccccattgccaggaggcactctctccagcgcttccttgagaaacgtcgtgacagggtcgtgcgcaaagctccgtatagccccgccaagtcgttcgatggcatggagtcagcgggaatggagatgactgcggacggcaagcagggcgcaaggcccagtatcttgaaaggttggggagccgcgaagtctgaagtctgaacggtgaaagcgtagccccgcgggagcgtggcggtgtctgggaaccgtgagagcacctagaggggggggtgaataggtgatcctgtaaaaacttaacttatagccacaaagacttgttaagggttagcacaataattgccaagtggctaaagaggagatcttgcacaatacgactatcacagagaattcaacacagagtagac

SEQ ID NO: 52923 - DNA, 3262 bp, Zea Mays
aattctcttcaacacgcgcacatgtgacatgccccatggtcgtcgccgctccaggcatcctcccgtggcctcacctccctctcccttcctcctcccacccgtctgacgcctctgacgccgccgcagcagcaacagacgccaacacctccgcgtatgacatccagatcttcgagcccacctccatcgaggagcgtcgtcgcctcctgatccagcggcgtcgcctccgactcgccgcctcccatgcctcgcggctcaccgttgcctcgcgcgtctcctccaaactcatcagcaccactgcctcctgctccagcggcgtcgcatccgatctgccgcctcccctcctcatggctcgtcgttgcctcccgcctcttccccaacctcgcccttgccgcccttggaggatcccaaatccgacgacgagctcagtaggcccacgcagacgcggatgtgctatgaacttcagacaacatattcctaccgagaagtatgaaaagtacacttcagagcatgtcaaggtcctcacgaaagcttcctatcaagtggttgtttgcaagattgacgagttgtaggcaccaaatatatcgagtccttgctatcaacatatgagcatattattgtcaaactcaagcgtcagattctgtatcgatggcaatgggttccagaacagtacacaaggcaatttcaagacggttattcaattgctcaaatagttcaaatgtgatgtgaagtattcaccttttgacatggataaacatcttctctctgttacatttgcaggcgaaagaaggctcatgtgctgcttcgaaaatcagttctaagaaggcaaccagggacaacaaacctgataagggaagaaacatgttctggataaatattggcctttgtttcaagactccaaggtaagccattgaatgtaagtactcaatgtttcttttcttgtccagccaagtagccaagtagttgttgtgtctgttagattagtagcccatatgtatctaaaaagattccaaaggacacataaaaaattgtttgcaataatatagatgtgtgctttagtgcccatagacactgacctgctgccaaatttctagccaagatataactttctgagcactacttaatttatctaaaatgcacgatcgtatatgaagtcaaaataaagtgtgatgcacaaacgaatgtatcccatgagctctacgtttcttttcctatgcaatattattgacatcatttataaaaagctacattttgtgtcagttagcgaacatagaatcctattgacagcttctataataagaaaaatcaataaaagaaatgcttggaaaaatggaatataatttacactcattaaattgtagtaatttccttaccttgatataggtgtttggaaattcttccttcaaatcattcaggcccttttgccaccacgtctctgtcaagtagatggttgtattagcagaaaaagccaacactcctcacgagagccaaaaccttatcagggttagaccagtcttttgttcaagcgtcactggttgtcttacaactcttcttttccaacaagttcgcaaattgattgctaacaccttcccatctgattttttgcacacaacaaaatccacaataacactataaagtgaatatataaatcagaaaaaagatattcccactcatgctcaggcaattattttcaggatatgaatccttctaatttagactataaagtcacccattaggccattacaacttttttactatgcatttatgctttatttatacaccaaaaaaacttcaaaccctcgacaccattcatgcttcatttggtgtatgttttgctactttttccttgaacgtaaaagcattcttctctgatatctgtaactgtaaaaagattattgttctataactatctgttatttattgttccatcgctacctcactacctatttcctatctgatgttttgctataacatcgccatcgctgtgttgttcagacttaagttatgtgatgcttgttctttttagatgtaaatcctacaattttcgcctccaaagtcacccattacaatattttttactgaatctatatcttttacttatgtgtcactctgcattttttaagattcaaaaaaacattccttattttatacgcggtaaaacaacaaccttcataattcaccggatcttcttagtattatctctgacaaaaaaatataaagtctgtccccacaaatgcaaattagtttcttgattttcaattggttgttaaatgtctgacatgagcaatcagtttggttagcataaaaggatggtgattttgacaactacacagtttgtaggaacaacaataaaaacacttcattatatattagggttctatgatgttcaccattcatggcttcctaccagatcacacattgcataaatcaagttctacgctattggttacttttcagagattcagacagaacatttatattctgtttcctggattgagcatattccgttatagaatgtctagaatttttttcaaacttatgcatctgatatgatctctcaatatataagtactgacgaaagaagtgtgatggtcaattccagcccgccaccatccagggatcaatcctcaccacgaggaccaggggtgatgccaacaaggtgacttggatgatagatccgtgttacgataccagcatcaaagccgcctagaagcaatactgaactttcacttgagatgtgagtagttgttgttgggggccttcgtcctccgaaggtcctcaaaaacatgatttgacaatgttttccaagtggattatgtgaacaggtaccttcggactcagaattacgaacatgaagtgcggtcaggacgaagcctgaaccagacgaaggacgggctgattaccaagctccacgaaggatggtgcacagccgaagctgtgcgcagggaagcttcgtcgtgatagcagagaggggaaccgacctaaagataaaaagactacgtgggccttgtcagatttccataagtcattgacaaatgtaatggacataaatgtaattttacgtgggctgcgtcccgcgtctataaatagatgaacagtactctcgtactgttcacgcggacttggcatttgcttttgcgtcacgcttgtactttttatcttctctcaggaccgaaggtacatttgtaatttgaaatcatttctatttttccatgttaataaaatagaaatgattctatgatgatgcttatattatatttcatgc

SEQ ID NO: 52924 - DNA, 1724 bp, Zea Mays
aattctcttcaacacgcgcacatgtgacatgccccatggtcgtcgccgctccaggcatcctcccgtggcctcacctccctctcccttcctcctcccacccgtctgacgcctctgacgccgccgcagcagcaacagacgccaacacctccgcgtatgacatccagatcttcgagcccacctccatcgaggagcgtcgtcgcctcctgatccagcggcgtcgcctccgactcgccgcctcccatgcctcgcggctcaccgttgcctcgcgcgtctcctccaaactcatcagcaccactgcctcctgctccagcggcgtcgcatccgatctgccgcctcccctcctcatggctcgtcgttgcctcccgcctcttccccaacctcgcccttgccgcccttggaggatcccaaatccgacgacgagctcagtaggcccacgcagacgcggatgtgctatgaacttcagacaacatattcctaccgagaagtatgaaaagtacacttcagagcatgtcaaggtcctcacgaaagcttcctatcaagtggttgtttgcaagattgacgagttgtaggcaccaaatatatcgagtccttgctatcaacatatgagcatattattgtcaaacgtcagattctgtatcgatggcaatgggttccagaacagtacacaaggcaatttcaagacggttattcaattgctcaaatagttcaaatgtgatgtgaagtattcaccttttgacatggataaacatcttctctctgttacatttgcaggcgaaagaaggctcatgtgctgcttcgaaaatcagttctaagaaggcaaccagggacaacaaacctgataagggaagaaacatgttctggataaatattggcctttgtttcaagactccaagcccgccaccatccagggatcaatcctcaccacgaggaccaggggtgatgccaacaaggtgtacgtgaacctttcctggggtgttgataatttagctctcgcaaacctgttcactgagcaaggaccatctatgacagtgagaacaagtcaagagggtttgattttttgtcatgtatggttccacagaagagcctgagaatgcattatcgaatctcaatggagctatgagacttggatgatagatccgtgttacgataccagcatcaaagccgcctagaagcaatactgaactttcacttgagatgtgagtagttgttgttgggggccttcgtcctccgaaggtcctcaaaaacatgatttgacaatgttttccaagtggattatgtgaacaggtaccttcggactcagaattacgaacatgaagtgcggtcaggacgaagcctgaaccagacgaaggacgggctgattaccaagctccacgaaggatggtgcacagccgaagctgtgcgcagggaagcttcgtcgtgatagcagagaggggaaccgacctaaagataaaaagactacgtgggccttgtcagatttccataagtcattgacaaatgtaatggacataaatgtaattttacgtgggctgcgtcccgcgtctataaatagatgaacagtactctcgtactgttcacgcggacttggcatttgcttttgcgtcacgcttgtactttttatcttctctcaggaccgaaggtacatttgtaatttgaaatcatttctatttttccatgttaataaaatagaaatgattctatgatgatgcttatattatatttcatgc

SEQ ID NO: 52925 - DNA, 2092 bp, Zea Mays
ctttcctagagttgcaaattctcttcaacacgcgcacatgtgacatgccccatggtcgtcgccgctccaggcatcctcccgtggcctcacctccctctcccttcctcctcccacccgtctgacgcctctgacgccgccgcagcagcaacagacgccaacacctccgcgtatgacatccagatcttcgagcccacctccatcgaggagcgtcgtcgcctcctgatccagcggcgtcgcctccgactcgccgcctcccatgcctcgcggctcaccgttgcctcgcgcgtctcctccaaactcatcagcaccactgcctcctgctccagcggcgtcgcatccgatctgccgcctcccctcctcatggctcgtcgttgcctcccgcctcttccccaacctcgcccttgccgcccttggaggatcccaaatccgacgacgagctcagtaggcccacgcagacgcggatgtgctatgaacttcaggttcgtcttttttcctgtacaccaattatagtcctccagcgcctacgaattttttttgcaaactttatacaagtccttcgctcaacaccgcctttggttgcaacggaagctgctactgttgttgaacgttagttgcttttattagatttatgcattttttttaaattcgagttcaaaattaagcaaaacacacgcttaatcaatttttttgcgttgttttcaactgatatatagacaacatattcctaccgagaagtatgaaaagtacacttcagagcatgtcaaggtcctcacgaaagcttcctatcaagtggttgtttgcaagattgacgagttgtaggcaccaaatatatcgagtccttgctatcaacatatgagcatattattgtcaaagtaggcaacatctcatttaacagacaactctccgctctatcattctctcaaggctgatgtgcatttctgatatattgagctcaagcgtcagattctgtatcgatggcaatgggttccagaacagtacacaaggcaatttcaagacggttattcaattgctcaaatagttcagtaagtgagaacaaagaaacttcctaaatgtattaatatggtatgatgaatagtgtctcacacattgtgttgttgagctctggtctccatttccgtgctgctagaatgtgatgtgaagtattcaccttttgacatggataaacatcttctctctgttacatttgcaggcgaaagaaggtctgttgaagcagcctaaactattttcattgtgatttccaacgctacattttccaatatgcctttgtttcatacatttttccttttttcaaataaggctcatgtgctgcttcgaaaatcagttctaagaaggcaaccagggacaacaaacctgataagggaagaaacatgttctggataaatattggcctttgtttcaagactccaagcccgccaccatccagggatcaatcctcaccacgaggaccaggggtgatgccaacaaggtgacttggatgatagatccgtgttacgataccagcatcaaagccgcctagaagcaatactgaactttcacttgagatgtgagtagttgttgttgggggccttcgtcctccgaaggtcctcaaaaacatgatttgacaatgttttccaagtggattatgtgaacaggtaccttcggactcagaattacgaacatgaagtgcggtcaggacgaagcctgaaccagacgaaggacgggctgattaccaagctccacgaaggatggtgcacagccgaagctgtgcgcagggaagcttcgtcgtgatagcagagaggggaaccgacctaaagataaaaagactacgtgggccttgtcagatttccataagtcattgacaaatgtaatggacataaatgtaattttacgtgggctgcgtcccgcgtctataaatagatgaacagtactctcgtactgttcacgcggacttggcatttgcttttgcgtcacgcttgtactttttatcttctctcaggaccgaaggtacatttgtaatttgaaatcatttctatttttccatgttaataaaatagaaatgattctatgatgatgcttatattatatttcatgc

SEQ ID NO: 52926 - DNA, 3348 bp, Zea Mays
cctttcctttcctagagttgcaaattctcttcaacacgcgcacatgtgacatgccccatggtcgtcgccgctccaggcatcctcccgtggcctcacctccctctcccttcctcctcccacccgtctgacgcctctgacgccgccgcagcagcaacagacgccaacacctccgcgtatgacatccagatcttcgagcccacctccatcgaggagcgtcgtcgcctcctgatccagcggcgtcgcctccgactcgccgcctcccatgcctcgcggctcaccgttgcctcgcgcgtctcctccaaactcatcagcaccactgcctcctgctccagcggcgtcgcatccgatctgccgcctcccctcctcatggctcgtcgttgcctcccgcctcttccccaacctcgcccttgccgcccttggaggatcccaaatccgacgacgagctcagtaggcccacgcagacgcggatgtgctatgaacttcagacaacatattcctaccgagaagtatgaaaagtacacttcagagcatgtcaaggtcctcacgaaagcttcctatcaagtggttgtttgcaagattgacgagttgtaggcaccaaatatatcgagtccttgctatcaacatatgagcatattattgtcaaaattctgtatcgatggcaatgggttccagaacagtacacaaggcaatttcaagacggttattcaattgctcaaatagttcaaatgtgatgtgaagtattcaccttttgacatggataaacatcttctctctgttacatttgcaggcgaaagaaggctcatgtgctgcttcgaaaatcagttctaagaaggcaaccagggacaacaaacctgataagggaagaaacatgttctggataaatattggcctttgtttcaagactccaaggtaagccattgaatgtaagtactcaatgtttcttttcttgtccagccaagtagccaagtagttgttgtgtctgttagattagtagcccatatgtatctaaaaagattccaaaggacacataaaaaattgtttgcaataatatagatgtgtgctttagtgcccatagacactgacctgctgccaaatttctagccaagatataactttctgagcactacttaatttatctaaaatgcacgatcgtatatgaagtcaaaataaagtgtgatgcacaaacgaatgtatcccatgagctctacgtttcttttcctatgcaatattattgacatcatttataaaaagctacattttgtgtcagttagcgaacatagaatcctattgacagcttctataataagaaaaatcaataaaagaaatgcttggaaaaatggaatataatttacactcattaaattgtagtaatttccttaccttgatataggtgtttggaaattcttccttcaaatcattcaggcccttttgccaccacgtctctgtcaagtagatggttgtattagcagaaaaagccaacactcctcacgagagccaaaaccttatcagggttagaccagtcttttgttcaagcgtcactggttgtcttacaactcttcttttccaacaagttcgcaaattgattgctaacaccttcccatctgattttttgcacacaacaaaatccacaataacactataaagtgaatatataaatcagaaaaaagatattcccactcatgctcaggcaattattttcaggatatgaatccttctaatttagactataaagtcacccattaggccattacaacttttttactatgcatttatgctttatttatacaccaaaaaaacttcaaaccctcgacaccattcatgcttcatttggtgtatgttttgctactttttccttgaacgtaaaagcattcttctctgatatctgtaactgtaaaaagattattgttctataactatctgttatttattgttccatcgctacctcactacctatttcctatctgatgttttgctataacatcgccatcgctgtgttgttcagacttaagttatgtgatgcttgttctttttagatgtaaatcctacaattttcgcctccaaagtcacccattacaatattttttactgaatctatatcttttacttatgtgtcactctgcattttttaagattcaaaaaaacattccttattttatacgcggtaaaacaacaaccttcataattcaccggatcttcttagtattatctctgacaaaaaaatataaagtctgtccccacaaatgcaaattagtttcttgattttcaattggttgttaaatgtctgacatgagcaatcagtttggttagcataaaaggatggtgattttgacaactacacagtttgtaggaacaacaataaaaacacttcattatatattagggttctatgatgttcaccattcatggcttcctaccagatcacacattgcataaatcaagttctacgctattggttacttttcagagattcagacagaacatttatattctgtttcctggattgagcatattccgttatagaatgtctagaatttttttcaaacttatgcatctgatatgatctctcaatatataagtactgacgaaagaagtgtgatggtcaattccagcccgccaccatccagggatcaatcctcaccacgaggaccaggggtgatgccaacaaggtgtacgtgaacctttcctggggtgttgataatttagctctcgcaaacctgttcactgagcaaggaccatctatgacagacttggatgatagatccgtgttacgataccagcatcaaagccgcctagaagcaatactgaactttcacttgagatgtgagtagttgttgttgggggccttcgtcctccgaaggtcctcaaaaacatgatttgacaatgttttccaagtggattatgtgaacaggtaccttcggactcagaattacgaacatgaagtgcggtcaggacgaagcctgaaccagacgaaggacgggctgattaccaagctccacgaaggatggtgcacagccgaagctgtgcgcagggaagcttcgtcgtgatagcagagaggggaaccgacctaaagataaaaagactacgtgggccttgtcagatttccataagtcattgacaaatgtaatggacataaatgtaattttacgtgggctgcgtcccgcgtctataaatagatgaacagtactctcgtactgttcacgcggacttggcatttgcttttgcgtcacgcttgtactttttatcttctctcaggaccgaaggtacatttgtaatttgaaatcatttctatttttccatgttaataaaatagaaatgattctatgatgatgcttatattatatttcatgc

SEQ ID NO: 52927 - DNA, 3633 bp, Zea Mays
ctttcctttcctttcctttcctagagttgcaaattctcttcaacacgcgcacatgtgacatgccccatggtcgtcgccgctccaggcatcctcccgtggcctcacctccctctcccttcctcctcccacccgtctgacgcctctgacgccgccgcagcagcaacagacgccaacacctccgcgtatgacatccagatcttcgagcccacctccatcgaggagcgtcgtcgcctcctgatccagcggcgtcgcctccgactcgccgcctcccatgcctcgcggctcaccgttgcctcgcgcgtctcctccaaactcatcagcaccactgcctcctgctccagcggcgtcgcatccgatctgccgcctcccctcctcatggctcgtcgttgcctcccgcctcttccccaacctcgcccttgccgcccttggaggatcccaaatccgacgacgagctcagtaggcccacgcagacgcggatgtgctatgaacttcaggttcgtcttttttcctgtacaccaattatagtcctccagcgcctacgaattttttttgcaaactttatacaagtccttcgctcaacaccgcctttggttgcaacggaagctgctactgttgttgaacgttagttgcttttattagatttatgcattttttttaaattcgagttcaaaattaagcaaaacacacgcttaatcaatttttttgcgttgttttcaactgatatatagacaacatattcctaccgagaagtatgaaaagtacacttcagagcatgtcaaggtcctcacgaaagcttcctatcaagtggttgtttgcaagattgacgagttgtaggcaccaaatatatcgagtccttgctatcaacatatgagcatattattgtcaaagtaggcaacatctcatttaacagacaactctccgctctatcattctctcaaggctgatgtgcatttctgatatattgagctcaagcgtcagattctgtatcgatggcaatgggttccagaacagtacacaaggcaatttcaagacggttattcaattgctcaaatagttcactctggtctccatttccgtgctgctagaatgtgatgtgaagtattcaccttttgacatggataaacatcttctctctgttacatttgcaggcgaaagaaggctcatgtgctgcttcgaaaatcagttctaagaaggcaaccagggacaacaaacctgataagggaagaaacatgttctggataaatattggcctttgtttcaagactccaaggtaagccattgaatgtaagtactcaatgtttcttttcttgtccagccaagtagccaagtagttgttgtgtctgttagattagtagcccatatgtatctaaaaagattccaaaggacacataaaaaattgtttgcaataatatagatgtgtgctttagtgcccatagacactgacctgctgccaaatttctagccaagatataactttctgagcactacttaatttatctaaaatgcacgatcgtatatgaagtcaaaataaagtgtgatgcacaaacgaatgtatcccatgagctctacgtttcttttcctatgcaatattattgacatcatttataaaaagctacattttgtgtcagttagcgaacatagaatcctattgacagcttctataataagaaaaatcaataaaagaaatgcttggaaaaatggaatataatttacactcattaaattgtagtaatttccttaccttgatataggtgtttggaaattcttccttcaaatcattcaggcccttttgccaccacgtctctgtcaagtagatggttgtattagcagaaaaagccaacactcctcacgagagccaaaaccttatcagggttagaccagtcttttgttcaagcgtcactggttgtcttacaactcttcttttccaacaagttcgcaaattgattgctaacaccttcccatctgattttttgcacacaacaaaatccacaataacactataaagtgaatatataaatcagaaaaaagatattcccactcatgctcaggcaattattttcaggatatgaatccttctaatttagactataaagtcacccattaggccattacaacttttttactatgcatttatgctttatttatacaccaaaaaaacttcaaaccctcgacaccattcatgcttcatttggtgtatgttttgctactttttccttgaacgtaaaagcattcttctctgatatctgtaactgtaaaaagattattgttctataactatctgttatttattgttccatcgctacctcactacctatttcctatctgatgttttgctataacatcgccatcgctgtgttgttcagacttaagttatgtgatgcttgttctttttagatgtaaatcctacaattttcgcctccaaagtcacccattacaatattttttactgaatctatatcttttacttatgtgtcactctgcattttttaagattcaaaaaaacattccttattttatacgcggtaaaacaacaaccttcataattcaccggatcttcttagtattatctctgacaaaaaaatataaagtctgtccccacaaatgcaaattagtttcttgattttcaattggttgttaaatgtctgacatgagcaatcagtttggttagcataaaaggatggtgattttgacaactacacagtttgtaggaacaacaataaaaacacttcattatatattagggttctatgatgttcaccattcatggcttcctaccagatcacacattgcataaatcaagttctacgctattggttacttttcagagattcagacagaacatttatattctgtttcctggattgagcatattccgttatagaatgtctagaatttttttcaaacttatgcatctgatatgatctctcaatatataagtactgacgaaagaagtgtgatggtcaattccagcccgccaccatccagggatcaatcctcaccacgaggaccaggggtgatgccaacaaggtgacttggatgatagatccgtgttacgataccagcatcaaagccgcctagaagcaatactgaactttcacttgagatgtgagtagttgttgttgggggccttcgtcctccgaaggtcctcaaaaacatgatttgacaatgttttccaagtggattatgtgaacaggtaccttcggactcagaattacgaacatgaagtgcggtcaggacgaagcctgaaccagacgaaggacgggctgattaccaagctccacgaaggatggtgcacagccgaagctgtgcgcagggaagcttcgtcgtgatagcagagaggggaaccgacctaaagataaaaagactacgtgggccttgtcagatttccataagtcattgacaaatgtaatggacataaatgtaattttacgtgggctgcgtcccgcgtctataaatagatgaacagtactctcgtactgttcacgcggacttggcatttgcttttgcgtcacgcttgtactttttatcttctctcaggaccgaaggtacatttgtaatttgaaatcatttctatttttccatgttaataaaatagaaatgattctatgatgatgcttatattatatttcatgc

SEQ ID NO: 52928 - DNA, 1599 bp, Zea Mays
atcgaccacctcctttcctttcctttcctttcctagagttgcaaattctcttcaacacgcgcacatgtgacatgccccatggtcgtcgccgctccaggcatcctcccgtggcctcacctccctctcccttcctcctcccacccgtctgacgcctctgacgccgccgcagcagcaacagacgccaacacctccgcgtatgacatccagatcttcgagcccacctccatcgaggagcgtcgtcgcctcctgatccagcggcgtcgcctccgactcgccgcctcccatgcctcgcggctcaccgttgcctcgcgcgtctcctccaaactcatcagcaccactgcctcctgctccagcggcgtcgcatccgatctgccgcctcccctcctcatggctcgtcgttgcctcccgcctcttccccaacctcgcccttgccgcccttggaggatcccaaatccgacgacgagctcagtaggcccacgcagacgcggatgtgctatgaacttcagacaacatattcctaccgagaagtatgaaaagtacacttcagagcatgtcaaggtcctcacgaaagcttcctatcaagtggttgtttgcaagattgacgagttgtaggcaccaaatatatcgagtccttgctatcaacatatgagcatattattgtcaaacgtcagattctgtatcgatggcaatgggttccagaacagtacacaaggcaatttcaagacggttattcaattgctcaaatagttcaaatgtgatgtgaagtattcaccttttgacatggataaacatcttctctctgttacatttgcaggcgaaagaaggctcatgtgctgcttcgaaaatcagttctaagaaggcaaccagggacaacaaacctgataagggaagaaacatgttctggataaatattggcctttgtttcaagactccaagcccgccaccatccagggatcaatcctcaccacgaggaccaggggtgatgccaacaaggtgacttggatgatagatccgtgttacgataccagcatcaaagccgcctagaagcaatactgaactttcacttgagatgtgagtagttgttgttgggggccttcgtcctccgaaggtcctcaaaaacatgatttgacaatgttttccaagtggattatgtgaacaggtaccttcggactcagaattacgaacatgaagtgcggtcaggacgaagcctgaaccagacgaaggacgggctgattaccaagctccacgaaggatggtgcacagccgaagctgtgcgcagggaagcttcgtcgtgatagcagagaggggaaccgacctaaagataaaaagactacgtgggccttgtcagatttccataagtcattgacaaatgtaatggacataaatgtaattttacgtgggctgcgtcccgcgtctataaatagatgaacagtactctcgtactgttcacgcggacttggcatttgcttttgcgtcacgcttgtactttttatcttctctcaggaccgaaggtacatttgtaatttgaaatcatttctatttttccatgttaataaaatagaaatgattctatgatgatgcttatattatatttcatgc

SEQ ID NO: 52929 - DNA, 3779 bp, Zea Mays
ctaaaatcatgctagccactcgatagccatcgcacgggacaaatgcgccctttcggattcacacgacgcgaagcttctggactaatcgaccacctcctttcctttcctttcctttcctagagttgcaaattctcttcaacacgcgcacatgtgacatgccccatggtcgtcgccgctccaggcatcctcccgtggcctcacctccctctcccttcctcctcccacccgtctgacgcctctgacgccgccgcagcagcaacagacgccaacacctccgcgtatgacatccagatcttcgagcccacctccatcgaggagcgtcgtcgcctcctgatccagcggcgtcgcctccgactcgccgcctcccatgcctcgcggctcaccgttgcctcgcgcgtctcctccaaactcatcagcaccactgcctcctgctccagcggcgtcgcatccgatctgccgcctcccctcctcatggctcgtcgttgcctcccgcctcttccccaacctcgcccttgccgcccttggaggatcccaaatccgacgacgagctcagtaggcccacgcagacgcggatgtgctatgaacttcaggttcgtcttttttcctgtacaccaattatagtcctccagcgcctacgaattttttttgcaaactttatacaagtccttcgctcaacaccgcctttggttgcaacggaagctgctactgttgttgaacgttagttgcttttattagatttatgcattttttttaaattcgagttcaaaattaagcaaaacacacgcttaatcaatttttttgcgttgttttcaactgatatatagacaacatattcctaccgagaagtatgaaaagtacacttcagagcatgtcaaggtcctcacgaaagcttcctatcaagtggttgtttgcaagattgacgagttgtaggcaccaaatatatcgagtccttgctatcaacatatgagcatattattgtcaaaattctgtatcgatggcaatgggttccagaacagtacacaaggcaatttcaagacggttattcaattgctcaaatagttcaaatgtgatgtgaagtattcaccttttgacatggataaacatcttctctctgttacatttgcaggcgaaagaaggctcatgtgctgcttcgaaaatcagttctaagaaggcaaccagggacaacaaacctgataagggaagaaacatgttctggataaatattggcctttgtttcaagactccaaggtaagccattgaatgtaagtactcaatgtttcttttcttgtccagccaagtagccaagtagttgttgtgtctgttagattagtagcccatatgtatctaaaaagattccaaaggacacataaaaaattgtttgcaataatatagatgtgtgctttagtgcccatagacactgacctgctgccaaatttctagccaagatataactttctgagcactacttaatttatctaaaatgcacgatcgtatatgaagtcaaaataaagtgtgatgcacaaacgaatgtatcccatgagctctacgtttcttttcctatgcaatattattgacatcatttataaaaagctacattttgtgtcagttagcgaacatagaatcctattgacagcttctataataagaaaaatcaataaaagaaatgcttggaaaaatggaatataatttacactcattaaattgtagtaatttccttaccttgatataggtgtttggaaattcttccttcaaatcattcaggcccttttgccaccacgtctctgtcaagtagatggttgtattagcagaaaaagccaacactcctcacgagagccaaaaccttatcagggttagaccagtcttttgttcaagcgtcactggttgtcttacaactcttcttttccaacaagttcgcaaattgattgctaacaccttcccatctgattttttgcacacaacaaaatccacaataacactataaagtgaatatataaatcagaaaaaagatattcccactcatgctcaggcaattattttcaggatatgaatccttctaatttagactataaagtcacccattaggccattacaacttttttactatgcatttatgctttatttatacaccaaaaaaacttcaaaccctcgacaccattcatgcttcatttggtgtatgttttgctactttttccttgaacgtaaaagcattcttctctgatatctgtaactgtaaaaagattattgttctataactatctgttatttattgttccatcgctacctcactacctatttcctatctgatgttttgctataacatcgccatcgctgtgttgttcagacttaagttatgtgatgcttgttctttttagatgtaaatcctacaattttcgcctccaaagtcacccattacaatattttttactgaatctatatcttttacttatgtgtcactctgcattttttaagattcaaaaaaacattccttattttatacgcggtaaaacaacaaccttcataattcaccggatcttcttagtattatctctgacaaaaaaatataaagtctgtccccacaaatgcaaattagtttcttgattttcaattggttgttaaatgtctgacatgagcaatcagtttggttagcataaaaggatggtgattttgacaactacacagtttgtaggaacaacaataaaaacacttcattatatattagggttctatgatgttcaccattcatggcttcctaccagatcacacattgcataaatcaagttctacgctattggttacttttcagagattcagacagaacatttatattctgtttcctggattgagcatattccgttatagaatgtctagaatttttttcaaacttatgcatctgatatgatctctcaatatataagtactgacgaaagaagtgtgatggtcaattccagcccgccaccatccagggatcaatcctcaccacgaggaccaggggtgatgccaacaaggtgtacgtgaacctttcctggggtgttgataatttagctctcgcaaacctgttcactgagcaaggaccatctatgacagtgagaacaagtcaagagggtttgattttttgtcatgtatggttccacagaagagcctgagaatgcattatcgaatctcaatggagctatgagacttggatgatagatccgtgttacgataccagcatcaaagccgcctagaagcaatactgaactttcacttgagatgtgagtagttgttgttgggggccttcgtcctccgaaggtcctcaaaaacatgatttgacaatgttttccaagtggattatgtgaacaggtaccttcggactcagaattacgaacatgaagtgcggtcaggacgaagcctgaaccagacgaaggacgggctgattaccaagctccacgaaggatggtgcacagccgaagctgtgcgcagggaagcttcgtcgtgatagcagagaggggaaccgacctaaagataaaaagactacgtgggccttgtcagatttccataagtcattgacaaatgtaatggacataaatgtaattttacgtgggctgcgtcccgcgtctataaatagatgaacagtactctcgtactgttcacgcggacttggcatttgcttttgcgtcacgcttgtactttttatcttctctcaggaccgaaggtacatttgtaatttgaaatcatttctatttttccatgttaataaaatagaaatgattctatgatgatgcttatattatatttcatgc

SEQ ID NO: 52930 - DNA, 3586 bp, Zea Mays
aagcagcaaggaaacgcagccaaagaacctatccacgtcatctaaaatcatgctagccactcgatagccatcgcacgggacaaatgcgccctttcggattcacacgacgcgaagcttctggactaatcgaccacctcctttcctttcctttcctttcctagagttgcaaattctcttcaacacgcgcacatgtgacatgccccatggtcgtcgccgctccaggcatcctcccgtggcctcacctccctctcccttcctcctcccacccgtctgacgcctctgacgccgccgcagcagcaacagacgccaacacctccgcgtatgacatccagatcttcgagcccacctccatcgaggagcgtcgtcgcctcctgatccagcggcgtcgcctccgactcgccgcctcccatgcctcgcggctcaccgttgcctcgcgcgtctcctccaaactcatcagcaccactgcctcctgctccagcggcgtcgcatccgatctgccgcctcccctcctcatggctcgtcgttgcctcccgcctcttccccaacctcgcccttgccgcccttggaggatcccaaatccgacgacgagctcagtaggcccacgcagacgcggatgtgctatgaacttcagacaacatattcctaccgagaagtatgaaaagtacacttcagagcatgtcaaggtcctcacgaaagcttcctatcaagtggttgtttgcaagattgacgagttgtaggcaccaaatatatcgagtccttgctatcaacatatgagcatattattgtcaaaattctgtatcgatggcaatgggttccagaacagtacacaaggcaatttcaagacggttattcaattgctcaaatagttcaaatgtgatgtgaagtattcaccttttgacatggataaacatcttctctctgttacatttgcaggcgaaagaaggctcatgtgctgcttcgaaaatcagttctaagaaggcaaccagggacaacaaacctgataagggaagaaacatgttctggataaatattggcctttgtttcaagactccaaggtaagccattgaatgtaagtactcaatgtttcttttcttgtccagccaagtagccaagtagttgttgtgtctgttagattagtagcccatatgtatctaaaaagattccaaaggacacataaaaaattgtttgcaataatatagatgtgtgctttagtgcccatagacactgacctgctgccaaatttctagccaagatataactttctgagcactacttaatttatctaaaatgcacgatcgtatatgaagtcaaaataaagtgtgatgcacaaacgaatgtatcccatgagctctacgtttcttttcctatgcaatattattgacatcatttataaaaagctacattttgtgtcagttagcgaacatagaatcctattgacagcttctataataagaaaaatcaataaaagaaatgcttggaaaaatggaatataatttacactcattaaattgtagtaatttccttaccttgatataggtgtttggaaattcttccttcaaatcattcaggcccttttgccaccacgtctctgtcaagtagatggttgtattagcagaaaaagccaacactcctcacgagagccaaaaccttatcagggttagaccagtcttttgttcaagcgtcactggttgtcttacaactcttcttttccaacaagttcgcaaattgattgctaacaccttcccatctgattttttgcacacaacaaaatccacaataacactataaagtgaatatataaatcagaaaaaagatattcccactcatgctcaggcaattattttcaggatatgaatccttctaatttagactataaagtcacccattaggccattacaacttttttactatgcatttatgctttatttatacaccaaaaaaacttcaaaccctcgacaccattcatgcttcatttggtgtatgttttgctactttttccttgaacgtaaaagcattcttctctgatatctgtaactgtaaaaagattattgttctataactatctgttatttattgttccatcgctacctcactacctatttcctatctgatgttttgctataacatcgccatcgctgtgttgttcagacttaagttatgtgatgcttgttctttttagatgtaaatcctacaattttcgcctccaaagtcacccattacaatattttttactgaatctatatcttttacttatgtgtcactctgcattttttaagattcaaaaaaacattccttattttatacgcggtaaaacaacaaccttcataattcaccggatcttcttagtattatctctgacaaaaaaatataaagtctgtccccacaaatgcaaattagtttcttgattttcaattggttgttaaatgtctgacatgagcaatcagtttggttagcataaaaggatggtgattttgacaactacacagtttgtaggaacaacaataaaaacacttcattatatattagggttctatgatgttcaccattcatggcttcctaccagatcacacattgcataaatcaagttctacgctattggttacttttcagagattcagacagaacatttatattctgtttcctggattgagcatattccgttatagaatgtctagaatttttttcaaacttatgcatctgatatgatctctcaatatataagtactgacgaaagaagtgtgatggtcaattccagcccgccaccatccagggatcaatcctcaccacgaggaccaggggtgatgccaacaaggtgtacgtgaacctttcctggggtgttgataatttagctctcgcaaacctgttcactgagcaaggaccatctatgacagtgagaacaagtcaagagggtttgattttttgtcatgtatggttccacagaagagcctgagaatgcattatcgaatctcaatggagctatgagacttggatgatagatccgtgttacgataccagcatcaaagccgcctagaagcaatactgaactttcacttgagatgtgagtagttgttgttgggggccttcgtcctccgaaggtcctcaaaaacatgatttgacaatgttttccaagtggattatgtgaacaggtaccttcggactcagaattacgaacatgaagtgcggtcaggacgaagcctgaaccagacgaaggacgggctgattaccaagctccacgaaggatggtgcacagccgaagctgtgcgcagggaagcttcgtcgtgatagcagagaggggaaccgacctaaagataaaaagactacgtgggccttgtcagatttccataagtcattgacaaatgtaatggacataaatgtaattttacgtgggctgcgtcccgcgtctataaatagatgaacagtactctcgtactgttcacgcggacttggcatttgcttttgcgtcacgcttgtactttttatcttctctcaggaccgaaggtacatttgtaatttgaaatcatttctatttttccatgttaataaaatagaaatgattctatgatgatgcttatattatatttcatgc

SEQ ID NO: 52931 - DNA, 5309 bp, Zea Mays
cccacctctcgcagtcctgtacctaccaaccacatcatattcgggtccgtgagcccgtgggagaccgcgcggcggcgacgacgaggcctcgacctcgagcgagggttggtggacgtcgacgagctagggttaggcgggcttttgagcttaagcttgggttgggggggcctgctgatccatggacggggggaccggcccgggcgccgaggtgctctctcccggcgaggccgagtggcccccagagctccgcctcccgccgctgccctccgtgccggagcccccagggccgcccccgcccgcccccgcctccgcttcgctgcgactgcgaagcgtcggggtcgcgccccatctgcacggggaggtctttgatgatgacccgcagttcctcggatcgatcatgggggccgcggccccgcccccgccccagcagcagcagcagcagcccgccgccgcggcaccggtgaagaggaagagaggcaggccgccgaagaacagggacggtgcggcgccggtgcctgcgccggtgaagccggggaacaagaaggacgaggaggaggtctgcttcatctgcttcgatgggggcagcctcgtggtttgcgaccggagggcaagtgggattgtggttggcacatatgcagcagctgcgaaaaggcagtacagtacatgtgttatacttgtacgtactctgtctgcaaaggatgcatcaaacaaggcaaattctttggcgttagagggaacaagggcttctgtgacacatgttatggtactatattattgatagaatccaaagaagatggtgcaaaggttggtgttgattttgatgatatatatagctgggagtaccttttcaagttatattggttggatctgaaagggaagcatttactaacgattgaagagctaaaaagtgccaagagccattggattgttcctactactgctggtagaagagagaaagaggagtcatctgatgaattatatgatgcaagcaatggccaagatgctacttttgacatttcgtcaaagaaacgaatacagaataactcttcaggaaaaagaggacaaaaacgcaaaaaagacggcaacattacttcaaggaaatgtggaatctcaattaacagtgctggaggcttaccaaatggatcaacaggtgaagggatggccttggctggtgacaaaaactgggcatcatctgagttattggaattcattggacacatgagaaatggtgataattcttatatttcccagtttgatgtccaggttcttttgcttgaatatataaagcaaaataacctccatgatcctcgcagaaaaagtcagattatatgtgatgcaaggcttagcaatttgtttaaaaaaccacgtgtcgatcattttgagatgttaaagcttttggagatgcattatcttgtgaaacaggcttcaacaccgaatgcagacagtcaaagagcaatttattcagattcagctcaagtaaataatggaggacataatgagttggccgatacattaggttttgataggaggaaggctcataagaagattgaaagagaattgacaattaatccagaagattatgcagccattgacatgcacaatatcaatctaatttacttgcggcgcagtgtgatggaggatcttattgatcaggttgctgcattttctaacaaaattgctggtgcttttgtgaggataagaatttctggtcttggcaacaaggaagatatgtaccgactggtgaaagttcttggtacgcataaagttgcagagcgatacactgtcagtaagaagacaacagattatgctcttgagatatctaatttagaaaagaaagagattatcacaatggatacgatttcaaatcaggatttcacagaggaggaatgcaaacgattacgtcagagtatgaagtttggtctaactgcccggttaaaagtggtagatgtctatgagaaagctaaaatcttccaatctctgcgatttaaagatcttctgaacacccctgaagaaaaggaacgcatgattaatgaagttccagaagtacatgttgattcccggatggatccaagttatgaatccgctgaagaaccagagtataagaaagctgttgattggaccatgcatcggaatgggccagatctattatttccaggaagaaaagggacagaattgaattctgtggagaatcatacacaaaagagtctggatacaagcagtctacctacagaggacgtggaccatagatcaggtgcaggaagtaacattaatttaaacaacatggcacctgagcctgcatcacttggaattttatcaaatgacactgagccagaaaaggtttggcactacaaggaccctaatggaaatgttcagggcccgtttactcttttgcagttatccaagtgggcaagttttttcccacgcgacctgagagtatggcttacatttgagagtgaggagaactcactactgttgactgaagtgctcccaaagcagcagaaagattttattcagctttcaacagttactaccagtgataaatcaatgtgggcaggctctggtcaagatagagttaactcaaatgcaaataactcttcctcccctatgggttataacatggtctatccttctgcattatctagcccgtctgctgagtgttatgatccaacaaaagatctaaagcctctgggtggaacttcgccatcacgatctctgaaagatgctcatgctttgcatgaggttcagaatcaggttaactattcattcacaattctatcttcaactggttcatatgcaccacccggttctcatgatggaagggtttcaagagacagggttgatgaatggaacagtagtcaggacaatggtggtatttggaggccaaccatgaattctagtcagaagactaatgcacagcagcatcctgatggttgtactgggaaggacctaatgcaaactgaatctaaatgtagttcacatttggtctcagttcttacttcacaacactctgagagagaccctgccacttcccttagtactacaagttggccggtgttcagaaccaggtgccagcaggaaggttcttcatggacttcagctacaaatgctggagctcatgaccttcagttatctattgctttagcaaagccggagacctgttctccaacaaatcctgtggaagacagagattcaagttctgcttctgctttgtcttgtcagtctggggctcctgtctgcgttccccaaccagatccaacatctacatctaattcaaggaagattgatgcaaccatggatcagcatagaacatgccagcctgacacatcaagtgtatcatttgatcttcttcatgagcctaaaagtggctcactcttttccttgaaaactcaagatcttgagtttgagtaccctagtcctatcccaaaacaggaggggaaggggatttctgtgaaccagtcaggctcaacatcagtagcacatgagaatttagctacaaagacatgtgtccgcgcacctactagcaaaattgatagcttacaaccacttaaggaaagatcacattcgacagatagggactcaatcactcaattagagcatctgtttgaagagaatgtgataaagagaaataacaaagtggtcaatcctgtatctgatgctgaagggattgctgtatcagatgtgttggaatccttaacagaacaagattgtgaaaaatgtagtatacatggggtagcgccttcacaaaaaatggtgccagcttcagctgaggaagatcaaccacaatgctccagtcctattgcattgtccccttggggtgaaccaagttactatcagggtgaagctgttgattctgctctatggggcgtccaagatgaccctggtaatgacatgtggtcaatgccttctccaaaacctggtttccagccctcatcaggtcttggagctgatggcaaagacgcttcatgcatcatagaggaggcgagagcggacccaggagatggtgcttttgtcaaaacattaccaacacaaggggagaaaaagatggaacatggaaattcaagtgcctcaggttctggagtgtcagaacgggtaaaaccaaaaggaagcgctgcatcaggtccatctctagatgggagcacaaaagttatgggttggcaactgccgggctcatctctagagggcagtgcaaaagtttcaggttggaaaccaccagtcttatcacttgaagggattgctaatggttcaggttcacaagcatcgtgtccttctacgcaaaggggcacaaaatcttcaggttggcagcgatcaagttcatccccggatgggagcagaaaagcctcaggttggcaacagtcaagtacatcaccagaggggagtggaaaagcgcatggctggcaacgatcaggatcttttacccaggggggtacaaaggctgcaggtcggcaaccctctcgttcctgtacagatcggattgcaaaagttgatggctggcaacgaacaagttcatctccggagggaagcagaaaagcttcaggctggcattcgtcgggtcgtgacagctcaaagatcgcatccagtgccagcgaaaaccgtaaattgtcttctagtcaccaagcgacgacaccaacagggaggcactcgttggcaaagagacagggaagcagcgacaagggtgctgctggttgggacgaggctctggggaactcttcggaagcatcgaagagacaacagggaaacagcgacaagaatgcaggctcgggagtggctctcggaagcaacaggagctggcatccatcgtctggtaaccctagtcggggcggccaggggaatcaccaacatgacagggactctcacagcggtgattcgcggcggggtagctcgaactacccccggaggtccgacaatcgtcatgaccatggcagtggtggttcgtcacgaccctcgtcaagagggcagtcccagagggggctatgtaaacactacgagagtggccactgcgggaagggttcgaaatgccagtacctgcaccggtgatcgccgtggccgtgtggaagcgggacccctgtttgcctggccgtcctcacatttttgtatagcaggatgtggtttcgtcgtagtcagtatagtagaacgcttattaaccgtgtcggcaccactaagttggtagtagtacatatctttcagggcaggagcatgactaaagtaggatttgtaagttttattagagccactgatggccttggataaagattctccgctttttggttcgggaatgcacgctttttgttcagctaaacggagttgtgggc

SEQ ID NO: 52932 - DNA, 5315 bp, Zea Mays
cccacctctcgcagtcctgtacctaccaaccacatcatattcgggtccgtgagcccgtgggagaccgcgcggcggcgacgacgaggcctcgacctcgagcgagggttggtggacgtcgacgagctagggttaggcgggcttttgagcttaagcttgggttgggggggcctgctgatccatggacggggggaccggcccgggcgccgaggtgctctctcccggcgaggccgagtggcccccagagctccgcctcccgccgctgccctccgtgccggagcccccagggccgcccccgcccgcccccgcctccgcttcgctgcgactgcgaagcgtcggggtcgcgccccatctgcacggggaggtctttgatgatgacccgcagttcctcggatcgatcatgggggccgcggccccgcccccgccccagcagcagcagcagcagcccgccgccgcggcaccggtgaagaggaagagaggcaggccgccgaagaacagggacggtgcggcgccggtgcctgcgccggtgaagccggggaacaagaaggacgaggaggaggtctgcttcatctgcttcgatgggggcagcctcgtggtttgcgaccggagggcaagtgggattgtggttggcacatatgcagcagctgcgaaaaggcagtacagtacatgtgttatacttgtacgtactctgtctgcaaaggatgcatcaaacaaggcaaattctttggcgttagagggaacaagggcttctgtgacacatgttatggtactatattattgatagaatccaaagaagatggtgcaaaggttggtgttgattttgatgatatatatagctgggagtaccttttcaagttatattggttggatctgaaagggaagcatttactaacgattgaagagctaaaaagtgccaagagccattggattgttcctactactgctggtagaagagagaaagaggagtcatctgatgaattatatgatgcaagcaatggccaagatgctacttttgacatttcgtcaaagaaacgaatacagaataactcttcaggaaaaagaggacaaaaacgcaaaaaagacggcaacattacttcaaggaaatgtggaatctcaattaacagtgctggaggcttaccaaatggatcaacaggtgaagggatggccttggctggtgacaaaaactgggcatcatctgagttattggaattcattggacacatgagaaatggtgataattcttatatttcccagtttgatgtccaggttcttttgcttgaatatataaagcaaaataacctccatgatcctcgcagaaaaagtcagattatatgtgatgcaaggcttagcaatttgtttaaaaaaccacgtgtcgatcattttgagatgttaaagcttttggagatgcattatcttgtgaaacaggcttcaacaccgaatgcagacagtcaaagagcaatttattcagattcagctcaagtaaataatggaggacataatgagttggccgatacattaggttttgataggaggaaggctcataagaagattgaaagagaattgacaattaatccagaagattatgcagccattgacatgcacaatatcaatctaatttacttgcggcgcagtgtgatggaggatcttattgatcaggttgctgcattttctaacaaaattgctggtgcttttgtgaggataagaatttctggtcttggcaacaaggaagatatgtaccgactggtgaaagttcttggtacgcataaagttgcagagcgatacactgtcagtaagaagacaacagattatgctcttgagatatctaatttagaaaagaaagagattatcacaatggatacgatttcaaatcaggatttcacagaggaggaatgcaaacgattacgtcagagtatgaagtttggtctaactgcccggttaaaagtggtagatgtctatgagaaagctaaaatcttccaatctctgcgatttaaagatttgcagcttctgaacacccctgaagaaaaggaacgcatgattaatgaagttccagaagtacatgttgattcccggatggatccaagttatgaatccgctgaagaaccagagtataagaaagctgttgattggaccatgcatcggaatgggccagatctattatttccaggaagaaaagggacagaattgaattctgtggagaatcatacacaaaagagtctggatacaagcagtctacctacagaggacgtggaccatagatcaggtgcaggaagtaacattaatttaaacaacatggcacctgagcctgcatcacttggaattttatcaaatgacactgagccagaaaaggtttggcactacaaggaccctaatggaaatgttcagggcccgtttactcttttgcagttatccaagtgggcaagttttttcccacgcgacctgagagtatggcttacatttgagagtgaggagaactcactactgttgactgaagtgctcccaaagcagcagaaagattttattcagctttcaacagttactaccagtgataaatcaatgtgggcaggctctggtcaagatagagttaactcaaatgcaaataactcttcctcccctatgggttataacatggtctatccttctgcattatctagcccgtctgctgagtgttatgatccaacaaaagatctaaagcctctgggtggaacttcgccatcacgatctctgaaagatgctcatgctttgcatgaggttcagaatcaggttaactattcattcacaattctatcttcaactggttcatatgcaccacccggttctcatgatggaagggtttcaagagacagggttgatgaatggaacagtagtcaggacaatggtggtatttggaggccaaccatgaattctagtcagaagactaatgcacagcagcatcctgatggttgtactgggaaggacctaatgcaaactgaatctaaatgtagttcacatttggtctcagttcttacttcacaacactctgagagagaccctgccacttcccttagtactacaagttggccggtgttcagaaccaggtgccagcaggaaggttcttcatggacttcagctacaaatgctggagctcatgaccttcagttatctattgctttagcaaagccggagacctgttctccaacaaatcctgtggaagacagagattcaagttctgcttctgctttgtcttgtcagtctggggctcctgtctgcgttccccaaccagatccaacatctacatctaattcaaggaagattgatgcaaccatggatcagcatagaacatgccagcctgacacatcaagtgtatcatttgatcttcttcatgagcctaaaagtggctcactcttttccttgaaaactcaagatcttgagtttgagtaccctagtcctatcccaaaacaggaggggaaggggatttctgtgaaccagtcaggctcaacatcagtagcacatgagaatttagctacaaagacatgtgtccgcgcacctactagcaaaattgatagcttacaaccacttaaggaaagatcacattcgacagatagggactcaatcactcaattagagcatctgtttgaagagaatgtgataaagagaaataacaaagtggtcaatcctgtatctgatgctgaagggattgctgtatcagatgtgttggaatccttaacagaacaagattgtgaaaaatgtagtatacatggggtagcgccttcacaaaaaatggtgccagcttcagctgaggaagatcaaccacaatgctccagtcctattgcattgtccccttggggtgaaccaagttactatcagggtgaagctgttgattctgctctatggggcgtccaagatgaccctggtaatgacatgtggtcaatgccttctccaaaacctggtttccagccctcatcaggtcttggagctgatggcaaagacgcttcatgcatcatagaggaggcgagagcggacccaggagatggtgcttttgtcaaaacattaccaacacaaggggagaaaaagatggaacatggaaattcaagtgcctcaggttctggagtgtcagaacgggtaaaaccaaaaggaagcgctgcatcaggtccatctctagatgggagcacaaaagttatgggttggcaactgccgggctcatctctagagggcagtgcaaaagtttcaggttggaaaccaccagtcttatcacttgaagggattgctaatggttcaggttcacaagcatcgtgtccttctacgcaaaggggcacaaaatcttcaggttggcagcgatcaagttcatccccggatgggagcagaaaagcctcaggttggcaacagtcaagtacatcaccagaggggagtggaaaagcgcatggctggcaacgatcaggatcttttacccaggggggtacaaaggctgcaggtcggcaaccctctcgttcctgtacagatcggattgcaaaagttgatggctggcaacgaacaagttcatctccggagggaagcagaaaagcttcaggctggcattcgtcgggtcgtgacagctcaaagatcgcatccagtgccagcgaaaaccgtaaattgtcttctagtcaccaagcgacgacaccaacagggaggcactcgttggcaaagagacagggaagcagcgacaagggtgctgctggttgggacgaggctctggggaactcttcggaagcatcgaagagacaacagggaaacagcgacaagaatgcaggctcgggagtggctctcggaagcaacaggagctggcatccatcgtctggtaaccctagtcggggcggccaggggaatcaccaacatgacagggactctcacagcggtgattcgcggcggggtagctcgaactacccccggaggtccgacaatcgtcatgaccatggcagtggtggttcgtcacgaccctcgtcaagagggcagtcccagagggggctatgtaaacactacgagagtggccactgcgggaagggttcgaaatgccagtacctgcaccggtgatcgccgtggccgtgtggaagcgggacccctgtttgcctggccgtcctcacatttttgtatagcaggatgtggtttcgtcgtagtcagtatagtagaacgcttattaaccgtgtcggcaccactaagttggtagtagtacatatctttcagggcaggagcatgactaaagtaggatttgtaagttttattagagccactgatggccttggataaagattctccgctttttggttcgggaatgcacgctttttgttcagctaaacggagttgtgggc

SEQ ID NO: 52933 - DNA, 5405 bp, Zea Mays
ttcatcactttctctctgccccaggccagtgcccacctctcgcagtcctgtacctaccaaccacatcatattcgggtccgtgagcccgtgggagaccgcgcggcggcgacgacgaggcctcgacctcgagcgagggttggtggacgtcgacgagctagggttaggcgggcttttgagcttaagcttgggttgggggggcctgctgatccatggacggggggaccggcccgggcgccgaggtgctctctcccggcgaggccgagtggcccccagagctccgcctcccgccgctgccctccgtgccggagcccccagggccgcccccgcccgcccccgcctccgcttcgctgcgactgcgaagcgtcggggtcgcgccccatctgcacggggaggtctttgatgatgacccgcagttcctcggatcgatcatgggggccgcggccccgcccccgccccagcagcagcagcagcagcccgccgccgcggcaccggtgaagaggaagagaggcaggccgccgaagaacagggacggtgcggcgccggtgcctgcgccggtgaagccggggaacaagaaggacgaggaggaggtctgcttcatctgcttcgatgggggcagcctcgtggtttgcgaccggaggggttgcccgaaggtgtaccaccctgcgtgcatcaagcgagacgaatccttctttcggtgccagggcaagtgggattgtgggttggcacatatgcagcagctgcgaaaaggcagtacagtacatgtgttatacttgtacgtactctgtctgcaaaggatgcatcaaacaaggcaaattctttggcgttagagggaacaagggcttctgtgacacatgttatggtactatattattgatagaatccaaagaagatggtgcaaaggttggtgttgattttgatgatatatatagctgggagtaccttttcaagttatattggttggatctgaaagggaagcatttactaacgattgaagagctaaaaagtgccaagagccattggattgttcctactactgctggtagaagagagaaagaggagtcatctgatgaattatatgatgcaagcaatggccaagatgctacttttgacatttcgtcaaagaaacgaatacagaataactcttcaggaaaaagaggacaaaaacgcaaaaaagacggcaacattacttcaaggaaatgtggaatctcaattaacagtgctggaggcttaccaaatggatcaacaggtgaagggatggccttggctggtgacaaaaactgggcatcatctgagttattggaattcattggacacatgagaaatggtgataattcttatatttcccagtttgatgtccaggttcttttgcttgaatatataaagcaaaataacctccatgatcctcgcagaaaaagtcagattatatgtgatgcaaggcttagcaatttgtttaaaaaaccacgtgtcgatcattttgagatgttaaagcttttggagatgcattatcttgtgaaacaggcttcaacaccgaatgcagacagtcaaagagcaatttattcagattcagctcaagtaaataatggaggacataatgagttggccgatacattaggttttgataggaggaaggctcataagaagattgaaagagaattgacaattaatccagaagattatgcagccattgacatgcacaatatcaatctaatttacttgcggcgcagtgtgatggaggatcttattgatcaggttgctgcattttctaacaaaattgctggtgcttttgtgaggataagaatttctggtcttggcaacaaggaagatatgtaccgactggtgaaagttcttggtacgcataaagttgcagagcgatacactgtcagtaagaagacaacagattatgctcttgagatatctaatttagaaaagaaagagattatcacaatggatacgatttcaaatcaggatttcacagaggaggaatgcaaacgattacgtcagagtatgaagtttggtctaactgcccggttaaaagtggtagatgtctatgagaaagctaaaatcttccaatctctgcgatttaaagatcttctgaacacccctgaagaaaaggaacgcatgattaatgaagttccagaagtacatgttgattcccggatggatccaagttatgaatccgctgaagaaccagagtataagaaagctgttgattggaccatgcatcggaatgggccagatctattatttccaggaagaaaagggacagaattgaattctgtggagaatcatacacaaaagagtctggatacaagcagtctacctacagaggacgtggaccatagatcaggtgcaggaagtaacattaatttaaacaacatggcacctgagcctgcatcacttggaattttatcaaatgacactgagccagaaaaggtttggcactacaaggaccctaatggaaatgttcagggcccgtttactcttttgcagttatccaagtgggcaagttttttcccacgcgacctgagagtatggcttacatttgagagtgaggagaactcactactgttgactgaagtgctcccaaagcagcagaaagattttattcagctttcaacagttactaccagtgataaatcaatgtgggcaggctctggtcaagatagagttaactcaaatgcaaataactcttcctcccctatgggttataacatggtctatccttctgcattatctagcccgtctgctgagtgttatgatccaacaaaagatctaaagcctctgggtggaacttcgccatcacgatctctgaaagatgctcatgctttgcatgaggttcagaatcaggttaactattcattcacaattctatcttcaactggttcatatgcaccacccggttctcatgatggaagggtttcaagagacagggttgatgaatggaacagtagtcaggacaatggtggtatttggaggccaaccatgaattctagtcagaagactaatgcacagcagcatcctgatggttgtactgggaaggacctaatgcaaactgaatctaaatgtagttcacatttggtctcagttcttacttcacaacactctgagagagaccctgccacttcccttagtactacaagttggccggtgttcagaaccaggtgccagcaggaaggttcttcatggacttcagctacaaatgctggagctcatgaccttcagttatctattgctttagcaaagccggagacctgttctccaacaaatcctgtggaagacagagattcaagttctgcttctgctttgtcttgtcagtctggggctcctgtctgcgttccccaaccagatccaacatctacatctaattcaaggaagattgatgcaaccatggatcagcatagaacatgccagcctgacacatcaagtgtatcatttgatcttcttcatgagcctaaaagtggctcactcttttccttgaaaactcaagatcttgagtttgagtaccctagtcctatcccaaaacaggaggggaaggggatttctgtgaaccagtcaggctcaacatcagtagcacatgagaatttagctacaaagacatgtgtccgcgcacctactagcaaaattgatagcttacaaccacttaaggaaagatcacattcgacagatagggactcaatcactcaattagagcatctgtttgaagagaatgtgataaagagaaataacaaagtggtcaatcctgtatctgatgctgaagggattgctgtatcagatgtgttggaatccttaacagaacaagattgtgaaaaatgtagtatacatggggtagcgccttcacaaaaaatggtgccagcttcagctgaggaagatcaaccacaatgctccagtcctattgcattgtccccttggggtgaaccaagttactatcagggtgaagctgttgattctgctctatggggcgtccaagatgaccctggtaatgacatgtggtcaatgccttctccaaaacctggtttccagccctcatcaggtcttggagctgatggcaaagacgcttcatgcatcatagaggaggcgagagcggacccaggagatggtgcttttgtcaaaacattaccaacacaaggggagaaaaagatggaacatggaaattcaagtgcctcaggttctggagtgtcagaacgggtaaaaccaaaaggaagcgctgcatcaggtccatctctagatgggagcacaaaagttatgggttggcaactgccgggctcatctctagagggcagtgcaaaagtttcaggttggaaaccaccagtcttatcacttgaagggattgctaatggttcaggttcacaagcatcgtgtccttctacgcaaaggggcacaaaatcttcaggttggcagcgatcaagttcatccccggatgggagcagaaaagcctcaggttggcaacagtcaagtacatcaccagaggggagtggaaaagcgcatggctggcaacgatcaggatcttttacccaggggggtacaaaggctgcaggtcggcaaccctctcgttcctgtacagatcggattgcaaaagttgatggctggcaacgaacaagttcatctccggagggaagcagaaaagcttcaggctggcattcgtcgggtcgtgacagctcaaagatcgcatccagtgccagcgaaaaccgtaaattgtcttctagtcaccaagcgacgacaccaacagggaggcactcgttggcaaagagacagggaagcagcgacaagggtgctgctggttgggacgaggctctggggaactcttcggaagcatcgaagagacaacagggaaacagcgacaagaatgcaggctcgggagtggctctcggaagcaacaggagctggcatccatcgtctggtaaccctagtcggggcggccaggggaatcaccaacatgacagggactctcacagcggtgattcgcggcggggtagctcgaactacccccggaggtccgacaatcgtcatgaccatggcagtggtggttcgtcacgaccctcgtcaagagggcagtcccagagggggctatgtaaacactacgagagtggccactgcgggaagggttcgaaatgccagtacctgcaccggtgatcgccgtggccgtgtggaagcgggacccctgtttgcctggccgtcctcacatttttgtatagcaggatgtggtttcgtcgtagtcagtatagtagaacgcttattaaccgtgtcggcaccactaagttggtagtagtacatatctttcagggcaggagcatgactaaagtaggatttgtaagttttattagagccactgatggccttggataaagattctccgctttttggttcgggaatgcacgctttttgttcagctaaacggagttgtgggc

SEQ ID NO: 52934 - DNA, 5410 bp, Zea Mays
ttcatcactttctctctgccccaggccagtgcccacctctcgcagtcctgtacctaccaaccacatcatattcgggtccgtgagcccgtgggagaccgcgcggcggcgacgacgaggcctcgacctcgagcgagggttggtggacgtcgacgagctagggttaggcgggcttttgagcttaagcttgggttgggggggcctgctgatccatggacggggggaccggcccgggcgccgaggtgctctctcccggcgaggccgagtggcccccagagctccgcctcccgccgctgccctccgtgccggagcccccagggccgcccccgcccgcccccgcctccgcttcgctgcgactgcgaagcgtcggggtcgcgccccatctgcacggggaggtctttgatgatgacccgcagttcctcggatcgatcatgggggccgcggccccgcccccgccccagcagcagcagcagcagcccgccgccgcggcaccggtgaagaggaagagaggcaggccgccgaagaacagggacggtgcggcgccggtgcctgcgccggtgaagccggggaacaagaaggacgaggaggaggtctgcttcatctgcttcgatgggggcagcctcgtggtttgcgaccggaggggttgcccgaaggtgtaccaccctgcgtgcatcaagcgagacgaatccttctttcggtgccagggcaagtgggattgtggttggcacatatgcagcagctgcgaaaaggcagtacagtacatgtgttatacttgtacgtactctgtctgcaaaggatgcatcaaacaaggcaaattctttggcgttagagggaacaagggcttctgtgacacatgttatggtactatattattgatagaatccaaagaagatggtgcaaaggttggtgttgattttgatgatatatatagctgggagtaccttttcaagttatattggttggatctgaaagggaagcatttactaacgattgaagagctaaaaagtgccaagagccattggattgttcctactactgctggtagaagagagaaagaggagtcatctgatgaattatatgatgcaagcaatggccaagatgctacttttgacatttcgtcaaagaaacgaatacagaataactcttcaggaaaaagaggacaaaaacgcaaaaaagacggcaacattacttcaaggaaatgtggaatctcaattaacagtgctggaggcttaccaaatggatcaacaggtgaagggatggccttggctggtgacaaaaactgggcatcatctgagttattggaattcattggacacatgagaaatggtgataattcttatatttcccagtttgatgtccaggttcttttgcttgaatatataaagcaaaataacctccatgatcctcgcagaaaaagtcagattatatgtgatgcaaggcttagcaatttgtttaaaaaaccacgtgtcgatcattttgagatgttaaagcttttggagatgcattatcttgtgaaacaggcttcaacaccgaatgcagacagtcaaagagcaatttattcagattcagctcaagtaaataatggaggacataatgagttggccgatacattaggttttgataggaggaaggctcataagaagattgaaagagaattgacaattaatccagaagattatgcagccattgacatgcacaatatcaatctaatttacttgcggcgcagtgtgatggaggatcttattgatcaggttgctgcattttctaacaaaattgctggtgcttttgtgaggataagaatttctggtcttggcaacaaggaagatatgtaccgactggtgaaagttcttggtacgcataaagttgcagagcgatacactgtcagtaagaagacaacagattatgctcttgagatatctaatttagaaaagaaagagattatcacaatggatacgatttcaaatcaggatttcacagaggaggaatgcaaacgattacgtcagagtatgaagtttggtctaactgcccggttaaaagtggtagatgtctatgagaaagctaaaatcttccaatctctgcgatttaaagatttgcagcttctgaacacccctgaagaaaaggaacgcatgattaatgaagttccagaagtacatgttgattcccggatggatccaagttatgaatccgctgaagaaccagagtataagaaagctgttgattggaccatgcatcggaatgggccagatctattatttccaggaagaaaagggacagaattgaattctgtggagaatcatacacaaaagagtctggatacaagcagtctacctacagaggacgtggaccatagatcaggtgcaggaagtaacattaatttaaacaacatggcacctgagcctgcatcacttggaattttatcaaatgacactgagccagaaaaggtttggcactacaaggaccctaatggaaatgttcagggcccgtttactcttttgcagttatccaagtgggcaagttttttcccacgcgacctgagagtatggcttacatttgagagtgaggagaactcactactgttgactgaagtgctcccaaagcagcagaaagattttattcagctttcaacagttactaccagtgataaatcaatgtgggcaggctctggtcaagatagagttaactcaaatgcaaataactcttcctcccctatgggttataacatggtctatccttctgcattatctagcccgtctgctgagtgttatgatccaacaaaagatctaaagcctctgggtggaacttcgccatcacgatctctgaaagatgctcatgctttgcatgaggttcagaatcaggttaactattcattcacaattctatcttcaactggttcatatgcaccacccggttctcatgatggaagggtttcaagagacagggttgatgaatggaacagtagtcaggacaatggtggtatttggaggccaaccatgaattctagtcagaagactaatgcacagcagcatcctgatggttgtactgggaaggacctaatgcaaactgaatctaaatgtagttcacatttggtctcagttcttacttcacaacactctgagagagaccctgccacttcccttagtactacaagttggccggtgttcagaaccaggtgccagcaggaaggttcttcatggacttcagctacaaatgctggagctcatgaccttcagttatctattgctttagcaaagccggagacctgttctccaacaaatcctgtggaagacagagattcaagttctgcttctgctttgtcttgtcagtctggggctcctgtctgcgttccccaaccagatccaacatctacatctaattcaaggaagattgatgcaaccatggatcagcatagaacatgccagcctgacacatcaagtgtatcatttgatcttcttcatgagcctaaaagtggctcactcttttccttgaaaactcaagatcttgagtttgagtaccctagtcctatcccaaaacaggaggggaaggggatttctgtgaaccagtcaggctcaacatcagtagcacatgagaatttagctacaaagacatgtgtccgcgcacctactagcaaaattgatagcttacaaccacttaaggaaagatcacattcgacagatagggactcaatcactcaattagagcatctgtttgaagagaatgtgataaagagaaataacaaagtggtcaatcctgtatctgatgctgaagggattgctgtatcagatgtgttggaatccttaacagaacaagattgtgaaaaatgtagtatacatggggtagcgccttcacaaaaaatggtgccagcttcagctgaggaagatcaaccacaatgctccagtcctattgcattgtccccttggggtgaaccaagttactatcagggtgaagctgttgattctgctctatggggcgtccaagatgaccctggtaatgacatgtggtcaatgccttctccaaaacctggtttccagccctcatcaggtcttggagctgatggcaaagacgcttcatgcatcatagaggaggcgagagcggacccaggagatggtgcttttgtcaaaacattaccaacacaaggggagaaaaagatggaacatggaaattcaagtgcctcaggttctggagtgtcagaacgggtaaaaccaaaaggaagcgctgcatcaggtccatctctagatgggagcacaaaagttatgggttggcaactgccgggctcatctctagagggcagtgcaaaagtttcaggttggaaaccaccagtcttatcacttgaagggattgctaatggttcaggttcacaagcatcgtgtccttctacgcaaaggggcacaaaatcttcaggttggcagcgatcaagttcatccccggatgggagcagaaaagcctcaggttggcaacagtcaagtacatcaccagaggggagtggaaaagcgcatggctggcaacgatcaggatcttttacccaggggggtacaaaggctgcaggtcggcaaccctctcgttcctgtacagatcggattgcaaaagttgatggctggcaacgaacaagttcatctccggagggaagcagaaaagcttcaggctggcattcgtcgggtcgtgacagctcaaagatcgcatccagtgccagcgaaaaccgtaaattgtcttctagtcaccaagcgacgacaccaacagggaggcactcgttggcaaagagacagggaagcagcgacaagggtgctgctggttgggacgaggctctggggaactcttcggaagcatcgaagagacaacagggaaacagcgacaagaatgcaggctcgggagtggctctcggaagcaacaggagctggcatccatcgtctggtaaccctagtcggggcggccaggggaatcaccaacatgacagggactctcacagcggtgattcgcggcggggtagctcgaactacccccggaggtccgacaatcgtcatgaccatggcagtggtggttcgtcacgaccctcgtcaagagggcagtcccagagggggctatgtaaacactacgagagtggccactgcgggaagggttcgaaatgccagtacctgcaccggtgatcgccgtggccgtgtggaagcgggacccctgtttgcctggccgtcctcacatttttgtatagcaggatgtggtttcgtcgtagtcagtatagtagaacgcttattaaccgtgtcggcaccactaagttggtagtagtacatatctttcagggcaggagcatgactaaagtaggatttgtaagttttattagagccactgatggccttggataaagattctccgctttttggttcgggaatgcacgctttttgttcagctaaacggagttgtgggc

SEQ ID NO: 52935 - DNA, 5406 bp, Zea Mays
ttcatcactttctctctgccccaggccagtgcccacctctcgcagtcctgtacctaccaaccacatcatattcgggtccgtgagcccgtgggagaccgcgcggcggcgacgacgaggcctcgacctcgagcgagggttggtggacgtcgacgagctagggttaggcgggcttttgagcttaagcttgggttgggggggcctgctgatccatggacggggggaccggcccgggcgccgaggtgctctctcccggcgaggccgagtggcccccagagctccgcctcccgccgctgccctccgtgccggagcccccagggccgcccccgcccgcccccgcctccgcttcgctgcgactgcgaagcgtcggggtcgcgccccatctgcacggggaggtctttgatgatgacccgcagttcctcggatcgatcatgggggccgcggccccgcccccgccccagcagcagcagcagcagcccgccgccgcggcaccggtgaagaggaagagaggcaggccgccgaagaacagggacggtgcggcgccggtgcctgcgccggtgaagccggggaacaagaaggacgaggaggaggtctgcttcatctgcttcgatgggggcagcctcgtggtttgcgaccggaggggttgcccgaaggtgtaccaccctgcgtgcatcaagcgagacgaatccttctttcggtgccagggcaagtgggattgtggttggcacatatgcagcagctgcgaaaaggcagtacagtacatgtgttatacttgtacgtactctgtctgcaaaggatgcatcaaacaaggcaaattctttggcgttagagggaacaagggcttctgtgacacatgttatggtactatattattgatagaatccaaagaagatggtgcaaaggttggtgttgattttgatgatatatatagctgggagtaccttttcaagttatattggttggatctgaaagggaagcatttactaacgattgaagagctaaaaagtgccaagagccattggattgttcctactactgctggtagaagagagaaagaggagtcatctgatgaattatatgatgcaagcaatggccaagatgctacttttgacatttcgtcaaagaaacgaatacagaataactcttcaggaaaaagaggacaaaaacgcaaaaaagacggcaacattacttcaaggaaatgtggaatctcaattaacagtgctggaggcttaccaaatggatcaacaggtgaagggatggccttggctggtgacaaaaactgggcatcatctgagttattggaattcattggacacatgagaaatggtgataattcttatatttcccagtttgatgtccaggttcttttgcttgaatatataaagcaaaataacctccatgatcctcgcagaaaaagtcagattatatgtgatgcaaggcttagcaatttgtttaaaaaaccacgtgtcgatcattttgagatgttaaagcttttggagatgcattatcttgtgaaacaggcttcaacaccgaatgcagacagtcaaagagcaatttattcagattcagctcaagtaaataatggaggacataatgagttggccgatacattaggttttgataggaggaaggctcataagaagattgaaagagaattgacaattaatccagaagattatgcagccattgacatgcacaatatcaatctaatttacttgcggcgcagtgtgatggaggatcttattgatcaggttgctgcattttctaacaaaattgctggtgcttttgtgaggataagaatttctggtcttggcaacaaggaagatatgtaccgactggtgaaagttcttggtacgcataaagttgcagagcgatacactgtcagtaagaagacaacagattatgctcttgagatatctaatttagaaaagaaagagattatcacaatggatacgatttcaaatcaggatttcacagaggaggaatgcaaacgattacgtcagagtatgaagtttggtctaactgcccggttaaaagtgatgtctatgagaaagctaaaatcttccaatctctgcgatttaaagatttgcagcttctgaacacccctgaagaaaaggaacgcatgattaatgaagttccagaagtacatgttgattcccggatggatccaagttatgaatccgctgaagaaccagagtataagaaagctgttgattggaccatgcatcggaatgggccagatctattatttccaggaagaaaagggacagaattgaattctgtggagaatcatacacaaaagagtctggatacaagcagtctacctacagaggacgtggaccatagatcaggtgcaggaagtaacattaatttaaacaacatggcacctgagcctgcatcacttggaattttatcaaatgacactgagccagaaaaggtttggcactacaaggaccctaatggaaatgttcagggcccgtttactcttttgcagttatccaagtgggcaagttttttcccacgcgacctgagagtatggcttacatttgagagtgaggagaactcactactgttgactgaagtgctcccaaagcagcagaaagattttattcagctttcaacagttactaccagtgataaatcaatgtgggcaggctctggtcaagatagagttaactcaaatgcaaataactcttcctcccctatgggttataacatggtctatccttctgcattatctagcccgtctgctgagtgttatgatccaacaaaagatctaaagcctctgggtggaacttcgccatcacgatctctgaaagatgctcatgctttgcatgaggttcagaatcaggttaactattcattcacaattctatcttcaactggttcatatgcaccacccggttctcatgatggaagggtttcaagagacagggttgatgaatggaacagtagtcaggacaatggtggtatttggaggccaaccatgaattctagtcagaagactaatgcacagcagcatcctgatggttgtactgggaaggacctaatgcaaactgaatctaaatgtagttcacatttggtctcagttcttacttcacaacactctgagagagaccctgccacttcccttagtactacaagttggccggtgttcagaaccaggtgccagcaggaaggttcttcatggacttcagctacaaatgctggagctcatgaccttcagttatctattgctttagcaaagccggagacctgttctccaacaaatcctgtggaagacagagattcaagttctgcttctgctttgtcttgtcagtctggggctcctgtctgcgttccccaaccagatccaacatctacatctaattcaaggaagattgatgcaaccatggatcagcatagaacatgccagcctgacacatcaagtgtatcatttgatcttcttcatgagcctaaaagtggctcactcttttccttgaaaactcaagatcttgagtttgagtaccctagtcctatcccaaaacaggaggggaaggggatttctgtgaaccagtcaggctcaacatcagtagcacatgagaatttagctacaaagacatgtgtccgcgcacctactagcaaaattgatagcttacaaccacttaaggaaagatcacattcgacagatagggactcaatcactcaattagagcatctgtttgaagagaatgtgataaagagaaataacaaagtggtcaatcctgtatctgatgctgaagggattgctgtatcagatgtgttggaatccttaacagaacaagattgtgaaaaatgtagtatacatggggtagcgccttcacaaaaaatggtgccagcttcagctgaggaagatcaaccacaatgctccagtcctattgcattgtccccttggggtgaaccaagttactatcagggtgaagctgttgattctgctctatggggcgtccaagatgaccctggtaatgacatgtggtcaatgccttctccaaaacctggtttccagccctcatcaggtcttggagctgatggcaaagacgcttcatgcatcatagaggaggcgagagcggacccaggagatggtgcttttgtcaaaacattaccaacacaaggggagaaaaagatggaacatggaaattcaagtgcctcaggttctggagtgtcagaacgggtaaaaccaaaaggaagcgctgcatcaggtccatctctagatgggagcacaaaagttatgggttggcaactgccgggctcatctctagagggcagtgcaaaagtttcaggttggaaaccaccagtcttatcacttgaagggattgctaatggttcaggttcacaagcatcgtgtccttctacgcaaaggggcacaaaatcttcaggttggcagcgatcaagttcatccccggatgggagcagaaaagcctcaggttggcaacagtcaagtacatcaccagaggggagtggaaaagcgcatggctggcaacgatcaggatcttttacccaggggggtacaaaggctgcaggtcggcaaccctctcgttcctgtacagatcggattgcaaaagttgatggctggcaacgaacaagttcatctccggagggaagcagaaaagcttcaggctggcattcgtcgggtcgtgacagctcaaagatcgcatccagtgccagcgaaaaccgtaaattgtcttctagtcaccaagcgacgacaccaacagggaggcactcgttggcaaagagacagggaagcagcgacaagggtgctgctggttgggacgaggctctggggaactcttcggaagcatcgaagagacaacagggaaacagcgacaagaatgcaggctcgggagtggctctcggaagcaacaggagctggcatccatcgtctggtaaccctagtcggggcggccaggggaatcaccaacatgacagggactctcacagcggtgattcgcggcggggtagctcgaactacccccggaggtccgacaatcgtcatgaccatggcagtggtggttcgtcacgaccctcgtcaagagggcagtcccagagggggctatgtaaacactacgagagtggccactgcgggaagggttcgaaatgccagtacctgcaccggtgatcgccgtggccgtgtggaagcgggacccctgtttgcctggccgtcctcacatttttgtatagcaggatgtggtttcgtcgtagtcagtatagtagaacgcttattaaccgtgtcggcaccactaagttggtagtagtacatatctttcagggcaggagcatgactaaagtaggatttgtaagttttattagagccactgatggccttggataaagattctccgctttttggttcgggaatgcacgctttttgttcagctaaacggagttgtgggc

SEQ ID NO: 52936 - DNA, 5415 bp, Zea Mays
ctcgtatcatcttcatcactttctctctgccccaggccagtgcccacctctcgcagtcctgtacctaccaaccacatcatattcgggtccgtgagcccgtgggagaccgcgcggcggcgacgacgaggcctcgacctcgagcgagggttggtggacgtcgacgagctagggttaggcgggcttttgagcttaagcttgggttgggggggcctgctgatccatggacggggggaccggcccgggcgccgaggtgctctctcccggcgaggccgagtggcccccagagctccgcctcccgccgctgccctccgtgccggagcccccagggccgcccccgcccgcccccgcctccgcttcgctgcgactgcgaagcgtcggggtcgcgccccatctgcacggggaggtctttgatgatgacccgcagttcctcggatcgatcatgggggccgcggccccgcccccgccccagcagcagcagcagcagcccgccgccgcggcaccggtgaagaggaagagaggcaggccgccgaagaacagggacggtgcggcgccggtgcctgcgccggtgaagccggggaacaagaaggacgaggaggaggtctgcttcatctgcttcgatgggggcagcctcgtggtttgcgaccggaggggttgcccgaaggtgtaccaccctgcgtgcatcaagcgagacgaatccttctttcggtgccagggcaagtgggattgtggttggcacatatgcagcagctgcgaaaaggcagtacagtacatgtgttatacttgtacgtactctgtctgcaaaggatgcatcaaacaaggcaaattctttggcgttagagggaacaagggcttctgtgacacatgttatggtactatattattgatagaatccaaagaagatggtgcaaaggttggtgttgattttgatgatatatatagctgggagtaccttttcaagttatattggttggatctgaaagggaagcatttactaacgattgaagagctaaaaagtgccaagagccattggattgttcctactactgctggtagaagagagaaagaggagtcatctgatgaattatatgatgcaagcaatggccaagatgctacttttgacatttcgtcaaagaaacgaatacagaataactcttcaggaaaaagaggacaaaaacgcaaaaaagacggcaacattacttcaaggaaatgtggaatctcaattaacagtgctggaggcttaccaaatggatcaacaggtgaagggatggccttggctggtgacaaaaactgggcatcatctgagttattggaattcattggacacatgagaaatggtgataattcttatatttcccagtttgatgtccaggttcttttgcttgaatatataaagcaaaataacctccatgatcctcgcagaaaaagtcagattatatgtgatgcaaggcttagcaatttgtttaaaaaaccacgtgtcgatcattttgagatgttaaagcttttggagatgcattatcttgtgaaacaggcttcaacaccgaatgcagacagtcaaagagcaatttattcagattcagctcaagtaaataatggaggacataatgagttggccgatacattaggttttgataggaggaaggctcataagaagattgaaagagaattgacaattaatccagaagattatgcagccattgacatgcacaatatcaatctaatttacttgcggcgcagtgtgatggaggatcttattgatcaggttgctgcattttctaacaaaattgctggtgcttttgtgaggataagaatttctggtcttggcaacaaggaagatatgtaccgactggtgaaagttcttggtacgcataaagttgcagagcgatacactgtcagtaagaagacaacagattatgctcttgagatatctaatttagaaaagaaagagattatcacaatggatacgatttcaaatcaggatttcacagaggaggaatgcaaacgattacgtcagagtatgaagtttggtctaactgcccggttaaaagtggtagatgtctatgagaaagctaaaatcttccaatctctgcgatttaaagatcttctgaacacccctgaagaaaaggaacgcatgattaatgaagttccagaagtacatgttgattcccggatggatccaagttatgaatccgctgaagaaccagagtataagaaagctgttgattggaccatgcatcggaatgggccagatctattatttccaggaagaaaagggacagaattgaattctgtggagaatcatacacaaaagagtctggatacaagcagtctacctacagaggacgtggaccatagatcaggtgcaggaagtaacattaatttaaacaacatggcacctgagcctgcatcacttggaattttatcaaatgacactgagccagaaaaggtttggcactacaaggaccctaatggaaatgttcagggcccgtttactcttttgcagttatccaagtgggcaagttttttcccacgcgacctgagagtatggcttacatttgagagtgaggagaactcactactgttgactgaagtgctcccaaagcagcagaaagattttattcagctttcaacagttactaccagtgataaatcaatgtgggcaggctctggtcaagatagagttaactcaaatgcaaataactcttcctcccctatgggttataacatggtctatccttctgcattatctagcccgtctgctgagtgttatgatccaacaaaagatctaaagcctctgggtggaacttcgccatcacgatctctgaaagatgctcatgctttgcatgaggttcagaatcaggttaactattcattcacaattctatcttcaactggttcatatgcaccacccggttctcatgatggaagggtttcaagagacagggttgatgaatggaacagtagtcaggacaatggtggtatttggaggccaaccatgaattctagtcagaagactaatgcacagcagcatcctgatggttgtactgggaaggacctaatgcaaactgaatctaaatgtagttcacatttggtctcagttcttacttcacaacactctgagagagaccctgccacttcccttagtactacaagttggccggtgttcagaaccaggtgccagcaggaaggttcttcatggacttcagctacaaatgctggagctcatgaccttcagttatctattgctttagcaaagccggagacctgttctccaacaaatcctgtggaagacagagattcaagttctgcttctgctttgtcttgtcagtctggggctcctgtctgcgttccccaaccagatccaacatctacatctaattcaaggaagattgatgcaaccatggatcagcatagaacatgccagcctgacacatcaagtgtatcatttgatcttcttcatgagcctaaaagtggctcactcttttccttgaaaactcaagatcttgagtttgagtaccctagtcctatcccaaaacaggaggggaaggggatttctgtgaaccagtcaggctcaacatcagtagcacatgagaatttagctacaaagacatgtgtccgcgcacctactagcaaaattgatagcttacaaccacttaaggaaagatcacattcgacagatagggactcaatcactcaattagagcatctgtttgaagagaatgtgataaagagaaataacaaagtggtcaatcctgtatctgatgctgaagggattgctgtatcagatgtgttggaatccttaacagaacaagattgtgaaaaatgtagtatacatggggtagcgccttcacaaaaaatggtgccagcttcagctgaggaagatcaaccacaatgctccagtcctattgcattgtccccttggggtgaaccaagttactatcagggtgaagctgttgattctgctctatggggcgtccaagatgaccctggtaatgacatgtggtcaatgccttctccaaaacctggtttccagccctcatcaggtcttggagctgatggcaaagacgcttcatgcatcatagaggaggcgagagcggacccaggagatggtgcttttgtcaaaacattaccaacacaaggggagaaaaagatggaacatggaaattcaagtgcctcaggttctggagtgtcagaacgggtaaaaccaaaaggaagcgctgcatcaggtccatctctagatgggagcacaaaagttatgggttggcaactgccgggctcatctctagagggcagtgcaaaagtttcaggttggaaaccaccagtcttatcacttgaagggattgctaatggttcaggttcacaagcatcgtgtccttctacgcaaaggggcacaaaatcttcaggttggcagcgatcaagttcatccccggatgggagcagaaaagcctcaggttggcaacagtcaagtacatcaccagaggggagtggaaaagcgcatggctggcaacgatcaggatcttttacccaggggggtacaaaggctgcaggtcggcaaccctctcgttcctgtacagatcggattgcaaaagttgatggctggcaacgaacaagttcatctccggagggaagcagaaaagcttcaggctggcattcgtcgggtcgtgacagctcaaagatcgcatccagtgccagcgaaaaccgtaaattgtcttctagtcaccaagcgacgacaccaacagggaggcactcgttggcaaagagacagggaagcagcgacaagggtgctgctggttgggacgaggctctggggaactcttcggaagcatcgaagagacaacagggaaacagcgacaagaatgcaggctcgggagtggctctcggaagcaacaggagctggcatccatcgtctggtaaccctagtcggggcggccaggggaatcaccaacatgacagggactctcacagcggtgattcgcggcggggtagctcgaactacccccggaggtccgacaatcgtcatgaccatggcagtggtggttcgtcacgaccctcgtcaagagggcagtcccagagggggctatgtaaacactacgagagtggccactgcgggaagggttcgaaatgccagtacctgcaccggtgatcgccgtggccgtgtggaagcgggacccctgtttgcctggccgtcctcacatttttgtatagcaggatgtggtttcgtcgtagtcagtatagtagaacgcttattaaccgtgtcggcaccactaagttggtagtagtacatatctttcagggcaggagcatgactaaagtaggatttgtaagttttattagagccactgatggccttggataaagattctccgctttttggttcgggaatgcacgctttttgttcagctaaacggagttgtgggc

SEQ ID NO: 52937 - DNA, 1370 bp, Zea Mays
atagtccactccgggcataggttggagagtcagctggccctgagtgcaaagctgtccttcaggaaataactgaactcgttgacgaacagctccggctggagagtcactcggtgaaggctctatttggagcacagacgctgaaaaatgatggcgacttcctcttcttcctggcggatgcggcagcgacaaccttccaatacgggaacccagatgccttgtgccctccactaataaaggcgaagaagaacaggaaaaacttggtggaagcatatgctcaatttgtgaaagattattacattaaaaaaatggagacaccaccatcctcgtatgatcgagaatatctgaaggaaacaactccacatgattctagtaaggttctaggctctggtggttccaagtttgcagtgaggttgcctactttcaagtggcacccaaaaatgacagcgttcgttctgcaaggatcaatacgaggtaccatttggacctatgcagacatgtctttggggaaggcgtttatcccgatgtgttcatgacgaacttgtattatggaggcacaagaatcgctgcttctaaaatcgtgtttacaaatggctcccaagacccatggcgccatgcctccaagcagaaatcatcgaaagacatgccgtcgtacataatgaaatgcagaaactgcggacatgggactgatctgaggggctgtccgcagtggcctttcaggatcgaaggggacgcttcgaactgctcgtctctcgctgtagtcaataccgcaagggagaggatcgccaagcacatcgacctgtggctgtcgcaatgcagcaaaccatcagtaggagcctggtaaccgcggactagtggttcatccactcgggaagagtggaaagaggtttggattggatgtcctggagcaaacttgtgtcgggacttggattacgtgtttgtgcactttgaaaagcagataaagctgatggtgtaaagcagcagtgcccggtaccccaccagggtacgtgatgcaggcaggggtggtgctgtctgtgtcgatgccgtcgtccttttctggcgtggcgctgcagacgaccgacgtgtcacggcgcgtttgggtgcgcggcgcgcgcgcgtcaaaacgtaacaagtactagtacctactactacgtgccatgccaggtgttgcgtcaaaacgtaacaagtttctcccttccgttctttgtccgagcgagtttacaagtactatactaccaaaaaggccaaagcgaacccgcaattttcttatgtatactagtagtagtgaactgctgcaccaacatccggtccacgtaaacatgtgccttttccgacgtgtatgttttatttaatggcatgtgttcacttgtgca

SEQ ID NO: 52938 - DNA, 2021 bp, Zea Mays
acaacagccactggagtaggattatactactgctggactggactggaacggaacgggagaattttcagccggagtggcggacaccgatgatggggtctcgcgttcgcatcgtcttcctcctcctcgccttcctcttcgcgcgcgccgccgagccgatcgccgccgccgcacccgccggcagcaggcaccttacgaaggacgagcggtggatgaaccagcgcctcgaccacttctcccccaccgaccaccggcaattcaagcagcgctacttcgagttcctcgactaccatcgggcccccggcggcccggtcttcctgcgcatctgcggcgagtccgcctgcgacggcatccccaacgattacctggccgtgctcgccaagaagttcggcgccgcggtggtgacgccggagcaccggtactacgggaagagttctccattcaagcagctgaccaccgagaacctgaggttcctgtcgtcgaagcaggccctgttcgacctggccgtcttccggcagtactatcaggtttcgacaacccctggttcgtcatcggggtctcctactccggcgctctcagcgcctggttcaggctcaagttcccccatttgacatgtgggagcctcgcgagctcaggggtggttcttgcagtgtacaactacaccgactttgacaagcaggttggagagtcagctggccctgagtgcaaagctgtccttcaggaaataactgaactcgttgacgaacagctccggctggagagtcactcggtgaaggctctatttggagcacagacgctgaaaaatgatggcgacttcctcttcttcctggcggatgcggcagcgacaaccttccaatacgggaacccagatgccttgtgccctccactaataaaggcgaagaagaacaggaaaaacttggtggaagcatatgctcaatttgtgaaagattattacattaaaaaaatggagacaccaccatcctcgtatgatcgagaatatctgaaggaaacaactccacatgattctagttctaggctctggtggttccaagtttgcagtgaggttgcctactttcaagtggcacccaaaaatgacagcgttcgttctgcaaggatcaatacgaggtaccatttggacctatgcagacatgtctttggggaaggcgtttatcccgatgtgttcatgacgaacttgtattatggaggcacaagaatcgctgcttctaaaatcgtgtttacaaatggctcccaagacccatggcgccatgcctccaagcagaaatcatcgaaagacatgccgtcgtacataatgaaatgcagaaactgcggacatgggactgatctgaggggctgtccgcagtggcctttcaggatcgaaggggacgcttcgaactgctcgtctctcgctgtagtcaataccgcaagggagaggatcgccaagcacatcgacctgtggctgtcgcaatgcagcaaaccatcagtaggagcctggtaaccgcggactagtggttcatccactcgggaagagtggaaagaggtttggattggatgtcctggagcaaacttgtgtcgggacttggattacgtgtttgtgcactttgaaaagcagataaagctgatggtgtaaagcagcagtgcccggtaccccaccagggtacgtgatgcaggcaggggtggtgctgtctgtgtcgatgccgtcgtccttttctggcgtggcgctgcagacgaccgacgtgtcacggcgcgtttgggtgcgcggcgcgcgcgcgtcaaaacgtaacaagtactagtacctactactacgtgccatgccaggtgttgcgtcaaaacgtaacaagtttctcccttccgttctttgtccgagcgagtttacaagtactatactaccaaaaaggccaaagcgaacccgcaattttcttatgtatactagtagtagtgaactgctgcaccaacatccggtccacgtaaacatgtgccttttccgacgtgtatgttttatttaatggcatgtgttcacttgtgca

SEQ ID NO: 52939 - DNA, 2076 bp, Zea Mays
acaacagccactggagtaggattatactactgctggactggactggaacggaacgggagaattttcagccggagtggcggacaccgatgatggggtctcgcgttcgcatcgtcttcctcctcctcgccttcctcttcgcgcgcgccgccgagccgatcgccgccgccgcacccgccggcagcaggcaccttacgaaggacgagcggtggatgaaccagcgcctcgaccacttctcccccaccgaccaccggcaattcaagcagcgctacttcgagttcctcgactaccatcgggcccccggcggcccggtcttcctgcgcatctgcggcgagtccgcctgcgacggcatccccaacgattacctggccgtgctcgccaagaagttcggcgccgcggtggtgacgccggagcaccggtactacgggaagagttctccattcaagcagctgaccaccgagaacctgaggttcctgtcgtcgaagcaggccctgttcgacctggccgtcttccggcagtactatcaggaatcgctgaatgcccggtacaaccgatcaggtttcgacaacccctggttcgtcatcggggtctcctactccggcgctctcagcgcctggttcaggctcaagttcccccatttgacatgtgggagcctcgcgagctcaggggtggttcttgcagtgtacaactacaccgactttgacaagcaggttgatagtccactccgggcataggttggagagtcagctggccctgagtgcaaagctgtccttcaggaaataactgaactcgttgacgaacagctccggctggagagtcactcggtgaaggctctatttggagcacagacgctgaaaaatgatggcgacttcctcttcttcctggcggatgcggcagcgacaaccttccaatacgggaacccagatgccttgtgccctccactaataaaggcgaagaagaacaggaaaaacttggtggaagcatatgctcaatttgtgaaagattattacattaaaaaaatggagacaccaccatcctcgtatgatcgagaatatctgaaggaaacaactccacatgattctagttctaggctctggtggttccaagtttgcagtgaggttgcctactttcaagtggcacccaaaaatgacagcgttcgttctgcaaggatcaatacgaggtaccatttggacctatgcagacatgtctttggggaaggcgtttatcccgatgtgttcatgacgaacttgtattatggaggcacaagaatcgctgcttctaaaatcgtgtttacaaatggctcccaagacccatggcgccatgcctccaagcagaaatcatcgaaagacatgccgtcgtacataatgaaatgcagaaactgcggacatgggactgatctgaggggctgtccgcagtggcctttcaggatcgaaggggacgcttcgaactgctcgtctctcgctgtagtcaataccgcaagggagaggatcgccaagcacatcgacctgtggctgtcgcaatgcagcaaaccatcagtaggagcctggtaaccgcggactagtggttcatccactcgggaagagtggaaagaggtttggattggatgtcctggagcaaacttgtgtcgggacttggattacgtgtttgtgcactttgaaaagcagataaagctgatggtgtaaagcagcagtgcccggtaccccaccagggtacgtgatgcaggcaggggtggtgctgtctgtgtcgatgccgtcgtccttttctggcgtggcgctgcagacgaccgacgtgtcacggcgcgtttgggtgcgcggcgcgcgcgcgtcaaaacgtaacaagtactagtacctactactacgtgccatgccaggtgttgcgtcaaaacgtaacaagtttctcccttccgttctttgtccgagcgagtttacaagtactatactaccaaaaaggccaaagcgaacccgcaattttcttatgtatactagtagtagtgaactgctgcaccaacatccggtccacgtaaacatgtgccttttccgacgtgtatgttttatttaatggcatgtgttcacttgtgca

SEQ ID NO: 52940 - DNA, 566 bp, Zea Mays
ccttggcatgttaactgctcaccaatttcaaatggtacaagtctggatgggaaagcgagtctcggctggctggctggctgggctagcagctcatcgaatcggatgcattagcgacttagcgtcaacgcgtttgggatatccatagtttacacttgaaatgaacaattaatgtttgctacgtgtcttgaaggaaaaaaagaacgtaaattagtaaattacaggaacagaactactagtaccttctgtagagcatggtattagcaaagtgtatattggcgtacgtatagtacaagcaaaggaaaaaaagaaaagctaaggttaattaaatgatgatgaacatcatcctctctagatctttacacttgagatcgaccatcatcacaaattttccgtcatcgtcaacacctggatgtcccatcccatgtctctcgccaccaaaccaagctagcttcaaaccaatacgtattcgtatcgatcaaccctcacaaataaagcatgcaacggcgggagagagaagggggaaaaggaccgaattttttgtattttagcccttaaacagaagtaaa

SEQ ID NO: 52941 - DNA, 2217 bp, Zea Mays
tgagtttaagagttttacttctggtgggccaaatataccagaaatttgagtgcaaagatcgatcagatggtggaactgtgaggaatgttgtaaggtggagcatcgagaacttgctggaggagcaagaaggtgcaacactgatggtctctgcgaagtttgttgtcctgtctaaacggaatatctttcttcaatttgaggaggtcgctgttgaaaatatcaagatcagcgagcaactgcagacactaatagctcctgctatacttcctcggtcatttttgagccttcaggtatatgccagcccgccaggttatatcaaataattgatcgttgacttgcacattttccttgatttaacaaaatcttaatttattctttcttggtcattgacaaatatgtgcattgatatacatttcatgtgtgccacaaaatcttaatttattctttcttggtcattgacaaatatgtgcatcggtatacatttcatgtgtcccacaatattgttctgaattctgtttgtttcttaatttatttttctgacaaatatgtggaaacttaatttattattctgacaaataaaggacacgtttcatgtgtcccacataggtttcatttgtcccacaatattgttctgacaaatatgtgcatcgatatacatttcatgtgtcccacaaaatcttaatttattctttcttggtcattgacaaatatgtgcatcggtatacattgacaaataattgatcgttgacttccacgaccacgagtagcacgacggacacgaaaatcagccaacttctctagaaacttagcaaagcagttctcagaccgatgagtggtcttttgcaatgttcacaaggctgaaagaaggtgttcctagacttctgagcagcagctaacacactgtgagaactcacaccagtaatagaactcacaccagtaatagaagacatagacttcagacgagtttcttcagcaagcaattcagacaatgtctgagccatggtgagagtatctaaactgtgaagcagccttgcacgaagagaatcaaatttaagtcgaacttccataacaaatctgtaggtaaagaacttctcaatgaacttatgggctgggcaaggcacaactgtacaagcaggtatcatggaggtcaatgcactcataagacgatcaaaggctaaataatattcatcaatggacatatcatgttgctcaatgacataagtctgctgcataagggtatgtaaaagagcaccactatcctgaacaaaccgatccttcagatgtgaccagatagtattagcagtggtgaatttggacatactcataatcatagttggtttagtgctattgaccattgcagccattaccttgccatcattgatctgccaagtcttgattgcagcagcattgcttctaccagctgctaaacctggagaatcttcagtcaaatgaaatagtaaaccatgacctcttaatgcagtctgaacacaaaacacccattctggataattctgcccatcaagcacaatattgacaacaatagcgttggccgacatattgaagagcaatgaaacactgaagaataacagatctgaaacagactggcgtgatggtgccaaaaaccccagcgggtgcagcggaagaacagtggatacactggctgcagtcttggatgagaccgtgcgaagtcatagtaaagcaacagatctggtcggggctgcactcggcgcagatacacagacggacaacgcaacgacggacgggggtgcgacgacagaaggcgggcaggggcgaacgacatggccgcaactccgggaaggggcggcgcaccgacgacagaaggcggactggggcggacggcgcatgaacaggacgcaggagtaggtccacgactgcgcatatgagatctgtgactgcgacgttaggctccgcgacggcgcaggcgcaggaggaggcggatctccgcaacggagcaggagatggcggatccgtgacggcgcaccgcgactgcagatctccgcgactgcgcaggaggactccgcgacgacgcacaggagggctctgcgacggcgcaggcgcaggcgcaggaggatgcggatctctgcgacggcgcaggagatggcggatcgggctgagatccgcgacggcgtagatccacgacggcgcaggagcgcatttgggggccgcgactgttgggcggagtccgcgacggcggctggg

SEQ ID NO: 52942 - DNA, 2324 bp, Zea Mays
gcacgaactgctgcgcgcggttcaggaaacgcggcgcggattcgcagcggggcccgaccaacgcgctgccatcgaggaggccgtcgtggccgtggaggagcgtggtgcggggaagggaacgccgatagatctcgcggcgctcgatggcacctggaggctgtgttacacatcggcatcagacgtgcttgtgctgttcgaggcggccgagaggcttccactcctgcaggagcaagaaggtgcaacactgatggtctctgcgaagtttgttgtcctgtctaaacggaatatctttcttcaatttgaggaggtcgctgttgaaaatatcaagatcagcgagcaactgcagacactaatagctcctgctatacttcctcggtcatttttgagccttcaggtatatgccagcccgccaggttatatcaaataattgatcgttgacttgcacattttccttgatttaacaaaatcttaatttattctttcttggtcattgacaaatatgtgcattgatatacatttcatgtgtgccacaaaatcttaatttattctttcttggtcattgacaaatatgtgcatcggtatacatttcatgtgtcccacaatattgttctgaattctgtttgtttcttaatttatttttctgacaaatatgtggaaacttaatttattattctgacaaataaaggacacgtttcatgtgtcccacataggtttcatttgtcccacaatattgttctgacaaatatgtgcatcgatatacatttcatgtgtcccacaaaatcttaatttattctttcttggtcattgacaaatatgtgcatcggtatacattgacaaataattgatcgttgacttccacgaccacgagtagcacgacggacacgaaaatcagccaacttctctagaaacttagcaaagcagttctcagaccgatgagtggtcttttgcaatgttcacaaggctgaaagaaggtgttcctagacttctgagcagcagctaacacactgtgagaactcacaccagtaatagaactcacaccagtaatagaagacatagacttcagacgagtttcttcagcaagcaattcagacaatgtctgagccatggtgagagtatctaaactgtgaagcagccttgcacgaagagaatcaaatttaagtcgaacttccataacaaatctgtaggtaaagaacttctcaatgaacttatgggctgggcaaggcacaactgtacaagcaggtatcatggaggtcaatgcactcataagacgatcaaaggctaaataatattcatcaatggacatatcatgttgctcaatgacataagtctgctgcataagggtatgtaaaagagcaccactatcctgaacaaaccgatccttcagatgtgaccagatagtattagcagtggtgaatttggacatactcataatcatagttggtttagtgctattgaccattgcagccattaccttgccatcattgatctgccaagtcttgattgcagcagcattgcttctaccagctgctaaacctggagaatcttcagtcaaatgaaatagtaaaccatgacctcttaatgcagtctgaacacaaaacacccattctggataattctgcccatcaagcacaatattgacaacaatagcgttggccgacatattgaagagcaatgaaacactgaagaataacagatctgaaacagactggcgtgatggtgccaaaaaccccagcgggtgcagcggaagaacagtggatacactggctgcagtcttggatgagaccgtgcgaagtcatagtaaagcaacagatctggtcggggctgcactcggcgcagatacacagacggacaacgcaacgacggacgggggtgcgacgacagaaggcgggcaggggcgaacgacatggccgcaactccgggaaggggcggcgcaccgacgacagaaggcggactggggcggacggcgcatgaacaggacgcaggagtaggtccacgactgcgcatatgagatctgtgactgcgacgttaggctccgcgacggcgcaggcgcaggaggaggcggatctccgcaacggagcaggagatggcggatccgtgacggcgcaccgcgactgcagatctccgcgactgcgcaggaggactccgcgacgacgcacaggagggctctgcgacggcgcaggcgcaggcgcaggaggatgcggatctctgcgacggcgcaggagatggcggatcgggctgagatccgcgacggcgtagatccacgacggcgcaggagcgcatttgggggccgcgactgttgggcggagtccgcgacggcggctggg

SEQ ID NO: 52943 - DNA, 2807 bp, Zea Mays
ccaaagcgaactgaaccgatccgcggttgtgcccgtgccgcgcgccagcgccacgcttcctacaatcctactgtagtttaatccgcttgcacggaggagcaacgccgagcaatggcgctcgcagccccttcttccctccgcctcctcccgaccacgccatcgcaggcgccatctccgccctgtgcctcccgaccacgccatctgcgggagctccgtctctgccagagactcgccaccgccgccgccgccgccgccgccgccgcggccgcggccacggctccactcgcttcctcgcccaccacctccgcggacacggagcggaggaagcacgaactgctgcgcgcggttcaggaaacgcggcgcggattcgcagcggggcccgaccaacgcgctgccatcgaggaggccgtcgtggccgtggaggagcgtggtgcggggaagggaacgccgatagatctcgcggcgctcgatggcacctggaggctgtgttacacatcggcatcagacgtgcttgtgctgttcgaggcggccgagaggcttccactcctgcaggtgggccaaatataccagaaatttgagtgcaaagatcgatcagatggtggaactgtgaggaatgttgtaaggtggagcatcgagaacttgctggagcacaactgctggtacttaaatgcatggaccttggaatatataaagagtatgacagttggaggagcaagaaggtgcaacactgatggtctctgcgaagtttgttgtcctgtctaaacggaatatctttcttcaatttgaggaggtcgctgttgaaaatatcaagatcagcgagcaactgcagacactaatagctcctgctatacttcctcggtcatttttgagccttcaggtatatgccagcccgccaggttatatcaaataattgatcgttgacttgcacattttccttgatttaacaaaatcttaatttattctttcttggtcattgacaaatatgtgcattgatatacatttcatgtgtgccacaaaatcttaatttattctttcttggtcattgacaaatatgtgcatcggtatacatttcatgtgtcccacaatattgttctgaattctgtttgtttcttaatttatttttctgacaaatatgtggaaacttaatttattattctgacaaataaaggacacgtttcatgtgtcccacataggtttcatttgtcccacaatattgttctgacaaatatgtgcatcgatatacatttcatgtgtcccacaaaatcttaatttattctttcttggtcattgacaaatatgtgcatcggtatacattgacaaataattgatcgttgacttccacgaccacgagtagcacgacggacacgaaaatcagccaacttctctagaaacttagcaaagcagttctcagaccgatgagtggtcttttgcaatgttcacaaggctgaaagaaggtgttcctagacttctgagcagcagctaacacactgtgagaactcacaccagtaatagaactcacaccagtaatagaagacatagacttcagacgagtttcttcagcaagcaattcagacaatgtctgagccatggtgagagtatctaaactgtgaagcagccttgcacgaagagaatcaaatttaagtcgaacttccataacaaatctgtaggtaaagaacttctcaatgaacttatgggctgggcaaggcacaactgtacaagcaggtatcatggaggtcaatgcactcataagacgatcaaaggctaaataatattcatcaatggacatatcatgttgctcaatgacataagtctgctgcataagggtatgtaaaagagcaccactatcctgaacaaaccgatccttcagatgtgaccagatagtattagcagtggtgaatttggacatactcataatcatagttggtttagtgctattgaccattgcagccattaccttgccatcattgatctgccaagtcttgattgcagcagcattgcttctaccagctgctaaacctggagaatcttcagtcaaatgaaatagtaaaccatgacctcttaatgcagtctgaacacaaaacacccattctggataattctgcccatcaagcacaatattgacaacaatagcgttggccgacatattgaagagcaatgaaacactgaagaataacagatctgaaacagactggcgtgatggtgccaaaaaccccagcgggtgcagcggaagaacagtggatacactggctgcagtcttggatgagaccgtgcgaagtcatagtaaagcaacagatctggtcggggctgcactcggcgcagatacacagacggacaacgcaacgacggacgggggtgcgacgacagaaggcgggcaggggcgaacgacatggccgcaactccgggaaggggcggcgcaccgacgacagaaggcggactggggcggacggcgcatgaacaggacgcaggagtaggtccacgactgcgcatatgagatctgtgactgcgacgttaggctccgcgacggcgcaggcgcaggaggaggcggatctccgcaacggagcaggagatggcggatccgtgacggcgcaccgcgactgcagatctccgcgactgcgcaggaggactccgcgacgacgcacaggagggctctgcgacggcgcaggcgcaggcgcaggaggatgcggatctctgcgacggcgcaggagatggcggatcgggctgagatccgcgacggcgtagatccacgacggcgcaggagcgcatttgggggccgcgactgttgggcggagtccgcgacggcggctggg

SEQ ID NO: 52944 - DNA, 2778 bp, Zea Mays
cgaacggatgccaggaaggcgaggggcaaaggccaaagcgaactgaaccgatccgcggttgtgcccgtgccgcgcgccagcgccacgcttcctacaatcctactgtagtttaatccgcttgcacggaggagcaacgccgagcaatggcgctcgcagccccttcttccctccgcctcctcccgaccacgccatcgcaggcgccatctccgccctgtgcctcccgaccacgccatctgcgggagctccgtctctgccagagactcgccaccgccgccgccgccgccgccgccgccgcggccgcggccacggctccactcgcttcctcgcccaccacctccgcggacacggagcggaggaagcacgaactgctgcgcgcggttcaggaaacgcggcgcggattcgcagcggggcccgaccaacgcgctgccatcgaggaggccgtcgtggccgtggaggagcgtggtgcggggaagggaacgccgatagatctcgcggcgctcgatggcacctggaggctgtgttacacatcggcatcagacgtgcttgtgctgttcgaggcggccgagaggcttccactcctgcaggtgggccaaatataccagaaatttgagtgcaaagatcgatcagatggtggaactgtgaggaatgttgtaaggtggagcatcgagaacttgctggaggagcaagaaggtgcaacactgatggtctctgcgaagtttgttgtcctgtctaaacggaatatctttcttcaatttgaggaggtcgctgttgaaaatatcaagatcagcgagcaactgcagacactaatagctcctgctatacttcctcggtcatttttgagccttcaggtatatgccagcccgccaggttatatcaaataattgatcgttgacttgcacattttccttgatttaacaaaatcttaatttattctttcttggtcattgacaaatatgtgcattgatatacatttcatgtgtgccacaaaatcttaatttattctttcttggtcattgacaaatatgtgcatcggtatacatttcatgtgtcccacaatattgttctgaattctgtttgtttcttaatttatttttctgacaaatatgtggaaacttaatttattattctgacaaataaaggacacgtttcatgtgtcccacataggtttcatttgtcccacaatattgttctgacaaatatgtgcatcgatatacatttcatgtgtcccacaaaatcttaatttattctttcttggtcattgacaaatatgtgcatcggtatacattgacaaataattgatcgttgacttccacgaccacgagtagcacgacggacacgaaaatcagccaacttctctagaaacttagcaaagcagttctcagaccgatgagtggtcttttgcaatgttcacaaggctgaaagaaggtgttcctagacttctgagcagcagctaacacactgtgagaactcacaccagtaatagaactcacaccagtaatagaagacatagacttcagacgagtttcttcagcaagcaattcagacaatgtctgagccatggtgagagtatctaaactgtgaagcagccttgcacgaagagaatcaaatttaagtcgaacttccataacaaatctgtaggtaaagaacttctcaatgaacttatgggctgggcaaggcacaactgtacaagcaggtatcatggaggtcaatgcactcataagacgatcaaaggctaaataatattcatcaatggacatatcatgttgctcaatgacataagtctgctgcataagggtatgtaaaagagcaccactatcctgaacaaaccgatccttcagatgtgaccagatagtattagcagtggtgaatttggacatactcataatcatagttggtttagtgctattgaccattgcagccattaccttgccatcattgatctgccaagtcttgattgcagcagcattgcttctaccagctgctaaacctggagaatcttcagtcaaatgaaatagtaaaccatgacctcttaatgcagtctgaacacaaaacacccattctggataattctgcccatcaagcacaatattgacaacaatagcgttggccgacatattgaagagcaatgaaacactgaagaataacagatctgaaacagactggcgtgatggtgccaaaaaccccagcgggtgcagcggaagaacagtggatacactggctgcagtcttggatgagaccgtgcgaagtcatagtaaagcaacagatctggtcggggctgcactcggcgcagatacacagacggacaacgcaacgacggacgggggtgcgacgacagaaggcgggcaggggcgaacgacatggccgcaactccgggaaggggcggcgcaccgacgacagaaggcggactggggcggacggcgcatgaacaggacgcaggagtaggtccacgactgcgcatatgagatctgtgactgcgacgttaggctccgcgacggcgcaggcgcaggaggaggcggatctccgcaacggagcaggagatggcggatccgtgacggcgcaccgcgactgcagatctccgcgactgcgcaggaggactccgcgacgacgcacaggagggctctgcgacggcgcaggcgcaggcgcaggaggatgcggatctctgcgacggcgcaggagatggcggatcgggctgagatccgcgacggcgtagatccacgacggcgcaggagcgcatttgggggccgcgactgttgggcggagtccgcgacggcggctggg

SEQ ID NO: 52945 - DNA, 591 bp, Zea Mays
gcgaggggcaaaggccaaagcgaactgaaccgatccgcggttgtgcccgtgccgcgcgccagcgccacgcttcctacaatcctactgtagtttaatccgcttgcacggaggagcaacgccgagcaatggcgctcgcagccccttcttccctccgcctcctcccgaccacgccatcgcaggcgccatctccgccctgtgcctcccgaccacgccatctgcgggagctccgtctctgccagagactcgccaccgccgccgccgccgccgccgccgccgcggccgcggccacggctccactcgcttcctcgcccaccacctccgtggccgtggaggagcgtggtgcggggaagggaacgccgatagatctcgcggcgctcgatggcacctggaggctgtgttacacatcggcatcagacgtgcttgtgctgttcgaggcggccgagaggcttccactcctgcaggtgggccaaatataccagaaatttgagtgcaaagatcgatcagatggtggaactgtgaggaatgttgtaaggtggagcatcgagaacttgctggagaagggtgaggctcctgattgcttctcacggatgt

SEQ ID NO: 52946 - DNA, 1948 bp, Zea Mays
ctccacggtcgcgtttcacgggcgtagagagagagagagagagagagagcgcgagcgagcgaagagggcgtgagagaggagggaggccaagccgtacgcgtcgtctcctgctgtttctccccatccctttcctgcctcggcttgcaccttcaaccttacttaaagctctgacctcaaactgaaagggacctgcgaagagttttttttgcggcagtacaatggaggtatttggcaaatctgtgattgctgagcccagcaatgtgattttcttgtccgcgatccttaacacagaagggtcaaaccctagtcacaagtgtgacaagaggtgccagagcgagcgcattttggggaacatgtaccgttgcaaactgactgaaaccactcacatctgtgacaaaaactgtaaccagaggattctatatgacaaccataactcgctctgccgagtgagtgggcagctttttccgctctctccactggagcagcaagcagtgaggggcatccgcaggaagcatgaagtggacagcagtgaaggttgctgctttaagcgcaggcgcggcgcacagctgcatccttcccccttcgagaggtcctactctgctgtgtatccaatcccgagccaggttggagatggcatggacatgagctagagctaatgagacttccttttcttcggccagccacctaatttcgttctgtctaccctttttccctacgattacaagatggaactataagagcttccttctttttagacttatatgagactccttagatgcaccgaataaatgttcatgtagtatctattctgtttcatgggaccttgttgtaactcgtgaactttgattgaacgcctattttgatttagtggtactttcagataatcattagattcttctcttttttttgtcacacttccaatttagttattttatgtgctttactttttgttcaactaatttgccttctaattttaatcctttgatgcaatttaatataattgagaggtttacatttgtccgccaatgtaagtaagtgaaggattctttggtcctgtaatccaggcacagggaactgacatgcctttgctgactgaagtttttgtacagctgttactagtgttttgcttgacaagttcctaatcaagcttgaatcatttacggtgaacatctctgattccattttcatctgttgggtggcaagaaactaatcaaggagtctctctcttctcattctctgcgtggaggactgtttagctgtagctgagtggcatgctttccagaacataaattggtggaagagaagtttgatgctaccactttgcgagaaggaccgaaccaacacaataacatcaaacttagatactgcagtttaccaactttttcaatattgaagattgaagagcagcaagatcagcctcttccatatgcagtttgaagaaatcctttttaaggtctattagactagaatccttccggcaatcttgccttcaccccaagcatgctgcataccttgtaatgagtgtggtacttgacgactgttaccaaagtttttttgagggtaagactgttaccaaagtagtggatgcttttctttggcacgaagtttctttcatatccacctagtttgtctgtaaaaaaaagtgaaacaccgagaaagacgatcagactaacctaccgtttggttcacatattggtaacgtaataggtaactgataacgttaaatcatgtttgtttaagtctaactgtaatcgataccacactataaatggatatcgccttttttaatttgttactgtcggtatttgagtgtgaatcgttaccattactatttacgttacatttcgcgaaccaaacgatacctaaggtgaatgaggcaatttaaattttcttctgattttggtcgctgttcaaatctaactccaaagcaccaaaaaagcacaaaaaa

SEQ ID NO: 52947 - DNA, 3033 bp, Zea Mays
ctccacggtcgcgtttcacgggcgtagagagagagagagagagagagagcgcgagcgagcgaagagggcgtgagagaggagggaggccaagccgtacgcgtcgtctcctgctgtttctccccatccctttcctgcctcggcttgcaccttcaaccttacttgtaagttccatcgttttaactctagagaggctttttgctcgcgaatattttggaacgaagatgctccgccttgattttggtttagctgttgttaatctgaatcgtttggttgcgtttatcgtggatttggacgtcgagacgccgctatatgaggaattaatttgattttattgcttatgataggggttgttgtcggttggcgggttaccgttcagatctagtgtagtaaaattgcagtggtgatgggaggagaggagtgggcaagttaggttattaggtttctaggtccatgtttgtttatttttttggtgaggatggtttctggttcacctaacggttgaaagggatgcgtgctgacttggcaaaggtcgttgtgtttttgtttgtacgtacgagattttttttatatctacttggctaattttaaaacggttcaaggttcaatgccactatgccggcggtactatctgcatctcagattcgggtttggtaccatgatttttttacagatttggccaaactgcatgaagttcagtggattatgtcaattatagagtcaggcgcctgagtgaacctttacagattttatgacgtcgagagttgggtaaagttggcgcgaaatcgttgcgctatgatttatttatttatctgtagttacgctagattacacactgtcggttaatctgttcctaatttcctatcacaatacaatcgccaatgcacagttgactaccttttgttccgcgtattgctcagatgagttggctcagcagtagcatcaagaaaaaacacattgtggtcatttccaacagcccccaaacagaactctgaagcaatttttttgttttgggttgcagaaagctctgacctcaaactgaaagggacctgcgaagagttttttttgcggcagtacaatggaggtatttggcaaatctgtgattgctgagcccagcaatgtgattttcttgtccgcgatccttaacacagaagggtcaaaccctagtcacaagtgtgacaagaggtgccagagcgagcgcattttggggaacatgtaccgttgcaaactgactgaaaccactcacatctgtgacaaaaactgtaaccagaggattctatatgacaaccataactcgctctgccgagtgagtgggcagctttttccgctctctccactggagcagcaagcagtgaggggcatccgcaggaagcatgaagtggacagcagtgaaggttgctgctttaagcgcaggcgcggcgcacagctgcatccttcccccttcgagaggtcctactctgctgtgtatccaatcccgagccaggttggagatggcatggacatgagctagagctaatgagacttccttttcttcggccagccacctaatttcgttctgtctaccctttttccctacgattacaagatggaactataagagcttccttctttttagacttatatgagactccttagatgcaccgaataaatgttcatgtagtatctattctgtttcatgggaccttgttgtaactcgtgaactttgattgaacgcctattttgatttagtggtactttcagataatcattagattcttctcttttttttgtcacacttccaatttagttattttatgtgctttactttttgttcaactaatttgccttctaattttaatcctttgatgcaatttaatataattgagaggtttacatttgtccgccaatgtaagtaagtgaaggattctttggtcctgtaatccaggcacagggaactgacatgcctttgctgactgaagtttttgtacagctgttactagtgttttgcttgacaagttcctaatcaagcttgaatcatttacggtttgttcccatatagctcaattctatctgttgcttaactcttttttttacaggttatgtttctaacgcttaatgttttcctatgttcttttttgtcttaacatttgttgtatgcaggaccatccaggttctaatcgttttttgggaaatgttttgttcttttttatataactatattgctaacttaatttaatttgttgattaatttgcctttctttgtttttgcaggtgaacatctctgattccattttcatctgttgggtggcaagaaactaatcaaggagtctctctcttctcattctctgcgtggaggactgtttagctgtagctgagtggcatgctttccagaacataaattggtggaagagaagtttgatgctaccactttgcgagaaggaccgaaccaacacaataacatcaaacttagatactgcagtttaccaactttttcaatattgaagattgaagagcagcaagatcagcctcttccatatgcagtttgaagaaatcctttttaaggtctattagactagaatccttccggcaatcttgccttcaccccaagcatgctgcataccttgtaatgagtgtggtacttgacgactgttaccaaagtttttttgagggtaagactgttaccaaagtagtggatgcttttctttggcacgaagtttctttcatatccacctagtttgtctgtaaaaaaaagtgaaacaccgagaaagacgatcagactaacctaccgtttggttcacatattggtaacgtaataggtaactgataacgttaaatcatgtttgtttaagtctaactgtaatcgataccacactataaatggatatcgccttttttaatttgttactgtcggtatttgagtgtgaatcgttaccattactatttacgttacatttcgcgaaccaaacgatacctaaggtgaatgaggcaatttaaattttcttctgattttggtcgctgttcaaatctaactccaaagcaccaaaaaagcacaaaaaa

SEQ ID NO: 52948 - DNA, 947 bp, Zea Mays
ctccacggtcgcgtttcacgggcgtagagagagagagagagagagagagcgcgagcgagcgaagagggcgtgagagaggagggaggccaagccgtacgcgtcgtctcctgctgtttctccccatccctttcctgcctcggcttgcaccttcaaccttacttgtgaacatctctgattccattttcatctgttgggtggcaagaaactaatcaaggagtctctctcttctcattctctgcgtggaggactgtttagctgtagctgagtggcatgctttccagaacataaattggtggaagagaagtttgatgctaccactttgcgagaaggaccgaaccaacacaataacatcaaacttagatactgcagtttaccaactttttcaatattgaagattgaagagcagcaagatcagcctcttccatatgcagtttgaagaaatcctttttaaggtctattagactagaatccttccggcaatcttgccttcaccccaagcatgctgcataccttgtaatgagtgtggtacttgacgactgttaccaaagtttttttgagggtaagactgttaccaaagtagtggatgcttttctttggcacgaagtttctttcatatccacctagtttgtctgtaaaaaaaagtgaaacaccgagaaagacgatcagactaacctaccgtttggttcacatattggtaacgtaataggtaactgataacgttaaatcatgtttgtttaagtctaactgtaatcgataccacactataaatggatatcgccttttttaatttgttactgtcggtatttgagtgtgaatcgttaccattactatttacgttacatttcgcgaaccaaacgatacctaaggtgaatgaggcaatttaaattttcttctgattttggtcgctgttcaaatctaactccaaagcaccaaaaaagcacaaaaaa

SEQ ID NO: 52949 - DNA, 3168 bp, Zea Mays
ctgcaactgcaagtctgcaaggcggagaagccggtcgttcgttcatccggtgcgctatcccaaatacagcggacaacttcgcacctttttcacccatcactcgcgaacgcaggtcgcactgtcgcagcatgcttcgcctctccatcgccgtcctcacctcacctctcctccccacgtccgtccccgccgtccgaccccatccgcgccgcctactccgcctccgtctgcgctccctcgccgcctcctcctcgctctcgccgtccgcccgcagcctccgcctcctcgagtggggcaaggtctgcgacgccgtcgcctccttcgccggcactgcccacggccgcgacgccacaacgaaacaactgtgggaggtggaggatgtgagctatgagcagagccagatgctgctccaggagacggaggcggccgtgttgctgcttgacaacgctggtggggcaatggatttctcggggttggatacaatagagtcagcaatacatagtgtctctgggggcgctgtgataaaaggcctggaagcaatggcagtcactagcctgatgatgtttgttgaatccttgcaagtaaacattaaagctgccatgaaactggatgaaggctcatgtagtcgattaacaacacttacagaaacaattttagatgctgtcattaacaagtcattagtgaaatccatacaagatattgttgatgatgatggctctgttaaagacactgcaagccctgagctgagacggtatcgagagcaagtacagcgtctagaaaacaggttatatcagcttatggacaagttgatgcgcaatgctgatgatgaagcttcattgaagtatgcattgtaaatggaagatgctgcattagaacaaccatggataattcttcattttttgatggattattgctctccaggtcagatgctggaagcatgatagaaccaattgttgctgttccgttaaacgatgagttgcaggaatcaagagcattagtggctaaagctgaactggatgtcttatcaaaacttactgataagattcgtcttgatcttgatagcattcagaatttgcttcaggaaacaattaaactcgataagatcgcagctcgtgcaaaatacagtattgcatatgatggaacatttcctgacctgtatttgccgaactttgagaatgaaactgtcactagtgctacaggtggatctatcaaacaaatttcctcagctcaacttcctaagaaggcatggaaactgtatatgccaaatgcataccatccactactacttcagcggcatcaggaaaatatccatcgtgccaaaagggatgttgcaagtgccacagcggagatccggaggaggaggatatatgggcaagatattgcagaagaagatcaattggcatcagaccttgattccatgaaacttagggtttcccaactggagaaagaccagccagtaccagtagattttatgattgctgaagaaactactgtcttggtgataactggcccaaatacagggggtaaaacaatcagcttgaagacggttggcctggcatcattgatggctaagataggtctatacattctagcttctgaaccagtaaaaattccatggttcaatgctgtttatgctgacattggagatgagcaatctctgacccaatcactctctacattttctggacatctgaagcagattggtgccattcgtgcagagtcaacttcagagtccttggtccttttggatgaggtaggcgctgggacaaacccacttgaaggagccgctctggggatgtctcttttggagtcttttgctgaagctggctcctttctgactctagcaacaactcatcatggagaactcaaaacactaaaatacagcaataactcatttgagaatgcatgcatggaatttgatgaagagaacctaaagcctacattcaagattctgtggggaataccaggtcgctcgaatgcaatcaatattactgaaaggctgggtttgcctttggatatagtagaaagttccaggcgtttacttggaacagctggtgcagagataaatgctttgataatggacatggaaagactcaaacaagaatatcaacaacatcttcaggaggcacaatatcttcttatgcagtccaaggagcttcataacaacttggaactggcacaaaagagcattgtagaccacacttctgctcagagaaaacgaaaggcgagagtaatttcagagtatgctgttatggcccgttctatcattcgtaagaagtttcagcagttccaagaatctgctatagctgaaagagtgaaagaagaagagaatgctgtgaatgatgccaaatctgacagagtgaaggatcctatgccggcaaatacatctgccattggaaacatacagaacatagataccagcttgggcatgacagccaacgatgatgaagatgaggttccagaagttggagattcagtgtacgttcctaagctcaagaatgaagctaccgtggtgaaaatagattcgtccaaaaatgaagtgcaagtccaagccggtatgatgaagctcaaactaaagctgaaagatgttaaggttcagaagcggaaagtatccagatagaacatctacactgtcctgcactagcagatattcagataaatatgcatatgctgtttcgtccaattcgtaccatttcattggcctcattttcagcaataataataatgtggtctttcaagtgaaaatatggatttattatctgcatgtacttctcattcttcactacttgcggtactcaaaaccttcagcagagttccagaacatcttcagattatcacttctttatagaaaatgagcttgtgatttatcacttgtctatataaattttagttcttcgaaggttcttaaaaagaagtagcatgccaatgaaatagttggcactagctggttatttgaaattgccaaattggccacattgtagagatgtttctgtgcggcgccggttttatatggcttcacgctatttccaggagccttctatcccatctatctcatttcttattttaaattttactatgttttttccctaaaccctaaattgtactatgtaaacactgcaatataatgaacggcataaaccatctcggcaaaggacgagaactgcttctttg

SEQ ID NO: 52950 - DNA, 3130 bp, Zea Mays
ctgcaactgcaagtctgcaaggcggagaagccggtcgttcgttcatccggtgcgctatcccaaatacagcggacaacttcgcacctttttcacccatcactcgcgaacgcaggtcgcactgtcgcagcatgcttcgcctctccatcgccgtcctcacctcacctctcctccccacgtccgtccccgccgtccgaccccatccgcgccgcctactccgcctccgtctgcgctccctcgccgcctcctcctcgctctcgccgtccgcccgcagcctccgcctcctcgagtggggcaaggtctgcgacgccgtcgcctccttcgccggcactgcccacggccgcgacgccacaacgaaacaactgtgggaggtggaggatgtgagctatgagcagagccagatgctgctccaggagacggaggcggccgtgttgctgcttgacaacgctggtggggcaatggatttctcggggttggatacaatagagtcagcaatacatagtgtctctgggggcgctgtgataaaaggcctggaagcaatggcagtcactagcctgatgatgtttgttgaatccttgcaagtaaacattaaagctgccatgaaactggatgaaggctcatgtagtcgattaacaacacttacagaaacaattttagatgctgtcattaacaagtcattagtgaaatccatacaagatattgttgatgatgatggctctgttaaagacactgcaagccctgagctgagacggtatcgagagcaagtacagcgtctagaaaacaggttatatcagcttatggacaagttgatgcgcaatgctgatgatgaagcttcattgtcggaagtatgcattgtaaatggaagatgctgcattagaacaaccatggataattcttcattttttgatggattattgctctccaggtcagatgctggaagcatgatagaaccaattgttgctgttccgttaaacgatgagttgcaggaatcaagagcattagtggctaaagctgaactggatgtcttatcaaaacttactgataagattcgtcttgatcttgatagcattcagaatttgcttcaggaaacaattaaactcgataagatcgcagctcgtgcaaaatacagtattgcatatgatggaacatttcctgacctgtatttgccgaactttgagaatgaaactgtcactagtgctacaggtggatctatcaaacaaatttcctcagctcaacttcctaagaaggcatggaaactgtatatgccaaatgcataccatccactactacttcagcggcatcaggaaaatatccatcgtgccaaaagggatgttgcaagtgccacagcggagatccggaggaggaggatatatgggcaagatattgcagaagaagatcaattggcatcagaccttgattccatgaaacttagggtttcccaactggagaaagaccagccagtaccagtagattttatgattgctgaagaaactactgtcttggtgataactggcccaaatacagggggtaaaacaatcagcttgaagacggttggcctggcatcattgatggctaagataggtctatacattctagcttctgaaccagtaaaaattccatggttcaatgctgtttatgctgacattggagatgagcaatctctgacccaatcactctctacattttctggacatctgaagcagattggtgccattcgtgcagagtcaacttcagagtccttggtccttttggatgaggtaggcgctgggacaaacccacttgaaggagccgctctggggatgtctcttttggagtcttttgctgaagctggctcctttctgactctagcaacaactcatcatggagaactcaaaacactaaaatacagcaataactcatttgagaatgcatgcatggaatttgatgaagagaacctaaagcctacattcaagattctgtggggaataccagttgataatggacatggaaagactcaaacaagaatatcaacaacatcttcaggaggcacaatatcttcttatggtgctacgttgtatggttgttttgtattttcccctttccttaccttctaatggaatttgtggcagtccaaggagcttcataacaacttggaactggcacaaaagagcattgtagaccacacttctgctcagagaaaacgaaaggcgagagtaatttcagagtatgctgttatggcccgttctatcattcgtaagaagtttcagcagttccaagaatctgctatagctgaaagagtgaaagaagaagagaatgctgtgaatgatgccaaatctgacagagtgaaggatcctatgccggcaaatacatctgccattggaaacatacagaacatagataccagcttgggcatgacagccaacgatgatgaagatgaggttccagaagttggagattcagtgtacgttcctaagctcaagaatgaagctaccgtggtgaaaatagattcgtccaaaaatgaagtgcaagtccaagccggtatgatgaagctcaaactaaagctgaaagatgttaaggttcagaagcggaaagtatccagatagaacatctacactgtcctgcactagcagatattcagataaatatgcatatgctgtttcgtccaattcgtaccatttcattggcctcattttcagcaataataataatgtggtctttcaagtgaaaatatggatttattatctgcatgtacttctcattcttcactacttgcggtactcaaaaccttcagcagagttccagaacatcttcagattatcacttctttatagaaaatgagcttgtgatttatcacttgtctatataaattttagttcttcgaaggttcttaaaaagaagtagcatgccaatgaaatagttggcactagctggttatttgaaattgccaaattggccacattgtagagatgtttctgtgcggcgccggttttatatggcttcacgctatttccaggagccttctatcccatctatctcatttcttattttaaattttactatgttttttccctaaaccctaaattgtactatgtaaacactgcaatataatgaacggcataaaccatctcggcaaaggacgagaactgcttctttg

SEQ ID NO: 52951 - DNA, 3074 bp, Zea Mays
ctgcaactgcaagtctgcaaggcggagaagccggtcgttcgttcatccggtgcgctatcccaaatacagcggacaacttcgcacctttttcacccatcactcgcgaacgcaggtcgcactgtcgcagcatgcttcgcctctccatcgccgtcctcacctcacctctcctccccacgtccgtccccgccgtccgaccccatccgcgccgcctactccgcctccgtctgcgctccctcgccgcctcctcctcgctctcgccgtccgcccgcagcctccgcctcctcgagtggggcaaggtctgcgacgccgtcgcctccttcgccggcactgcccacggccgcgacgccacaacgaaacaactgtgggaggtggaggatgtgagctatgagcagagccagatgctgctccaggagacggaggcggccgtgttgctgcttgacaacgctggtggggcaatggatttctcggggttggatacagttgcgatagagtcagcaatacatagtgtctctgggggcgctgtgataaaaggcctggaagcaatggcagtcactagcctgatgatgtttgttgaatccttgcaagtaaacattaaagctgccatgaaactggatgaaggctcatgtagtcgattaacaacacttacagaaacaattttagatgctgtcattaacaagtcattagtgaaatccatacaagatattgttgatgatgatggctctgttaaagacactgcaagccctgagctgagacggtatcgagagcaagtacagcgtctagaaaacaggttatatcagcttatggacaagttgatgcgcaatgctgatgatgaagcttcattgtcggaagtatgcattgtaaatggaagatgctgcattagaacaaccatggataattcttcattttttgatggattattgctctccaggtcagatgctggaagcatgatagaaccaattgttgctgttccgttaaacgatgagttgcaggaatcaagagcattagtggctaaagctgaactggatgtcttatcaaaacttactgataagattcgtcttgatcttgatagcattcagaatttgcttcaggaaacaattaaactcgataagatcgcagctcgtgcaaaatacagtattgcatatgatggaacatttcctgacctgtatttgccgaactttgagaatgaaactgtcactagtgctacaggtggatctatcaaacaaatttcctcagctcaacttcctaagaaggcatggaaactgtatatgccaaatgcataccatccactactacttcagcggcatcaggaaaatatccatcgtgccaaaagggatgttgcaagtgccacagcggagatccggaggaggaggatatatgggcaagatattgcagaagaagatcaattggcatcagaccttgattccatgaaacttagggtttcccaactggagaaagaccagccagtaccagtagattttatgattgctgaagaaactactgtcttggtgataactggcccaaatacagggggtaaaacaatcagcttgaagacggttggcctggcatcattgatggctaagataggtctatacattctagcttctgaaccagtaaaaattccatggttcaatgctgtttatgctgacattggagatgagcaatctctgacccaatcactctctacattttctggacatctgaagcagattggtgccattcgtgcagagtcaacttcagagtccttggtccttttggatgaggtaggcgctgggacaaacccacttgaaggagccgctctggggatgtctcttttggagtcttttgctgaagctggctcctttctgactctagcaacaactcatcatggagaactcaaaacactaaaatacagcaataactcatttgagaatgcatgcatggaatttgatgaagagaacctaaagcctacattcaagattctgtggggaataccagttgataatggacatggaaagactcaaacaagaatatcaacaacatcttcaggaggcacaatatcttcttatgcagtccaaggagcttcataacaacttggaactggcacaaaagagcattgtagaccacacttctgctcagagaaaacgaaaggcgagagtaatttcagagtatgctgttatggcccgttctatcattcgtaagaagtttcagcagttccaagaatctgctatagctgaaagagtgaaagaagaagagaatgctgtgaatgatgccaaatctgacagagtgaaggatcctatgccggcaaatacatctgccattggaaacatacagaacatagataccagcttgggcatgacagccaacgatgatgaagatgaggttccagaagttggagattcagtgtacgttcctaagctcaagaatgaagctaccgtggtgaaaatagattcgtccaaaaatgaagtgcaagtccaagccggtatgatgaagctcaaactaaagctgaaagatgttaaggttcagaagcggaaagtatccagatagaacatctacactgtcctgcactagcagatattcagataaatatgcatatgctgtttcgtccaattcgtaccatttcattggcctcattttcagcaataataataatgtggtctttcaagtgaaaatatggatttattatctgcatgtacttctcattcttcactacttgcggtactcaaaaccttcagcagagttccagaacatcttcagattatcacttctttatagaaaatgagcttgtgatttatcacttgtctatataaattttagttcttcgaaggttcttaaaaagaagtagcatgccaatgaaatagttggcactagctggttatttgaaattgccaaattggccacattgtagagatgtttctgtgcggcgccggttttatatggcttcacgctatttccaggagccttctatcccatctatctcatttcttattttaaattttactatgttttttccctaaaccctaaattgtactatgtaaacactgcaatataatgaacggcataaaccatctcggcaaaggacgagaactgcttctttg

SEQ ID NO: 52952 - DNA, 3172 bp, Zea Mays
ctgcaactgcaagtctgcaaggcggagaagccggtcgttcgttcatccggtgcgctatcccaaatacagcggacaacttcgcacctttttcacccatcactcgcgaacgcaggtcgcactgtcgcagcatgcttcgcctctccatcgccgtcctcacctcacctctcctccccacgtccgtccccgccgtccgaccccatccgcgccgcctactccgcctccgtctgcgctccctcgccgcctcctcctcgctctcgccgtccgcccgcagcctccgcctcctcgagtggggcaaggtctgcgacgccgtcgcctccttcgccggcactgcccacggccgcgacgccacaacgaaacaactgtgggaggtggaggatgtgagctatgagcagagccagatgctgctccaggagacggaggcggccgtgttgctgcttgacaacgctggtggggcaatggatttctcggggttggatacaatagagtcagcaatacatagtgtctctgggggcgctgtgataaaaggcctggaagcaatggcagtcactagcctgatgatgtttgttgaatccttgcaagtaaacattaaagctgccatgaaactggatgaaggctcatgtagtcgattaacaacacttacagaaacaattttagatgctgtcattaacaagtcattagtgaaatccatacaagatattgttgatgatgatggctctgttaaagacactgcaagccctgagctgagacggtatcgagagcaagtacagcgtctagaaaacaggttatatcagcttatggacaagttgatgcgcaatgctgatgatgaagcttcattgtcggaagtatgcattgtaaatggaagatgctgcattagaacaaccatggataattcttcattttttgatggattattgctctccaggtcagatgctggaagcatgatagaaccaattgttgctgttccgttaaacgatgagttgcaggaatcaagagcattagtggctaaagctgaactggatgtcttatcaaaacttactgataagattcgtcttgatcttgatagcattcagaatttgcttcaggaaacaattaaactcgataagatcgcagctcgtgcaaaatacagtattgcatatgatggaacatttcctgacctgtatttgccgaactttgagaatgaaactgtcactagtgctacaggtggatctatcaaacaaatttcctcagctcaacttcctaagaaggcatggaaactgtatatgccaaatgcataccatccactactacttcagcggcatcaggaaaatatccatcgtgccaaaagggatgttgcaagtgccacagcggagatccggaggaggaggatatatgggcaagatattgcagaagaagatcaattggcatcagaccttgattccatgaaacttagggtttcccaactggagaaagaccagccagtaccagtagattttatgattgctgaagaaactactgtcttggtgataactggcccaaatacagggggtaaaacaatcagcttgaagacggttggcctggcatcattgatggctaagataggtctatacattctagcttctgaaccagtaaaaattccatggttcaatgctgtttatgctgacattggagatgagcaatctctgacccaatcactctctacattttctggacatctgaagcagattggtgccattcgtgcagagtcaacttcagagtccttggtccttttggatgaggtaggcgctgggacaaacccacttgaaggagccgctctggggatgtctcttttggagtcttttgctgaagctggctcctttctgactctagcaacaactcatcatggagaactcaaaacactaaaatacagcaataactcatttgagaatgcatgcatggaatttgatgaagagaacctaaagcctacattcaagattctgtggggaataccaggtcgctcgaatgcaatcaatattactgaaaggctgggtttgcctttggatatagtagaaagttccaggcgtttacttggaacagctggtgcagagataaatgctttgataatggacatggaaagactcaaacaagaatatcaacaacatcttcaggaggcacaatatcttcttatgcagtccaaggagcttcataacaacttggaactggcacaaaagagcattgtagaccacacttctgctcagagaaaacgaaaggcgagagtaatttcagagtatgctgttatggcccgttctatcattcgtaagaagtttcagcagttccaagaatctgctatagctgaaagagtgaaagaagaagagaatgctgtgaatgatgccaaatctgacagagtgaaggatcctatgccggcaaatacatctgccattggaaacatacagaacatagataccagcttgggcatgacagccaacgatgatgaagatgaggttccagaagttggagattcagtgtacgttcctaagctcaagaatgaagctaccgtggtgaaaatagattcgtccaaaaatgaagtgcaagtccaagccggtatgatgaagctcaaactaaagctgaaagatgttaaggttcagaagcggaaagtatccagatagaacatctacactgtcctgcactagcagatattcagataaatatgcatatgctgtttcgtccaattcgtaccatttcattggcctcattttcagcaataataataatgtggtctttcaagtgaaaatatggatttattatctgcatgtacttctcattcttcactacttgcggtactcaaaaccttcagcagagttccagaacatcttcagattatcacttctttatagaaaatgagcttgtgatttatcacttgtctatataaattttagttcttcgaaggttcttaaaaagaagtagcatgccaatgaaatagttggcactagctggttatttgaaattgccaaattggccacattgtagagatgtttctgtgcggcgccggttttatatggcttcacgctatttccaggagccttctatcccatctatctcatttcttattttaaattttactatgttttttccctaaaccctaaattgtactatgtaaacactgcaatataatgaacggcataaaccatctcggcaaaggacgagaactgcttctttg

SEQ ID NO: 52953 - DNA, 3174 bp, Zea Mays
ctgcaactgcaagtctgcaaggcggagaagccggtcgttcgttcatccggtgcgctatcccaaatacagcggacaacttcgcacctttttcacccatcactcgcgaacgcaggtcgcactgtcgcagcatgcttcgcctctccatcgccgtcctcacctcacctctcctccccacgtccgtccccgccgtccgaccccatccgcgccgcctactccgcctccgtctgcgctccctcgccgcctcctcctcgctctcgccgtccgcccgcagcctccgcctcctcgagtggggcaaggtctgcgacgccgtcgcctccttcgccggcactgcccacggccgcgacgccacaacgaaacaactgtgggaggtggaggatgtgagctatgagcagagccagatgctgctccaggagacggaggcggccgtgttgctgcttgacaacgctggtggggcaatggatttctcggggttggatacagttgcgatagagtcagcaatacatagtgtctctgggggcgctgtgataaaaggcctggaagcaatggcagtcactagcctgatgatgtttgttgaatccttgcaagtaaacattaaagctgccatgaaactggatgaaggctcatgtagtcgattaacaacacttacagaaacaattttagatgctgtcattaacaagtcattagtgaaatccatacaagatattgttgatgatgatggctctgttaaagacactgcaagccctgagctgagacggtatcgagagcaagtacagcgtctagaaaacaggttatatcagcttatggacaagttgatgcgcaatgctgatgatgaagcttcattgaagtatgcattgtaaatggaagatgctgcattagaacaaccatggataattcttcattttttgatggattattgctctccaggtcagatgctggaagcatgatagaaccaattgttgctgttccgttaaacgatgagttgcaggaatcaagagcattagtggctaaagctgaactggatgtcttatcaaaacttactgataagattcgtcttgatcttgatagcattcagaatttgcttcaggaaacaattaaactcgataagatcgcagctcgtgcaaaatacagtattgcatatgatggaacatttcctgacctgtatttgccgaactttgagaatgaaactgtcactagtgctacaggtggatctatcaaacaaatttcctcagctcaacttcctaagaaggcatggaaactgtatatgccaaatgcataccatccactactacttcagcggcatcaggaaaatatccatcgtgccaaaagggatgttgcaagtgccacagcggagatccggaggaggaggatatatgggcaagatattgcagaagaagatcaattggcatcagaccttgattccatgaaacttagggtttcccaactggagaaagaccagccagtaccagtagattttatgattgctgaagaaactactgtcttggtgataactggcccaaatacagggggtaaaacaatcagcttgaagacggttggcctggcatcattgatggctaagataggtctatacattctagcttctgaaccagtaaaaattccatggttcaatgctgtttatgctgacattggagatgagcaatctctgacccaatcactctctacattttctggacatctgaagcagattggtgccattcgtgcagagtcaacttcagagtccttggtccttttggatgaggtaggcgctgggacaaacccacttgaaggagccgctctggggatgtctcttttggagtcttttgctgaagctggctcctttctgactctagcaacaactcatcatggagaactcaaaacactaaaatacagcaataactcatttgagaatgcatgcatggaatttgatgaagagaacctaaagcctacattcaagattctgtggggaataccaggtcgctcgaatgcaatcaatattactgaaaggctgggtttgcctttggatatagtagaaagttccaggcgtttacttggaacagctggtgcagagataaatgctttgataatggacatggaaagactcaaacaagaatatcaacaacatcttcaggaggcacaatatcttcttatgcagtccaaggagcttcataacaacttggaactggcacaaaagagcattgtagaccacacttctgctcagagaaaacgaaaggcgagagtaatttcagagtatgctgttatggcccgttctatcattcgtaagaagtttcagcagttccaagaatctgctatagctgaaagagtgaaagaagaagagaatgctgtgaatgatgccaaatctgacagagtgaaggatcctatgccggcaaatacatctgccattggaaacatacagaacatagataccagcttgggcatgacagccaacgatgatgaagatgaggttccagaagttggagattcagtgtacgttcctaagctcaagaatgaagctaccgtggtgaaaatagattcgtccaaaaatgaagtgcaagtccaagccggtatgatgaagctcaaactaaagctgaaagatgttaaggttcagaagcggaaagtatccagatagaacatctacactgtcctgcactagcagatattcagataaatatgcatatgctgtttcgtccaattcgtaccatttcattggcctcattttcagcaataataataatgtggtctttcaagtgaaaatatggatttattatctgcatgtacttctcattcttcactacttgcggtactcaaaaccttcagcagagttccagaacatcttcagattatcacttctttatagaaaatgagcttgtgatttatcacttgtctatataaattttagttcttcgaaggttcttaaaaagaagtagcatgccaatgaaatagttggcactagctggttatttgaaattgccaaattggccacattgtagagatgtttctgtgcggcgccggttttatatggcttcacgctatttccaggagccttctatcccatctatctcatttcttattttaaattttactatgttttttccctaaaccctaaattgtactatgtaaacactgcaatataatgaacggcataaaccatctcggcaaaggacgagaactgcttctttg

SEQ ID NO: 52954 - DNA, 3178 bp, Zea Mays
ctgcaactgcaagtctgcaaggcggagaagccggtcgttcgttcatccggtgcgctatcccaaatacagcggacaacttcgcacctttttcacccatcactcgcgaacgcaggtcgcactgtcgcagcatgcttcgcctctccatcgccgtcctcacctcacctctcctccccacgtccgtccccgccgtccgaccccatccgcgccgcctactccgcctccgtctgcgctccctcgccgcctcctcctcgctctcgccgtccgcccgcagcctccgcctcctcgagtggggcaaggtctgcgacgccgtcgcctccttcgccggcactgcccacggccgcgacgccacaacgaaacaactgtgggaggtggaggatgtgagctatgagcagagccagatgctgctccaggagacggaggcggccgtgttgctgcttgacaacgctggtggggcaatggatttctcggggttggatacagttgcgatagagtcagcaatacatagtgtctctgggggcgctgtgataaaaggcctggaagcaatggcagtcactagcctgatgatgtttgttgaatccttgcaagtaaacattaaagctgccatgaaactggatgaaggctcatgtagtcgattaacaacacttacagaaacaattttagatgctgtcattaacaagtcattagtgaaatccatacaagatattgttgatgatgatggctctgttaaagacactgcaagccctgagctgagacggtatcgagagcaagtacagcgtctagaaaacaggttatatcagcttatggacaagttgatgcgcaatgctgatgatgaagcttcattgtcggaagtatgcattgtaaatggaagatgctgcattagaacaaccatggataattcttcattttttgatggattattgctctccaggtcagatgctggaagcatgatagaaccaattgttgctgttccgttaaacgatgagttgcaggaatcaagagcattagtggctaaagctgaactggatgtcttatcaaaacttactgataagattcgtcttgatcttgatagcattcagaatttgcttcaggaaacaattaaactcgataagatcgcagctcgtgcaaaatacagtattgcatatgatggaacatttcctgacctgtatttgccgaactttgagaatgaaactgtcactagtgctacaggtggatctatcaaacaaatttcctcagctcaacttcctaagaaggcatggaaactgtatatgccaaatgcataccatccactactacttcagcggcatcaggaaaatatccatcgtgccaaaagggatgttgcaagtgccacagcggagatccggaggaggaggatatatgggcaagatattgcagaagaagatcaattggcatcagaccttgattccatgaaacttagggtttcccaactggagaaagaccagccagtaccagtagattttatgattgctgaagaaactactgtcttggtgataactggcccaaatacagggggtaaaacaatcagcttgaagacggttggcctggcatcattgatggctaagataggtctatacattctagcttctgaaccagtaaaaattccatggttcaatgctgtttatgctgacattggagatgagcaatctctgacccaatcactctctacattttctggacatctgaagcagattggtgccattcgtgcagagtcaacttcagagtccttggtccttttggatgaggtaggcgctgggacaaacccacttgaaggagccgctctggggatgtctcttttggagtcttttgctgaagctggctcctttctgactctagcaacaactcatcatggagaactcaaaacactaaaatacagcaataactcatttgagaatgcatgcatggaatttgatgaagagaacctaaagcctacattcaagattctgtggggaataccaggtcgctcgaatgcaatcaatattactgaaaggctgggtttgcctttggatatagtagaaagttccaggcgtttacttggaacagctggtgcagagataaatgctttgataatggacatggaaagactcaaacaagaatatcaacaacatcttcaggaggcacaatatcttcttatgcagtccaaggagcttcataacaacttggaactggcacaaaagagcattgtagaccacacttctgctcagagaaaacgaaaggcgagagtaatttcagagtatgctgttatggcccgttctatcattcgtaagaagtttcagcagttccaagaatctgctatagctgaaagagtgaaagaagaagagaatgctgtgaatgatgccaaatctgacagagtgaaggatcctatgccggcaaatacatctgccattggaaacatacagaacatagataccagcttgggcatgacagccaacgatgatgaagatgaggttccagaagttggagattcagtgtacgttcctaagctcaagaatgaagctaccgtggtgaaaatagattcgtccaaaaatgaagtgcaagtccaagccggtatgatgaagctcaaactaaagctgaaagatgttaaggttcagaagcggaaagtatccagatagaacatctacactgtcctgcactagcagatattcagataaatatgcatatgctgtttcgtccaattcgtaccatttcattggcctcattttcagcaataataataatgtggtctttcaagtgaaaatatggatttattatctgcatgtacttctcattcttcactacttgcggtactcaaaaccttcagcagagttccagaacatcttcagattatcacttctttatagaaaatgagcttgtgatttatcacttgtctatataaattttagttcttcgaaggttcttaaaaagaagtagcatgccaatgaaatagttggcactagctggttatttgaaattgccaaattggccacattgtagagatgtttctgtgcggcgccggttttatatggcttcacgctatttccaggagccttctatcccatctatctcatttcttattttaaattttactatgttttttccctaaaccctaaattgtactatgtaaacactgcaatataatgaacggcataaaccatctcggcaaaggacgagaactgcttctttg

SEQ ID NO: 52955 - DNA, 3094 bp, Zea Mays
ctgcaactgcaagtctgcaaggcggagaagccggtcgttcgttcatccggtgcgctatcccaaatacagcggacaacttcgcacctttttcacccatcactcgcgaacgcaggtcgcactgtcgcagcatgcttcgcctctccatcgccgtcctcacctcacctctcctccccacgtccgtccccgccgtccgaccccatccgcgccgcctactccgcctccgtctgcgctccctcgccgcctcctcctcgctctcgccgtccgcccgcagcctccgcctcctcgagtggggcaaggtctgcgacgccgtcgcctccttcgccggcactgcccacggccgcgacgccacaacgaaacaactgtgggaggtggaggatgtgagctatgagcagagccagatgctgctccaggagacggaggcggccgtgttgctgcttgacaacgctggtggggcaatggatttctcggggttggatacagttgcgatagagtcagcaatacatagtgtctctgggggcgctgtgataaaaggcctggaagcaatggcagtcactagcctgatgatgtttgttgaatccttgcaagtaaacattaaagctgccatgaaactggatgaaggctcatgtagtcgattaacaacacttacagaaacaattttagatgctgtcattaacaagtcattagtgaaatccatacaagatattgttgatgatgatggctctgttaaagacactgcaagccctgagctgagacggtatcgagagcaagtacagcgtctagaaaacaggttatatcagcttatggacaagttgatgcgcaatgctgatgatgaagcttcattgaagtatgcattgtaaatggaagatgctgcattagaacaaccatggataattcttcattttttgatggattattgctctccagcaggtcagatgctggaagcatgatagaaccaattgttgctgttccgttaaacgatgagttgcaggaatcaagagcattagtggctaaagctgaactggatgtcttatcaaaacttactgataagattcgtcttgatcttgatagcattcagaatttgcttcaggaaacaattaaactcgataagatcgcagctcgtgcaaaatacagtattgcatatgatggaacatttcctgacctgtatttgccgaactttgagaatgaaactgtcactagtgctacaggtggatctatcaaacaaatttcctcagctcaacttcctaagaaggcatggaaactgtatatgccaaatgcataccatccactactacttcagcggcatcaggaaaatatccatcgtgccaaaagggatgttgcaagtgccacagcggagatccggaggaggaggatatatgggcaagatattgcagaagaagatcaattggcatcagaccttgattccatgaaacttagggtttcccaactggagaaagaccagccagtaccagtagattttatgattgctgaagaaactactgtcttggtgataactggcccaaatacagggggtaaaacaatcagcttgaagacggttggcctggcatcattgatggctaagataggtctatacattctagcttctgaaccagtaaaaattccatggttcaatgctgtttatgctgacattggagatgagcaatctctgacccaatcactctctacattttctggacatctgaagcagattggtgccattcgtgcagagtcaacttcagagtccttggtccttttggatgaggtaggcgctgggacaaacccacttgaaggagccgctctggggatgtctcttttggagtcttttgctgaagctggctcctttctgactctagcaacaactcatcatggagaactcaaaacactaaaatacaggtcgctcgaatgcaatcaatattactgaaaggctgggtttgcctttggatatagtagaaagttccaggcgtttacttggaacagctggtgcagagataaatgctttgataatggacatggaaagactcaaacaagaatatcaacaacatcttcaggaggcacaatatcttcttatgcagtccaaggagcttcataacaacttggaactggcacaaaagagcattgtagaccacacttctgctcagagaaaacgaaaggcgagagtaatttcagagtatgctgttatggcccgttctatcattcgtaagaagtttcagcagttccaagaatctgctatagctgaaagagtgaaagaagaagagaatgctgtgaatgatgccaaatctgacagagtgaaggatcctatgccggcaaatacatctgccattggaaacatacagaacatagataccagcttgggcatgacagccaacgatgatgaagatgaggttccagaagttggagattcagtgtacgttcctaagctcaagaatgaagctaccgtggtgaaaatagattcgtccaaaaatgaagtgcaagtccaagccggtatgatgaagctcaaactaaagctgaaagatgttaaggttcagaagcggaaagtatccagatagaacatctacactgtcctgcactagcagatattcagataaatatgcatatgctgtttcgtccaattcgtaccatttcattggcctcattttcagcaataataataatgtggtctttcaagtgaaaatatggatttattatctgcatgtacttctcattcttcactacttgcggtactcaaaaccttcagcagagttccagaacatcttcagattatcacttctttatagaaaatgagcttgtgatttatcacttgtctatataaattttagttcttcgaaggttcttaaaaagaagtagcatgccaatgaaatagttggcactagctggttatttgaaattgccaaattggccacattgtagagatgtttctgtgcggcgccggttttatatggcttcacgctatttccaggagccttctatcccatctatctcatttcttattttaaattttactatgttttttccctaaaccctaaattgtactatgtaaacactgcaatataatgaacggcataaaccatctcggcaaaggacgagaactgcttctttg

SEQ ID NO: 52956 - DNA, 3170 bp, Zea Mays
ctgcaactgcaagtctgcaaggcggagaagccggtcgttcgttcatccggtgcgctatcccaaatacagcggacaacttcgcacctttttcacccatcactcgcgaacgcaggtcgcactgtcgcagcatgcttcgcctctccatcgccgtcctcacctcacctctcctccccacgtccgtccccgccgtccgaccccatccgcgccgcctactccgcctccgtctgcgctccctcgccgcctcctcctcgctctcgccgtccgcccgcagcctccgcctcctcgagtggggcaaggtctgcgacgccgtcgcctccttcgccggcactgcccacggccgcgacgccacaacgaaacaactgtgggaggtggaggatgtgagctatgagcagagccagatgctgctccaggagacggaggcggccgtgttgctgcttgacaacgctggtggggcaatggatttctcggggttggatacagttgcgatagagtcagcaatacatagtgtctctgggggcgctgtgataaaaggcctggaagcaatggcagtcactagcctgatgatgtttgttgaatccttgcaagtaaacattaaagctgccatgaaactggatgaaggctcatgtagtcgattaacaacacttacagaaacaattttagatgctgtcattaacaagtcattagtgaaatccatacaagatattgttgatgatgatggctctgttaaagacactgcaagccctgagctgagacggtatcgagagcaagtacagcgtctagaaaacaggttatatcagcttatggacaagttgatgcgcaatgctgatgatgaagcttcattgaagtatgcattgtaaatggaagatgctgcattagaacaaccatggataattcttcattttttgatggattattgctctccaggtcagatgctggaagcatgatagaaccaattgttgctgttccgttaaacgatgagttgcaggaatcaagagcattagtggctaaagctgaactggatgtcttatcaaaacttactgataagattcgtcttgatcttgatagcattcagaatttgcttcaggaaacaattaaactcgataagatcgcagctcgtgcaaaatacagtattgcatatgatggaacatttcctgacctgtatttgccgaactttgagaatgaaactgtcactagtgctacaggtggatctatcaaacaaatttcctcagctcaacttcctaagaaggcatggaaactgtatatgccaaatgcataccatccactactacttcagcggcatcaggaaaatatccatcgtgccaaaagggatgttgcaagtgccacagcggagatccggaggaggaggatatatgggcaagatattgcagaagaagatcaattggcatcagaccttgattccatgaaacttagggtttcccaactggagaaagaccagccagtaccagtagattttatgattgctgaagaaactactgtcttggtgataactggcccaaatacagggggtaaaacaatcagcttgaagacggttggcctggcatcattgatggctaagataggtctatacattctagcttctgaaccagtaaaaattccatggttcaatgctgtttatgctgacattggagatgagcaatctctgacccaatcactctctacattttctggacatctgaagcagattggtgccattcgtgcagagtcaacttcagagtccttggtccttttggatgaggtaggcgctgggacaaacccacttgaaggagccgctctggggatgtctcttttggagtcttttgctgaagctggctcctttctgactctagcaacaactcatcatggagaactcaaaacactaaaatacagcaataactcatttgagaatgcatgcatggaatttgatgaagagaacctaaagcctacattcaagattctgtggggaataccaggtcgctcgaatgcaatcaatattactgaaaggctgggtttgcctttggatatagtagaaagttccaggcgtttacttggaacagctggtgcagagataaatgctttgataatggacatggaaagactcaaacaagaatatcaacaacatcttcaggaggcacaatatcttcttattccaaggagcttcataacaacttggaactggcacaaaagagcattgtagaccacacttctgctcagagaaaacgaaaggcgagagtaatttcagagtatgctgttatggcccgttctatcattcgtaagaagtttcagcagttccaagaatctgctatagctgaaagagtgaaagaagaagagaatgctgtgaatgatgccaaatctgacagagtgaaggatcctatgccggcaaatacatctgccattggaaacatacagaacatagataccagcttgggcatgacagccaacgatgatgaagatgaggttccagaagttggagattcagtgtacgttcctaagctcaagaatgaagctaccgtggtgaaaatagattcgtccaaaaatgaagtgcaagtccaagccggtatgatgaagctcaaactaaagctgaaagatgttaaggttcagaagcggaaagtatccagatagaacatctacactgtcctgcactagcagatattcagataaatatgcatatgctgtttcgtccaattcgtaccatttcattggcctcattttcagcaataataataatgtggtctttcaagtgaaaatatggatttattatctgcatgtacttctcattcttcactacttgcggtactcaaaaccttcagcagagttccagaacatcttcagattatcacttctttatagaaaatgagcttgtgatttatcacttgtctatataaattttagttcttcgaaggttcttaaaaagaagtagcatgccaatgaaatagttggcactagctggttatttgaaattgccaaattggccacattgtagagatgtttctgtgcggcgccggttttatatggcttcacgctatttccaggagccttctatcccatctatctcatttcttattttaaattttactatgttttttccctaaaccctaaattgtactatgtaaacactgcaatataatgaacggcataaaccatctcggcaaaggacgagaactgcttctttg

SEQ ID NO: 52957 - DNA, 2987 bp, Zea Mays
ctgcaactgcaagtctgcaaggcggagaagccggtcgttcgttcatccggtgcgctatcccaaatacagcggacaacttcgcacctttttcacccatcactcgcgaacgcaggtcgcactgtcgcagcatgcttcgcctctccatcgccgtcctcacctcacctctcctccccacgtccgtccccgccgtccgaccccatccgcgccgcctactccgcctccgtctgcgctccctcgccgcctcctcctcgctctcgccgtccgcccgcagcctccgcctcctcgagtggggcaaggtctgcgacgccgtcgcctccttcgccggcactgcccacggccgcgacgccacaacgaaacaactgtgggaggtggaggatgtgagctatgagcagagccagatgctgctccaggagacggaggcggccgtgttgctgcttgacaacgctggtggggcaatggatttctcggggttggatacagttgcgatagagtcagcaatacatagtgtctctgggggcgctgtgataaaaggcctggaagcaatggcagtcactagcctgatgatgtttgttgaatccttgcaagtaaacattaaagctgccatgaaactggatgaaggctcatgtagtcgattaacaacacttacagaaacaattttagatgctgtcattaacaagtcattagtgaaatccatacaagatattgttgatgatgatggctctgttaaagacactgcaagccctgagctgagacggtatcgagagcaagtacagcgtctagaaaacaggttatatcagcttatggacaagttgatgcgcaatgctgatgatgaagcttcattgaagtatgcattgtaaatggaagatgctgcattagaacaaccatggataattcttcattttttgatggattattgctctccaggtcagatgctggaagcatgatagaaccaattgttgctgttccgttaaacgatgagttgcaggaatcaagagcattagtggctaaagctgaactggatgtcttatcaaaacttactgataagattcgtcttgatcttgatagcattcagaatttgcttcaggaaacaattaaactcgataagatcgcagctcgtgcaaaatacagtattgcatatgatggaacatttcctgacctgtatttgccgaactttgagaatgaaactgtcactagtgctacaggtggatctatcaaacaaatttcctcagctcaacttcctaagaaggcatggaaactgtatatgccaaatgcataccatccactactacttcagcggcatcaggaaaatatccatcgtgccaaaagggatgttgcaagtgccacagcggagatccggaggaggaggatatatgggcaagatattgcagaagaagatcaattggcatcagaccttgattccatgaaacttagggtttcccaactggagaaagaccagccagtaccagtagattttatgattgctgaagaaactactgtcttggtgataactggcccaaatacagggggtaaaacaatcagcttgaagacggttggcctggcatcattgatggctaagataggtctatacattctagcttctgaaccagtaaaaattccatggttcaatgctgtttatgctgacattggagatgagcaatctctgacccaatcactctctacattttctggacatctgaagcagattggtgccattcgtgcagagtcaacttcagagtccttggtccttttggatgaggtaggcgctgggacaaacccacttgaaggagccgctctggggatgtctcttttggagtcttttgctgaagctggctcctttctgactctagcaacaactcatcatggagaactcaaaacactaaaatacagttgataatggacatggaaagactcaaacaagaatatcaacaacatcttcaggaggcacaatatcttcttatgcagtccaaggagcttcataacaacttggaactggcacaaaagagcattgtagaccacacttctgctcagagaaaacgaaaggcgagagtaatttcagagtatgctgttatggcccgttctatcattcgtaagaagtttcagcagttccaagaatctgctatagctgaaagagtgaaagaagaagagaatgctgtgaatgatgccaaatctgacagagtgaaggatcctatgccggcaaatacatctgccattggaaacatacagaacatagataccagcttgggcatgacagccaacgatgatgaagatgaggttccagaagttggagattcagtgtacgttcctaagctcaagaatgaagctaccgtggtgaaaatagattcgtccaaaaatgaagtgcaagtccaagccggtatgatgaagctcaaactaaagctgaaagatgttaaggttcagaagcggaaagtatccagatagaacatctacactgtcctgcactagcagatattcagataaatatgcatatgctgtttcgtccaattcgtaccatttcattggcctcattttcagcaataataataatgtggtctttcaagtgaaaatatggatttattatctgcatgtacttctcattcttcactacttgcggtactcaaaaccttcagcagagttccagaacatcttcagattatcacttctttatagaaaatgagcttgtgatttatcacttgtctatataaattttagttcttcgaaggttcttaaaaagaagtagcatgccaatgaaatagttggcactagctggttatttgaaattgccaaattggccacattgtagagatgtttctgtgcggcgccggttttatatggcttcacgctatttccaggagccttctatcccatctatctcatttcttattttaaattttactatgttttttccctaaaccctaaattgtactatgtaaacactgcaatataatgaacggcataaaccatctcggcaaaggacgagaactgcttctttg

SEQ ID NO: 52958 - DNA, 3246 bp, Zea Mays
ctgcaactgcaagtctgcaaggcggagaagccggtcgttcgttcatccggtgcgctatcccaaatacagcggacaacttcgcacctttttcacccatcactcgcgaacgcaggtcgcactgtcgcagcatgcttcgcctctccatcgccgtcctcacctcacctctcctccccacgtccgtccccgccgtccgaccccatccgcgccgcctactccgcctccgtctgcgctccctcgccgcctcctcctcgctctcgccgtccgcccgcagcctccgcctcctcgagtggggcaaggtctgcgacgccgtcgcctccttcgccggcactgcccacggccgcgacgccacaacgaaacaactgtgggaggtggaggatgtgagctatgagcagagccagatgctgctccaggagacggaggcggccgtgttgctgcttgacaacgctggtggggcaatggatttctcggggttggatacagttgcgatagagtcagcaatacatagtgtctctgggggcgctgtgataaaaggcctggaagcaatggcagtcactagcctgatgatgtttgttgaatccttgcaagtaaacattaaagctgccatgaaactggatgaaggctcatgtagtcgattaacaacacttacagaaacaattttagatgctgtcattaacaagtcattagtgaaatccatacaagatattgttgatgatgatggctctgttaaagacactgcaagccctgagctgagacggtatcgagagcaagtacagcgtctagaaaacaggttatatcagcttatggacaagttgatgcgcaatgctgatgatgaagcttcattgaagtatgcattgtaaatggaagatgctgcattagaacaaccatggataattcttcattttttgatggattattgctctccaggtcagatgctggaagcatgatagaaccaattgttgctgttccgttaaacgatgagttgcaggaatcaagagcattagtggctaaagctgaactggatgtcttatcaaaacttactgataagattcgtcttgatcttgatagcattcagaatttgcttcaggaaacaattaaactcgataagatcgcagctcgtgcaaaatacagtattgcatatgatggaacatttcctgacctgtatttgccgaactttgagaatgaaactgtcactagtgctacaggtggatctatcaaacaaatttcctcagctcaacttcctaagaaggcatggaaactgtatatgccaaatgcataccatccactactacttcagcggcatcaggaaaatatccatcgtgccaaaagggatgttgcaagtgccacagcggagatccggaggaggaggatatatgggcaagatattgcagaagaagatcaattggcatcagaccttgattccatgaaacttagggtttcccaactggagaaagaccagccagtaccagtagattttatgattgctgaagaaactactgtcttggtgataactggcccaaatacagggggtaaaacaatcagcttgaagacggttggcctggcatcattgatggctaagatagtggccaagcttgccgcagttgtgacagtcgtcgtctcgtgccggcttcttgttgccgacggcgccaccttgggtctatacattctagcttctgaaccagtaaaaattccatggttcaatgctgtttatgctgacattggagatgagcaatctctgacccaatcactctctacattttctggacatctgaagcagattggtgccattcgtgcagagtcaacttcagagtccttggtccttttggatgaggtaggcgctgggacaaacccacttgaaggagccgctctggggatgtctcttttggagtcttttgctgaagctggctcctttctgactctagcaacaactcatcatggagaactcaaaacactaaaatacagcaataactcatttgagaatgcatgcatggaatttgatgaagagaacctaaagcctacattcaagattctgtggggaataccaggtcgctcgaatgcaatcaatattactgaaaggctgggtttgcctttggatatagtagaaagttccaggcgtttacttggaacagctggtgcagagataaatgctttgataatggacatggaaagactcaaacaagaatatcaacaacatcttcaggaggcacaatatcttcttatgcagtccaaggagcttcataacaacttggaactggcacaaaagagcattgtagaccacacttctgctcagagaaaacgaaaggcgagagtaatttcagagtatgctgttatggcccgttctatcattcgtaagaagtttcagcagttccaagaatctgctatagctgaaagagtgaaagaagaagagaatgctgtgaatgatgccaaatctgacagagtgaaggatcctatgccggcaaatacatctgccattggaaacatacagaacatagataccagcttgggcatgacagccaacgatgatgaagatgaggttccagaagttggagattcagtgtacgttcctaagctcaagaatgaagctaccgtggtgaaaatagattcgtccaaaaatgaagtgcaagtccaagccggtatgatgaagctcaaactaaagctgaaagatgttaaggttcagaagcggaaagtatccagatagaacatctacactgtcctgcactagcagatattcagataaatatgcatatgctgtttcgtccaattcgtaccatttcattggcctcattttcagcaataataataatgtggtctttcaagtgaaaatatggatttattatctgcatgtacttctcattcttcactacttgcggtactcaaaaccttcagcagagttccagaacatcttcagattatcacttctttatagaaaatgagcttgtgatttatcacttgtctatataaattttagttcttcgaaggttcttaaaaagaagtagcatgccaatgaaatagttggcactagctggttatttgaaattgccaaattggccacattgtagagatgtttctgtgcggcgccggttttatatggcttcacgctatttccaggagccttctatcccatctatctcatttcttattttaaattttactatgttttttccctaaaccctaaattgtactatgtaaacactgcaatataatgaacggcataaaccatctcggcaaaggacgagaactgcttctttg

SEQ ID NO: 52959 - DNA, 3095 bp, Zea Mays
ctgcaactgcaagtctgcaaggcggagaagccggtcgttcgttcatccggtgcgctatcccaaatacagcggacaacttcgcacctttttcacccatcactcgcgaacgcaggtcgcactgtcgcagcatgcttcgcctctccatcgccgtcctcacctcacctctcctccccacgtccgtccccgccgtccgaccccatccgcgccgcctactccgcctccgtctgcgctccctcgccgcctcctcctcgctctcgccgtccgcccgcagcctccgcctcctcgagtggggcaaggtctgcgacgccgtcgcctccttcgccggcactgcccacggccgcgacgccacaacgaaacaactgtgggaggtggaggatgtgagctatgagcagagccagatgctgctccaggagacggaggcggccgtgttgctgcttgacaacgctggtggggcaatggatttctcggggttggatacagttgcgatagagtcagcaatacatagtgtctctgggggcgctgtgataaaaggcctggaagcaatggcagtcactagcctgatgatgtttgttgaatccttgcaagtaaacattaaagctgccatgaaactggatgaaggctcatgtagtcgattaacaacacttacagaaacaattttagatgctgtcattaacaagtcattagtgaaatccatacaagatattgttgatgatgatggctctgttaaagacactgcaagccctgagctgagacggtatcgagagcaagtacagcgtctagaaaacaggttatatcagcttatggacaagttgatgcgcaatgctgatgatgaagcttcattgtcggaagtatgcattgtaaatggaagatgctgcattagaacaaccatggataattcttcattttttgatggattattgctctccaggtcagatgctggaagcatgatagaaccaattgttgctgttccgttaaacgatgagttgcaggaatcaagagcattagtggctaaagctgaactggatgtcttatcaaaacttactgataagattcgtcttgatcttgatagcattcagaatttgcttcaggaaacaattaaactcgataagatcgcagctcgtgcaaaatacagtattgcatatgatggaacatttcctgacctgtatttgccgaactttgagaatgaaactgtcactagtgctacaggtggatctatcaaacaaatttcctcagctcaacttcctaagaaggcatggaaactgtatatgccaaatgcataccatccactactacttcagcggcatcaggaaaatatccatcgtgccaaaagggatgttgcaagtgccacagcggagatccggaggaggaggatatatgggcaagatattgcagaagaagatcaattggcatcagaccttgattccatgaaacttagggtttcccaactggagaaagaccagccagtaccagtagattttatgattgctgaagaaactactgtcttggtgataactggcccaaatacagggggtaaaacaatcagcttgaagacggttggcctggcatcattgatggctaagataggtctatacattctagcttctgaaccagtaaaaattccatggttcaatgctgtttatgctgacattggagatgagcaatctctgacccaatcactctctacattttctggacatctgaagcagattggtgccattcgtgcagagtcaacttcagagtccttggtccttttggatgaggtaggcgctgggacaaacccacttgaaggagccgctctggggatgtctcttttggagtcttttgctgaagctggctcctttctgactctagcaacaactcatcatggagaactcaaaacactaaaatacaggtcgctcgaatgcaatcaatattactgaaaggctgggtttgcctttggatatagtagaaagttccaggcgtttacttggaacagctggtgcagagataaatgctttgataatggacatggaaagactcaaacaagaatatcaacaacatcttcaggaggcacaatatcttcttatgcagtccaaggagcttcataacaacttggaactggcacaaaagagcattgtagaccacacttctgctcagagaaaacgaaaggcgagagtaatttcagagtatgctgttatggcccgttctatcattcgtaagaagtttcagcagttccaagaatctgctatagctgaaagagtgaaagaagaagagaatgctgtgaatgatgccaaatctgacagagtgaaggatcctatgccggcaaatacatctgccattggaaacatacagaacatagataccagcttgggcatgacagccaacgatgatgaagatgaggttccagaagttggagattcagtgtacgttcctaagctcaagaatgaagctaccgtggtgaaaatagattcgtccaaaaatgaagtgcaagtccaagccggtatgatgaagctcaaactaaagctgaaagatgttaaggttcagaagcggaaagtatccagatagaacatctacactgtcctgcactagcagatattcagataaatatgcatatgctgtttcgtccaattcgtaccatttcattggcctcattttcagcaataataataatgtggtctttcaagtgaaaatatggatttattatctgcatgtacttctcattcttcactacttgcggtactcaaaaccttcagcagagttccagaacatcttcagattatcacttctttatagaaaatgagcttgtgatttatcacttgtctatataaattttagttcttcgaaggttcttaaaaagaagtagcatgccaatgaaatagttggcactagctggttatttgaaattgccaaattggccacattgtagagatgtttctgtgcggcgccggttttatatggcttcacgctatttccaggagccttctatcccatctatctcatttcttattttaaattttactatgttttttccctaaaccctaaattgtactatgtaaacactgcaatataatgaacggcataaaccatctcggcaaaggacgagaactgcttctttg

SEQ ID NO: 52960 - DNA, 3081 bp, Zea Mays
ctgcaactgcaagtctgcaaggcggagaagccggtcgttcgttcatccggtgcgctatcccaaatacagcggacaacttcgcacctttttcacccatcactcgcgaacgcaggtcgcactgtcgcagcatgcttcgcctctccatcgccgtcctcacctcacctctcctccccacgtccgtccccgccgtccgaccccatccgcgccgcctactccgcctccgtctgcgctccctcgccgcctcctcctcgctctcgccgtccgcccgcagcctccgcctcctcgagtggggcaaggtctgcgacgccgtcgcctccttcgccggcactgcccacggccgcgacgccacaacgaaacaactgtgggaggtggaggatgtgagctatgagcagagccagatgctgctccaggagacggaggcggccgtgttgctgcttgacaacgctggtggggcaatggatttctcggggttggatacagttgcgtaaacattaaagctgccatgaaactggatgaaggctcatgtagtcgattaacaacacttacagaaacaattttagatgctgtcattaacaagtcattagtgaaatccatacaagatattgttgatgatgatggctctgttaaagacactgcaagccctgagctgagacggtatcgagagcaagtacagcgtctagaaaacaggttatatcagcttatggacaagttgatgcgcaatgctgatgatgaagcttcattgtcggaagtatgcattgtaaatggaagatgctgcattagaacaaccatggataattcttcattttttgatggattattgctctccagcaggtcagatgctggaagcatgatagaaccaattgttgctgttccgttaaacgatgagttgcaggaatcaagagcattagtggctaaagctgaactggatgtcttatcaaaacttactgataagattcgtcttgatcttgatagcattcagaatttgcttcaggaaacaattaaactcgataagatcgcagctcgtgcaaaatacagtattgcatatgatggaacatttcctgacctgtatttgccgaactttgagaatgaaactgtcactagtgctacaggtggatctatcaaacaaatttcctcagctcaacttcctaagaaggcatggaaactgtatatgccaaatgcataccatccactactacttcagcggcatcaggaaaatatccatcgtgccaaaagggatgttgcaagtgccacagcggagatccggaggaggaggatatatgggcaagatattgcagaagaagatcaattggcatcagaccttgattccatgaaacttagggtttcccaactggagaaagaccagccagtaccagtagattttatgattgctgaagaaactactgtcttggtgataactggcccaaatacagggggtaaaacaatcagcttgaagacggttggcctggcatcattgatggctaagataggtctatacattctagcttctgaaccagtaaaaattccatggttcaatgctgtttatgctgacattggagatgagcaatctctgacccaatcactctctacattttctggacatctgaagcagattggtgccattcgtgcagagtcaacttcagagtccttggtccttttggatgaggtaggcgctgggacaaacccacttgaaggagccgctctggggatgtctcttttggagtcttttgctgaagctggctcctttctgactctagcaacaactcatcatggagaactcaaaacactaaaatacagcaataactcatttgagaatgcatgcatggaatttgatgaagagaacctaaagcctacattcaagattctgtggggaataccaggtcgctcgaatgcaatcaatattactgaaaggctgggtttgcctttggatatagtagaaagttccaggcgtttacttggaacagctggtgcagagataaatgctttgataatggacatggaaagactcaaacaagaatatcaacaacatcttcaggaggcacaatatcttcttatgcagtccaaggagcttcataacaacttggaactggcacaaaagagcattgtagaccacacttctgctcagagaaaacgaaaggcgagagtaatttcagagtatgctgttatggcccgttctatcattcgtaagaagtttcagcagttccaagaatctgctatagctgaaagagtgaaagaagaagagaatgctgtgaatgatgccaaatctgacagagtgaaggatcctatgccggcaaatacatctgccattggaaacatacagaacatagataccagcttgggcatgacagccaacgatgatgaagatgaggttccagaagttggagattcagtgtacgttcctaagctcaagaatgaagctaccgtggtgaaaatagattcgtccaaaaatgaagtgcaagtccaagccggtatgatgaagctcaaactaaagctgaaagatgttaaggttcagaagcggaaagtatccagatagaacatctacactgtcctgcactagcagatattcagataaatatgcatatgctgtttcgtccaattcgtaccatttcattggcctcattttcagcaataataataatgtggtctttcaagtgaaaatatggatttattatctgcatgtacttctcattcttcactacttgcggtactcaaaaccttcagcagagttccagaacatcttcagattatcacttctttatagaaaatgagcttgtgatttatcacttgtctatataaattttagttcttcgaaggttcttaaaaagaagtagcatgccaatgaaatagttggcactagctggttatttgaaattgccaaattggccacattgtagagatgtttctgtgcggcgccggttttatatggcttcacgctatttccaggagccttctatcccatctatctcatttcttattttaaattttactatgttttttccctaaaccctaaattgtactatgtaaacactgcaatataatgaacggcataaaccatctcggcaaaggacgagaactgcttctttg

SEQ ID NO: 52961 - DNA, 979 bp, Zea Mays
gctaggtggatacccatctccattgaattaccatttcttccccaagtcatgttgcacgtctgtcaatgaagtcatttgccatggaattccagatgccaggaaacttgaggatggtgacattgtaaatgttgatgtaactgtatactataaaggtgttcatggtgatttaaatgagacatattttgttggaaatgtcgatgaagcttccaaacagcttgtacgttgtacctatgagtgcttggagaaagctattgcaatagttaaacctggagttcggttccgagaggtcggggaaatcataaatagacatgcttcgatgtcaggtttatctgtggtgaaatcctattgtggccatggcataggggaactgtttcactgtgccccaaacattcctcattattcaagaaacaaggctgttggtatcatgaaagctgggcagacatttacaattgaaccaatgataaatgcaggggtttggaatgatcggctctggcctgatgattggactgcagtcaccacagatggtaaacggagtgctcaatttgaacatacacttttggtgacagacacaggatgcgaagttttgacggcacggttaccctcatcaccagacgtttttccatggttgaaaccgtgatcgggcaccccaacagcaacaagaaagtgatactgacaaaccggggctgcaaaatttttgttctactctttatcagtcagtcaagctgaatattttgaaaattttcagaccaaacagtgataagcatgctactgctggacagtcgccctaattgtctgtcctgcggaattgtttctgggagtgtattgttaagtcggttttctccgagttatacgagacatatggcttgagttgtgtcaccaatatgattatgccataggactatcagagtttacttttaatttcagagaacataatttccatcaatttcagtaggttcatttttaatgaattcaaacccca

SEQ ID NO: 52962 - DNA, 1491 bp, Zea Mays
ctttttcccgccgccctttccttcgcttcctgtctccaccgatgccccaaatgtgctgaacttaagctaccgcgtgagaacgcagctttctgcacacaggactgttttagggcagcatggagctctcacaaatctgttcacccaaagcctggtgcactggcatcccagcagtctccggaaggttggaaatattgtttgagaaaagggcggggacgtgcattgcaacttcctcgttttgaatggacaggtccattgagaccatatccgatatcaaagatgcgtgtggtgccagatgaaattgagaagcctgattgggcgcttgatggaattcccaagatagaaccagatagtgacttgcagaaaagagtagagattaagacccctgaactaatagaaaggatgagagaaacatgtcgaattgcaagagaggttttagatgcagctgctcgtgtaattaaaccaggaattacaacagatgaaattgatagagttgtccatgaagagacaattgctagaggtggatacccatctccattgaattaccatttcttccccaagtcatgttgcacgtctgtcaatgaagtcatttgccatggaattccagatgccaggaaacttgaggatggtgacattgtaaatgttgatgtaactgtatactataaaggtgttcatggtgatttaaatgagacatattttgttggaaatgtcgatgaagcttccaaacagcttgtacgttgtacctatgagtgcttggagaaagctattgcaatagttaaacctggagttcggttccgagaggtcggggaaatcataaatagacatgcttcgatgtcaggtttatctgtggtgaaatcctattgtggccatggcataggggaactgtttcactgtgccccaaacattcctcattattcaagaaacaaggctgttggtatcatgaaagctgggcagacatttacaattgaaccaatgataaatgcaggggtttggaatgatcggctctggcctgatgattggactgcagtcaccacagatggtaaacggagtgctcaatttgaacatacacttttggtgacagacacaggatgcgaagttttgacggcacggttaccctcatcaccagacgtttttccatggttgaaaccgtgatcgggcaccccaacagcaacaagaaagtgatactgacaaaccggggctgcaaaatttttgttctactctttatcagtcagtcaagctgaatattttgaaaattttcagaccaaacagtgataagcatgctactgctggacagtcgccctaattgtctgtcctgcggaattgtttctgggagtgtattgttaagtcggttttctccgagttatacgagacatatggcttgagttgtgtcaccaatatgattatgccataggactatcagagtttacttttaatttcagagaacataatttccatcaatttcagtaggttcatttttaatgaattcaaacccca

SEQ ID NO: 52963 - DNA, 1682 bp, Zea Mays
cgcccccgcgcgcacgacttcgcttcccctccccggctacccgtccccgcggctgactcgtccacctcctgtccatattttcccctcgtgtccgccgcacgcaccgccggaaccctagcctcagccgccacaggcagccgggatggagaaaggagcctcggaggcgtcggccccctgcgctcgctgcggcaagcccgcgcagctccaatgccccaaatgtgctgaacttaagctaccgcgtgagaacgcagctttctgcacacaggactgttttagggcagcatggagctctcacaaatctgttcacccaaagcctggtgcactggcatcccagcagtctccggaaggttggaaatattgtttgagaaaagggcggggacgtgcattgcaacttcctcgttttgaatggacaggtccattgagaccatatccgatatcaaagatgcgtgtggtgccagatgaaattgagaagcctgattgggcgcttgatggaattcccaagatagaaccagatagtgacttgcagaaaagagtagagattaagacccctgaactaatagaaaggatgagagaaacatgtcgaattgcaagagaggttttagatgcagctgctcgtgtaattaaaccaggaattacaacagatgaaattgatagagttgtccatgaagagacaattgctagagaacttccattcttgatgatcctcaggtggatacccatctccattgaattaccatttcttccccaagtcatgttgcacgtctgtcaatgaagtcatttgccatggaattccagatgccaggaaacttgaggatggtgacattgtaaatgttgatgtaactgtatactataaaggtgttcatggtgatttaaatgagacatattttgttggaaatgtcgatgaagcttccaaacagcttgtacgttgtacctatgagtgcttggagaaagctattgcaatagttaaacctggagttcggttccgagaggtcggggaaatcataaatagacatgcttcgatgtcaggtttatctgtggtgaaatcctattgtggccatggcataggggaactgtttcactgtgccccaaacattcctcattattcaagaaacaaggctgttggtatcatgaaagctgggcagacatttacaattgaaccaatgataaatgcaggggtttggaatgatcggctctggcctgatgattggactgcagtcaccacagatggtaaacggagtgctcaatttgaacatacacttttggtgacagacacaggatgcgaagttttgacggcacggttaccctcatcaccagacgtttttccatggttgaaaccgtgatcgggcaccccaacagcaacaagaaagtgatactgacaaaccggggctgcaaaatttttgttctactctttatcagtcagtcaagctgaatattttgaaaattttcagaccaaacagtgataagcatgctactgctggacagtcgccctaattgtctgtcctgcggaattgtttctgggagtgtattgttaagtcggttttctccgagttatacgagacatatggcttgagttgtgtcaccaatatgattatgccataggactatcagagtttacttttaatttcagagaacataatttccatcaatttcagtaggttcatttttaatgaattcaaacccca

SEQ ID NO: 52964 - DNA, 1605 bp, Zea Mays
cgcccccgcgcgcacgacttcgcttcccctccccggctacccgtccccgcggctgactcgtccacctcctgtccatattttcccctcgtgtccgccgcacgcaccgccggaaccctagcctcagccgccacaggcagccgggatggagaaaggagcctcggaggcgtcggccccctgcgctcgctgcggcaagcccgcgcagctccaatgccccaaatgtgctgaacttaagctaccgcgtgagaacgcagctttctgcacacaggactgttttagggcagcatggagctctcacaaatctgttcacccaaagcctggtgcactggcatcccagcagtctccggaaggttggaaatattgtttgagaaaagggcggggacgtgcattgcaacttcctcgttttgaatggacaggtccattgagaccatatccgatatcaaagatgcgtgtggtgccagatgaaattgagaagcctgattgggcgcttgatggaattcccaagatagaaccagatagtgacttgcagaaaagagtagagattaagacccctgaactaatagaaaggatgagagaaacatgtcgaattgcaagagaggttttagatgcagctgctcgtgtaattaaaccaggaattacaacagatgaaattgatagagttgtccatgaagagacaattgctagaggtctgtcaatgaagtcatttgccatggaattccagatgccaggaaacttgaggatggtgacattgtaaatgttgatgtaactgtatactataaaggtgttcatggtgatttaaatgagacatattttgttggaaatgtcgatgaagcttccaaacagcttgtacgttgtacctatgagtgcttggagaaagctattgcaatagttaaacctggagttcggttccgagaggtcggggaaatcataaatagacatgcttcgatgtcaggtttatctgtggtgaaatcctattgtggccatggcataggggaactgtttcactgtgccccaaacattcctcattattcaagaaacaaggctgttggtatcatgaaagctgggcagacatttacaattgaaccaatgataaatgcaggggtttggaatgatcggctctggcctgatgattggactgcagtcaccacagatggtaaacggagtgctcaatttgaacatacacttttggtgacagacacaggatgcgaagttttgacggcacggttaccctcatcaccagacgtttttccatggttgaaaccgtgatcgggcaccccaacagcaacaagaaagtgatactgacaaaccggggctgcaaaatttttgttctactctttatcagtcagtcaagctgaatattttgaaaattttcagaccaaacagtgataagcatgctactgctggacagtcgccctaattgtctgtcctgcggaattgtttctgggagtgtattgttaagtcggttttctccgagttatacgagacatatggcttgagttgtgtcaccaatatgattatgccataggactatcagagtttacttttaatttcagagaacataatttccatcaatttcagtaggttcatttttaatgaattcaaacccca

SEQ ID NO: 52965 - DNA, 1620 bp, Zea Mays
attgcggaatcgactccgccgtcagcacggtagcgagcgcccccgcgcgcacgacttcgcttcccctccccggctacccgtccccgcggctgactcgtccacctcctgtccatattttcccctcgtgtccgccgcacgcaccgccggaaccctagcctcagccgccacagatgccccaaatgtgctgaacttaagctaccgcgtgagaacgcagctttctgcacacaggactgttttagggcagcatggagctctcacaaatctgttcacccaaagcctggtgcactggcatcccagcagtctccggaaggttggaaatattgtttgagaaaagggcggggacgtgcattgcaacttcctcgttttgaatggacaggtccattgagaccatatccgatatcaaagatgcgtgtggtgccagatgaaattgagaagcctgattgggcgcttgatggaattcccaagatagaaccagatagtgacttgcagaaaagagtagagattaagacccctgaactaatagaaaggatgagagaaacatgtcgaattgcaagagaggttttagatgcagctgctcgtgtaattaaaccaggaattacaacagatgaaattgatagagttgtccatgaagagacaattgctagaggtggatacccatctccattgaattaccatttcttccccaagtcatgttgcacgtctgtcaatgaagtcatttgccatggaattccagatgccaggaaacttgaggatggtgacattgtaaatgttgatgtaactgtatactataaaggtgttcatggtgatttaaatgagacatattttgttggaaatgtcgatgaagcttccaaacagcttgtacgttgtacctatgagtgcttggagaaagctattgcaatagttaaacctggagttcggttccgagaggtcggggaaatcataaatagacatgcttcgatgtcaggtttatctgtggtgaaatcctattgtggccatggcataggggaactgtttcactgtgccccaaacattcctcattattcaagaaacaaggctgttggtatcatgaaagctgggcagacatttacaattgaaccaatgataaatgcaggggtttggaatgatcggctctggcctgatgattggactgcagtcaccacagatggtaaacggagtgctcaatttgaacatacacttttggtgacagacacaggatgcgaagttttgacggcacggttaccctcatcaccagacgtttttccatggttgaaaccgtgatcgggcaccccaacagcaacaagaaagtgatactgacaaaccggggctgcaaaatttttgttctactctttatcagtcagtcaagctgaatattttgaaaattttcagaccaaacagtgataagcatgctactgctggacagtcgccctaattgtctgtcctgcggaattgtttctgggagtgtattgttaagtcggttttctccgagttatacgagacatatggcttgagttgtgtcaccaatatgattatgccataggactatcagagtttacttttaatttcagagaacataatttccatcaatttcagtaggttcatttttaatgaattcaaacccca

SEQ ID NO: 52966 - DNA, 1719 bp, Zea Mays
tcagttcaaaaccgcgcggaaattgcggaatcgactccgccgtcagcacggtagcgagcgcccccgcgcgcacgacttcgcttcccctccccggctacccgtccccgcggctgactcgtccacctcctgtccatattttcccctcgtgtccgccgcacgcaccgccggaaccctagcctcagccgccacaggcagccgggatggagaaaggagcctcggaggcgtcggccccctgcgctcgctgcggcaagcccgcgcagctccaatgccccaaatgtgctgaacttaagctaccgcgtgagaacgcagctttctgcacacaggactgttttagggcagcatggagctctcacaaatctgttcacccaaagcctggtgcactggcatcccagcagtctccggaaggttggaaatattgtttgagaaaagggcggggacgtgcattgcaacttcctcgttttgaatggacaggtccattgagaccatatccgatatcaaagatgcgtgtggtgccagatgaaattgagaagcctgattgggcgcttgatggaattcccaagatagaaccagatagtgacttgcagaaaagagtagagattaagacccctgaactaatagaaaggatgagagaaacatgtcgaattgcaagagaggttttagatgcagctgctcgtgtaattaaaccaggaattacaacagatgaaattgatagagttgtccatgaagagacaattgctagaggtggatacccatctccattgaattaccatttcttccccaagtcatgttgcacgtaggtctgtcaatgaagtcatttgccatggaattccagatgccaggaaacttgaggatggtgacattgtaaatgttgatgtaactgtatactataaaggtgttcatggtgatttaaatgagacatattttgttggaaatgtcgatgaagcttccaaacagcttgtacgttgtacctatgagtgcttggagaaagctattgcaatagttaaacctggagttcggttccgagaggtcggggaaatcataaatagacatgcttcgatgtcaggtttatctgtggtgaaatcctattgtggccatggcataggggaactgtttcactgtgccccaaacattcctcattattcaagaaacaaggctgttggtatcatgaaagctgggcagacatttacaattgaaccaatgataaatgcaggggtttggaatgatcggctctggcctgatgattggactgcagtcaccacagatggtaaacggagtgctcaatttgaacatacacttttggtgacagacacaggatgcgaagttttgacggcacggttaccctcatcaccagacgtttttccatggttgaaaccgtgatcgggcaccccaacagcaacaagaaagtgatactgacaaaccggggctgcaaaatttttgttctactctttatcagtcagtcaagctgaatattttgaaaattttcagaccaaacagtgataagcatgctactgctggacagtcgccctaattgtctgtcctgcggaattgtttctgggagtgtattgttaagtcggttttctccgagttatacgagacatatggcttgagttgtgtcaccaatatgattatgccataggactatcagagtttacttttaatttcagagaacataatttccatcaatttcagtaggttcatttttaatgaattcaaacccca

SEQ ID NO: 52967 - DNA, 1626 bp, Zea Mays
cgggcactcacctagtcctaaatagatttgagtttgcaaaccaccacatttccaaactacccacagttcagttcaaaaccgcgcggaaattgcggaatcgactccgccgtcagcacggtagcgagcgcccccgcgcgcacgacttcgcttcccctccccggctacccgtccccgcggctgactcgtccacctcctgtccatattttcccctcgtgtccgccgcacgcaccgccggaaccctagcctcagccgccacaggcagccgggatggagaaaggagcctcggaggcgtcggccccctgcgctcgctgcggcaagcccgcgcagctccaatgccccaaatgtgctgaacttaagctaccgcgtgagaacgcagctttctgtccattgagaccatatccgatatcaaagatgcgtgtggtgccagatgaaattgagaagcctgattgggcgcttgatggaattcccaagatagaaccagatagtgacttgcagaaaagagtagagattaagacccctgaactaatagaaaggatgagagaaacatgtcgaattgcaagagaggttttagatgcagctgctcgtgtaattaaaccaggaattacaacagatgaaattgatagagttgtccatgaagagacaattgctagaggtggatacccatctccattgaattaccatttcttccccaagtcatgttgcacgtctgtcaatgaagtcatttgccatggaattccagatgccaggaaacttgaggatggtgacattgtaaatgttgatgtaactgtatactataaaggtgttcatggtgatttaaatgagacatattttgttggaaatgtcgatgaagcttccaaacagcttgtacgttgtacctatgagtgcttggagaaagctattgcaatagttaaacctggagttcggttccgagaggtcggggaaatcataaatagacatgcttcgatgtcaggtttatctgtggtgaaatcctattgtggccatggcataggggaactgtttcactgtgccccaaacattcctcattattcaagaaacaaggctgttggtatcatgaaagctgggcagacatttacaattgaaccaatgataaatgcaggggtttggaatgatcggctctggcctgatgattggactgcagtcaccacagatggtaaacggagtgctcaatttgaacatacacttttggtgacagacacaggatgcgaagttttgacggcacggttaccctcatcaccagacgtttttccatggttgaaaccgtgatcgggcaccccaacagcaacaagaaagtgatactgacaaaccggggctgcaaaatttttgttctactctttatcagtcagtcaagctgaatattttgaaaattttcagaccaaacagtgataagcatgctactgctggacagtcgccctaattgtctgtcctgcggaattgtttctgggagtgtattgttaagtcggttttctccgagttatacgagacatatggcttgagttgtgtcaccaatatgattatgccataggactatcagagtttacttttaatttcagagaacataatttccatcaatttcagtaggttcatttttaatgaattcaaacccca

SEQ ID NO: 52968 - DNA, 1729 bp, Zea Mays
gtcaagctcgctataagcagccagagattcaggacaagagaccacgatcctaacacacagcgtctctgtcatcttcgatcgcggcggcaccaaaggccgcgctggagaaggatggctacatggaggacatcgaggataagcccgtcgtcatggagtccgaccccgaccccgaccccgatgtgcacggcgcgccaatgtacgagtcggcgagggctccggccgtgcaggacctcgtcgccgagtacgatcagccggcgtggacgccggccgtgcgagaggtggagggcgacggcgtctcacctagggtgcggctcggtgacgtcggcggccccgtcgtcgaggatccggccgcgccgcgctccaagacgcccgccgcacgagagggtgaggacataggcacgacgcccgtggtgcagcagtttgagaccatgagcttgtccgacggtccggcgcacgtgggcgcggccaaggagggcgccaaagcagaggagtgggaaggcaatgccgcggatatggtgggcggtgtggccggtggcgctagctacacggacaggctcaagaacgcggctgccggcaccacggagtacggcaggaagctagcgagcacggtgtatgagaaggtcgccggcgccggcaccggcaccggcaccgctgtgggcgtggggaagcgcgacgacgaacgcacagaggcggtgccggcgtcgaacacccgcacggacgcggcgagaggcgcggggtacacggacaacatcaagtcggcggccgcgggcaccactgggtacggcaagcagctggcgtccaccgtgtacgacaaggtcgccggcgtcggcaccgccgttgcgcccagccgccgtcagcaggagggctcggcgaaggcggaaggcgcacacagcgaggcaatgccggtgtcggacaccggcgccgaggagtggaaggacgccccagccactgtggaggaggccaacaccgagtcgaggccgggctatacggacaagatcaggtccgcggctgccggcacaacggagtacggcaagcagctggcgagcaccgtgtacgagaaggtcgccagcgtcggcacagccgtggcgggcaaggttcagcaggccacgcagtcggccggcacggcgacgcccggggtcggcgcgcagcgggacacgggtgccgccgccacggccacccccggcgccggcgagcaggacaagggggtgaccgtcacggggtacatcgccgagaagctccggccgggcgacgaggaccgcgcgctgagcgaggcgatctccggcgccgtgcagcggcgcaaggacgacgccggggacacggtagtgcagcgcgtgccggcgcccggccaggccgtcgcgtcgctcaccggcgggaaccgggtctccgagaccgtacagccaaccacagccacaggggaagacgtgaaggaagggtatgcggcggaggcgcccgtgatccgcggggaggagatcggcggcgcgaagctgaacacgaatgccatctgaagtgatacgcaagaggagagcacggctgctctctgattactgtgtcaggtttgtgtacacgtggatgatgtgggttgtgctgtggagtagcagctggaataaacgtgctggttgtgttcgacgtggtacgttttgggttttacgtggtggtgtgatcgtgtatccacatgcttttttactcgtgtatgtattccgtttatatatgttgagaattgttctgtttt

SEQ ID NO: 52969 - DNA, 3718 bp, Zea Mays
gcaacgctgcagtactttcgtcacttctcaccgaaaaccaatcgccctcctccccacgcctgtggacccaaaaaaaatcaattcgattttctctcttccgttctccccacacaagaattgacctccgttttattgccgctcatctcaatctaatctctctctctagctcccccaatcgccagatcacagagagaggggaagagcgtgaggagggacgagaaagccaagctgtatagcgagaaagctcagttgagttctgttctgcttttgtcttcctctctcgctggatctactactcccaccactgcctctgcctcggcctcgttgctgctggctgcgtgcgtgactgcgtgcctttgcccaaagcaagcctgcctgctcggtggctcgcttcggttgcagctgcagtgacctcaccctgcctctatgcttgctctcccaccatgtggtggtggtcttcgcgctccaactaacccccaccagcagcgcatcacaccaccgcatcgcaccgcgatgccaaccctggtggcgtcacgcggcccggcggcttcttccgcgcgccgcattgcaatgccgccaccgccgctggacggacccgtgaaggagtactagctagctagctagcccagcggcagcgggcgaggcgaagggagcggaggtcgttcttgcagacatgttcaagtcgcggtggcgcggcggcagggccaaggccgtgttcaagctgcagttccacgccacgcaggtgcccgagctgggatgggaggcgatggtggtggtggtgacgccgcaggacgctggccggccgacggcgcggtcggagcccgcggaggtcaccgatggcgcgtgccggtgggcggcccctgtcatggaggccaccaagctccccaccggcaaggacaagatctaccagttcctcgtctatgagaccgggtcgagcaaggcggcgctgctgggggaggccacggtgaacctggcggagtacgccgacgcgttgaagccgtcggtggtgacgctcccgctcaagggcagccccggtgcgctgctgcacgatggattgttgataagaaaaccgccagacatgaggtttccatcaagaagaaatgtgcctatgtctgctgatccagtgggccatctccacaatggcagcagtttcgatgccgtctcagtgtcgggttcagatggaagttctgggcgatatacccccaaaattagcgcaagcacacacaactcatttcttcaggatagtagcaatgctctctcgccatttgccaacaatcgcaccgtgaggaacccattgaccagttctggtgactggtcaggaagctcagctcctgatgctagtacggatgggtcaacaagcaattctggtgaggcagggttaagaggggaagaggatgatgtagataagctaagaagtgagatagccactttaaccaggaaagtggatgtttcagatatggagttgcagactctccgaaagcaaattgtgaaggagagtcggcgtgggcaagatctcttcaaggagatgagtagcctgagggaggagagggatgcactcagaagagaatgtgaaagactcagaggggcaaagaatatgatccatgattcaaatggctcagagaaacggctctcagatggggatgacccatggtcacagattgaagaactgaagcaagatctgagtcatgagaagaatctaaattcagatcttcgtctgcaacttcaaaagatgaaggaatccaactctgagctgcttctggctgtgaaagatcttgatgagtcgttggataaaaaaaacagagagatttccattttgcaagaggatacacaggaggatcagcaggaggcagaatatgagcatgcgctgtcaaatgtgcacaactctggacagaaattagccttatctgaaacgagttcataccaagagaaggaagatgagcttatgctggatgcactggcaaagaagcgtgatgacatctctacctctgagcttgaaaagaaagtccttgagttgagcaatgaaatcgagttgtacaagaaagaccgtgaggatatcgagatgcaaatggagcaacttgcacttgattatgagattctaaagcaagagaaccatgacgtgtcttcgaggctggagcaagcacaactgagggagcagctaaggatgcaatatgagtgttcggctcatttagctattataagtgatcttgaggccaatgttgagagcttggataatgagctccagacacaggctaaaaagtttgaagctgacatagcagaaataacgagcgcaaaggtggaacaagagcagcgggccattaaggctgaggattctctgaggaagataagatggaacaatgcagctactgcagaacgacttcaggaggaattcaaggtgttgtcttcacaggtatcttccgctttcagtgcgaatgaacgacaccttgtgcaagcaaggaaagaggtcgcggagctgcagttgcagaagagccagttagaagagttgctgcagaaggcccaaggagatcttggatcagttcaggatcagcaccgggcgaaggtccaacagttaataaccctagtggatttcaagtcaaaggagatagacaggctactgacggagctcaaaagcaagagtgacgagttccatgaccaaaaaagatgcgatgaagcaaggctgaatgctctgtcagaagaaatggacctactcaatgccaagatcgacgagctatccagcgagagaaacgacctctctgaaaagaacgcgcagaaagacaaggaactggccggaatcagtgaaaaggacatgcagttgcaagacaagactgctgagatcacttcactaaataaggagcttgtatctctcaaagaccaagtgaagacgcatctggacgaactgcacgatttaaaatgtctgaaggacaggaaggaggagacaattggaaaactgcaaatagatattgggtcactgaaactccagtgcgacaacttgaagacttcgctgtccaagaaggagtccgagaaagataaccttgcctctcaggtgctggagctgagaagatcccttgagacccgggaagaaggggcaaaggcaaatggccaaaattcagacgcgaagaacaatccgcatactaataataagcgcatgaagcacaataccggctccaccgggagcattgctgcactgccaggcaccaacggacagggtgaagacgatggtgactgcaatgggcatgacatgaggaacgccgcagcggacggggcagcgaaggagctggcctcgctgaaggagagcagcaaggcggtggaggaggagctgaaggagctgcacgagcggtactcggcgattagcctgaggctcgcggaagtggagggcgagcggcagcagctcgtgatgaccgttcggtcgctgaagaactcctccttgcggtgactgatgcatctccacccaaattgctgtagctaaaaggatttagacgataggtttgtccgtgacgtggttttgtccgtcagagttacagtacacagcatgtagatctcgtcacagtaaaatgtgcagtaatatagccataagttgtaatagttgtcttaccctctctacagtgtcagtgtgtcgtgctgtataatttccgtggcgtcattgtgttgtgaagtaaggaaaatgagaaggaaaagagtggtctttcagtttaatctcagaaacgcttgcgttgtgttccaa

SEQ ID NO: 52970 - DNA, 3925 bp, Zea Mays
caagcaatggcgtggcaaagtactgcagcaggcagcaggcagcacggcaaggccgcagcatatccgtagcaacgctgcagtactttcgtcacttctcaccgaaaaccaatcgccctcctccccacgcctgtggacccaaaaaaaatcaattcgattttctctcttccgttctccccacacaagaattgacctccgttttattgccgctcatctcaatctaatctctctctctagctcccccaatcgccagatcacagagagaggggaagagcgtgaggagggacgagaaagccaagctgtatagcgagaaagctcagttgagttctgttctgcttttgtcttcctctctcgctggatctactactcccaccactgcctctgcctcggcctcgttgctgctggctgcgtgcgtgactgcgtgcctttgcccaaagcaagcctgcctgctcggtggctcgcttcggttgcagctgcagtgacctcaccctgcctctatgcttgctctcccaccatgtggtggtggtcttcgcgctccaactaacccccaccagcagcgcatcacaccaccgcatcgcaccgcgatgccaaccctggtggcgtcacgcggcccggcggcttcttccgcgcgccgcattgcaatgccgccaccgccgctggacggacccgtgaaggagtactagctagctagctagcccagcggcagcgggcgaggcgaagggagcggaggtcgttcttgcagacatgttcaagtcgcggtggcgcggcggcagggccaaggccgtgttcaagctgcagttccacgccacgcaggtgcccgagctgggatgggaggcgatggtggtggtggtgacgccgcaggacgctggccggccgacggcgcggtcggagcccgcggaggtcaccgatggcgcgtgccggtgggcggcccctgtcatggaggccaccaagctccccaccggcaaggacaagatctaccagttcctcgtctatgagaccgggtcgagcaaggcggcgctgctgggggaggccacggtgaacctggcggagtacgccgacgcgttgaagccgtcggtggtgacgctcccgctcaagggcagccccggtgcgctgctgcaccggcgagaacggcgacgctctgccagcggtggcgaagacgccaaagaggaggacgacgctgcagagccagctgagcaagtttgaggacgaggacagcgagaaggcaagagcagccgcggatgcgatgagtcctgtgcaagatggattgttgataagaaaaccgccagacatgaggtttccatcaagaagaaatgtgcctatgtctgctgatccagtgggccatctccacaatggcagcagtttcgatgccgtctcagtgtcgggttcagatggaagttctgggcgatatacccccaaaattagcgcaagcacacacaactcatttcttcaggatagtagcaatgctctctcgccatttgccaacaatcgcaccgtgaggaacccattgaccagttctggtgactggtcaggaagctcagctcctgatgctagtacggatgggtcaacaagcaattctggtgaggcagggttaagaggggaagaggatgatgtagataagctaagaagtgagatagccactttaaccaggaaagtggatgtttcagatatggagttgcagactctccgaaagcaaattgtgaaggagagtcggcgtgggcaagatctcttcaaggagatgagtagcctgagggaggagagggatgcactcagaagagaatgtgaaagactcagaggggcaaagaatatgatccatgattcaaatggctcagagaaacggctctcagatggggatgacccatggtcacagattgaagaactgaagcaagatctgagtcatgagaagaatctaaattcagatcttcgtctgcaacttcaaaagatgaaggaatccaactctgagctgcttctggctgtgaaagatcttgatgagtcgttggataaaaaaaacagagagatttccattttgcaagaggatacacaggaggatcagcaggaggcagaatatgagcatgcgctgtcaaatgtgcacaactctggacagaaattagccttatctgaaacgagttcataccaagagaaggaagatgagcttatgctggatgcactggcaaagaagcgtgatgacatctctacctctgagcttgaaaagaaagtccttgagttgagcaatgaaatcgagttgtacaagaaagaccgtgaggatatcgagatgcaaatggagcaacttgcacttgattatgagattctaaagcaagagaaccatgacgtgtcttcgaggctggagcaagcacaactgagggagcagctaaggatgcaatatgagtgttcggctcatttagctattataagtgatcttgaggccaatgttgagagcttggataatgagctccagacacaggctaaaaagtttgaagctgacatagcagaaataacgagcgcaaaggtggaacaagagcagcgggccattaaggctgaggattctctgaggaagataagatggaacaatgcagctactgcagaacgacttcaggaggaattcaaggtgttgtcttcacaggtatcttccgctttcagtgcgaatgaacgacaccttgtgcaagcaaggaaagaggtcgcggagctgcagttgcagaagagccagttagaagagttgctgcagaaggcccaaggagatcttggatcagttcaggatcagcaccgggcgaaggtccaacagttaataaccctagtggatttcaagtcaaaggagatagacaggctactgacggagctcaaaagcaagagtgacgagttccatgaccaaaaaagatgcgatgaagcaaggctgaatgctctgtcagaagaaatggacctactcaatgccaagatcgacgagctatccagcgagagaaacgacctctctgaaaagaacgcgcagaaagacaaggaactggccggaatcagtgaaaaggacatgcagttgcaagacaagactgctgagatcacttcactaaataaggagcttgtatctctcaaagaccaagtgaagacgcatctggacgaactgcacgatttaaaatgtctgaaggacaggaaggaggagacaattggaaaactgcaaatagatattgggtcactgaaactccagtgcgacaacttgaagacttcgctgtccaagaaggagtccgagaaagataaccttgcctctcaggtgctggagctgagaagatcccttgagacccgggaagaaggggcaaaggcaaatggccaaaattcagacgcgaagaacaatccgcatactaataataagcgcatgaagcacaataccggctccaccgggagcattgctgcactgccaggcaccaacggacagggtgaagacgatggtgactgcaatgggcatgacatgaggaacgccgcagcggacggggcagcgaaggagctggcctcgctgaaggagagcagcaaggcggtggaggaggagctgaaggagctgcacgagcggtactcggcgattagcctgaggctcgcggaagtggagggcgagcggcagcagctcgtgatgaccgttcggtcgctgaagaactcctccttgcggtgactgatgcatctccacccaaattgctgtagctaaaaggatttagacgataggtttgtccgtgacgtggttttgtccgtcagagttacagtacacagcatgtagatctcgtcacagtaaaatgtgcagtaatatagccataagttgtaatagttgtcttaccctctctacagtgtcagtgtgtcgtgctgtataatttccgtggcgtcattgtgttgtgaagtaaggaaaatgagaaggaaaagagtggtctttcagtttaatctcagaaacgcttgcgttgtgttccaa

SEQ ID NO: 52971 - DNA, 2738 bp, Zea Mays
agccgcgtccccgcccgcgtccggtcctccgccgccaccactcacctcccttctgacccaaccggcgccctccccctcggccctcgcgttccacgaccacgagccgtgctctcgcgtgcgcgtcgcgtcgcactcgcatcacgaattcacgattcagccagcaacgcatcaccccttcccacccccacagggaccaggcctccaccacccaccttacccaggccataccccccgccccgaccgggggtctcctatcctcctgccctcaccgcgggtgcccgcaccgcgcggcgacgcctccccttcaaatctcccaggagctaggggcctcggccaccaccaccgcaccgcaccgtctcggacgcggctgcagctccgagcattggattccgaccaactgaccgagcggcgtgtcagatgatctcgccggcgatgtgtcgttcggcgccgcggcgggccgcgcaggtccggcgcctcctgtcgtcggccgcgcccccggcgcacgccggcgctgccgtgcctgggccctgcatcgtgcacaagcgcggcaacgacatcctccacgatccgtggtacaacaaggatacggcgttccccatgacggagcgcgaccgcctcggtctccgcggcttgctcccgccgcgggtcatgtccttcgagcagcagtacgagcgatttataaactctttccggtcgctggagcacaatacccgcggcgagcctgactccatcgtcgcgctggccaaatggaggatcctcaacaggttgcacgaccggaacgagacattgtactacagggtgctaattgacaatatcaaggattttgccccgataatatacactcccactgttggcttggtctgtgaaaattacagcggtctgttcagacgaccccgtgggatgtatttcagtgcaaaggataagggggagatgatgtcaatgatttacaactggccagcagagaaggttgacatgatagttgtgactgatgggagtcgcattctaggcttaggtgaccttggtgttcagggcataggtatacctattggtaaactggatgtttatgttgcagctgctggtattaacccacagaaggttcttccaataatgcttgatgtgggaacaaataatgaaaagcttctggaggacaagctatatttaggactgaggcaacctcggctggaaggagaagaatacttggctgttgtagatgaattcatggaggctgtccatgcacgttggcctaaagcagttgtgcagtgataaaatcacagtttgaagacttccaaatgaaatgggcctttgagactcttcagaggtatcggaaccgattttgcatgttcaatgatgacgtacaggggacagctggagttgctctagcaggcctacttggtgctgttagagcacagggccgtcctctccaggattttacgaatcaaaagatagtcgttgtgggagctggaagtgctgggataggtgtgcttagcatggctaaacaggcaatgttaaggatgcctgggatccacagaaccggggaagggcataatcaattctgggttctggacaaagatggccttattacgaaagctaggaaggacctggattctgcagtggcgcgttttgccagaggctttggtcctgatgaggtcccagatctctatgagggggctagtcttgttgaagtggtcaagaaagttaagccccatgtgcttttaggactatctggagttgggggcatatttaatgaggaggttctcaaagctatgaaagaatccgattcccctcggcctgcagtttttgcaatgtccaaccctactactaaagctgaatgcactcccgatgatgtattcaagcatgttggagataaagcgatatttgctagtggaagcccttttagtaatgtttctttaggaaatggtaaatctggttatgctaatcaagcaaacaacatgtatctatttcctgggattggtttaggtgcccttctttcaggtgcccggcatgtttcagatggcatgcttcaagcagcagctgagtgcctggcatcatacatcacagacgacgaaattcgaaaaggaatcctcttcccttcggtctccagtattaggcacatcaccgcacgtgtcggcgcagcagtcgtccgtgccgctgttgctgaagacctggctgaggggtgctgtgatgtgggtcctagggagcttgggagtatgtcagagtcggaagcagtggactacgtcgctcggaagatgtggtaccctatttacagccctcttgtgagcgacaaataataaatccgaagatctcgatgcctgcgcagaagcagatgttccattgaaggaatgtatcggatttgatatttttcttaaccatctctaaattagctgctcatctagaaagcatttcggcagagattggtgcccacgcatatggctaatgtatggctacattcatttgctctagacatgatttcgtcaccaggggacactcagttttgaaccgttgagcttcatactgccacgggaaccgtatttttcatcattattgtaatataaggcgccggagtttctgtcctgaaaataagcatgagatcagaagcgatatgatatcctttttataccaccaagaatcctgttcacggtccgtttaagaggaatttgatggaacacgtgctagaactgtttgaagacagaaaagtttcaccttagtatcatttcgctgcacttctgagtatacgtgcg

SEQ ID NO: 52972 - DNA, 2589 bp, Zea Mays
agccgcgtccccgcccgcgtccggtcctccgccgccaccactcacctcccttctgacccaaccggcgccctccccctcggccctcgcgttccacgaccacgagccgtgctctcgcgtgcgcgtcgcgtcgcactcgcatcacgaattcacgattcagccagcaacgcatcaccccttcccacccccacagggaccaggcctccaccacccaccttacccaggccataccccccgccccgaccgggggtctcctatcctcctgccctcaccgcgggtgcccgcaccgcgcggcgacgcctccccttcaaatctcccaggagctaggggcctcggccaccaccaccgcaccgcaccgtctcggacgcggctgcagctccgagcattggattccgaccaactgaccgagcggcgtgtcagatgatctcgccggcgatgtgtcgttcggcgccgcggcgggccgcgcaggtccggcgcctcctgtcgtcggccgcgcccccggcgcacgccggcgctgccgtgcctgggccctgcatcgtgcacaagcgcggcaacgacatcctccacgatccgtggtacaacaaggatacggcgttccccatgacggagcgcgaccgcctcggtctccgcggcttgctcccgccgcgggtcatgtccttcgagcagcagtacgagcgatttataaactctttccggtcgctggagcacaatacccgcggcgagcctgactccatcgtcgcgctggccaaatggaggatcctcaacaggttgcacgaccggaacgagacattgtactacagggtgctaattgacaatatcaaggattttgccccgataatatacactcccactgttggcttggtctgtgaaaattacagcggtctgttcagacgaccccgtgggatgtatttcagtgcaaaggataagggggagatgatgtcaatgatttacaactggccagcagagaaggttgacatgatagttgtgactgatgggagtcgcattctaggcttaggtgaccttggtgttcagggcataggtatacctattggtaaactggatgtttatgttgcagctgctggtattaacccacagaaggttcttccaataatgcttgatgtgggaacaaataatgaaaagcttctggaggacaagctatatttaggactgaggcaacctcggctggaaggagaagaatacttggctgttgtagatgaattcatggaggctgtccatgcacgttggcctaaagcagttgtgcagtttgaagacttccaaatgaaatgggcctttgagactcttcagaggtatcggaaccgattttgcatgttcaatgatgacgtacaggggacagctggagttgctctagcaggcctacttggtgctgttagagcacagggccgtcctctccaggattttacgaatcaaaagatagtcgttgtgggagctggaagtgctgggataggtgtgcttagcatggctaaacaggcaatgttaaggatgcctgggatccacagaaccggggaagggcataatcaattctgggttctggacaaagatggccttattacgaaagctaggaaggacctggattctgcagtggcgcgttttgccagaggctttggtcctgatgaggtcccagatctctatgagggggctagtcttgttgaagtggtcaagaaagttaagccccatgtgcttttaggactatctggagttgggggcatatttaatgaggaggttctcaaagctatgaaagaatccgattcccctcggcctgcagtttttgcaatgtccaaccctactactaaagctgaatgcactcccgatgatgtattcaagcatgttggagataaagcgatatttgctagtggaagcccttttagtaatgtttctttaggaaatggtaaatctggttatgctaatcaagcaaacaacatgtatctatttcctgggattggtttaggtgcccttctttcaggtgcccggcatgtttcagatggcatgcttcaagcagcagctgagtgcctggcatcatacatcacagacgacgaaattcgaaaaggaatcctcttcccttcggtctccagtattaggcacatcaccgcacgtgtcggcgcagcagtcgtccgtgccgctgttgctgaagacctggctgaggggtgctgtgatgtgggtcctagggagcttgggagtatgtcagagtcggaagcagtggactacgtcgctcggaagatgtggtaccctatttacagccctcttgtgagcgacaaataataaatccgaagatctcgatgcctgcgcagaagcagatgttccattgaaggaatgtatcggatttgatatttttcttaaccatctctaaattagctgctcatctagaaagcatttcggcagagattggtgcccacgcatatggctaatgtatggctacattcatttgctctagacatgatttcgtcaccaggggacactcagttttgaaccgttgagcttcatactgccacgggaaccgtatttttcatcattattgtaatataaggcgccggagtttcttagtatcatttcgctgcacttctgagtatacgtgcg

SEQ ID NO: 52973 - DNA, 2793 bp, Zea Mays
agccgcgtccccgcccgcgtccggtcctccgccgccaccactcacctcccttctgacccaaccggcgccctccccctcggccctcgcgttccacgaccacgagccgtgctctcgcgtgcgcgtcgcgtcgcactcgcatcacgaattcacgattcagccagcaacgcatcaccccttcccacccccacagggaccaggcctccaccacccaccttacccaggccataccccccgccccgaccgggggtctcctatcctcctgccctcaccgcgggtgcccgcaccgcgcggcgacgcctccccttcaaatctcccaggagctaggggcctcggccaccaccaccgcaccgcaccgtctcggacgcggctgcagctccgagcattggattccgaccaactgaccgagcggcgtgtcagatgatctcgccggcgatgtgtcgttcggcgccgcggcgggccgcgcaggtccggcgcctcctgtcgtcggccgcgcccccggcgcacgccggcgctgccgtgcctgggccctgcatcgtgcacaagcgcggcaacgacatcctccacgatccgtggtacaacaaggatacggcgttccccatgacggagcgcgaccgcctcggtctccgcggcttgctcccgccgcgggtcatgtccttcgagcagcagtacgagcgatttataaactctttccggtcgctggagcacaatacccgcggcgagcctgactccatcgtcgcgctggccaaatggaggatcctcaacaggttgcacgaccggaacgagacattgtactacagggtgctaattgacaatatcaaggattttgccccgataatatacactcccactgttggcttggtctgtgaaaattacagcggtctgttcagacgaccccgtgggatgtatttcagtgcaaaggataagggggagatgatgtcaatgatttacaactggccagcagagaaggttgacatgatagttgtgactgatgggagtcgcattctaggcttaggtgaccttggtgttcagggcataggtatacctattggtaaactggatgtttatgttgcagctgctggtattaacccacagaaggttcttccaataatgcttgatgtgggaacaaataatgaaaagcttctggaggacaagctatatttaggactgaggcaacctcggctggaaggagaagaatacttggctgttgtagatgaattcatggaggctgtccatgcacgttggcctaaagcagttgtgcagtttgaagacttccaaatgaaatgggcctttgagactcttcagaggtatcggaaccgattttgcatgttcaatgatgacgtacaggggacagctggagttgctctagcaggcctacttggtgctgttagagcacagggccgtcctctccaggattttacgaatcaaaagatagtcgttgtgggagctggaagcctactttatatggaatgttcattgtcaaaaatgtggttcgtacattctaattcctctttagaatccagtgctgggataggtgtgcttagcatggctaaacaggcaatgttaaggatgcctgggatccacagaaccggggaagggcataatcaattctgggttctggacaaagatggccttattacgaaagctaggaaggacctggattctgcagtggcgcgttttgccagaggctttggtcctgatgaggtcccagatctctatgagggggctagtcttgttgaagtggtcaagaaagttaagccccatgtgcttttaggactatctggagttgggggcatatttaatgaggaggttctcaaagctatgaaagaatccgattcccctcggcctgcagtttttgcaatgtccaaccctactactaaagctgaatgcactcccgatgatgtattcaagcatgttggagataaagcgatatttgctagtggaagcccttttagtaatgtttctttaggaaatggtaaatctggttatgctaatcaagcaaacaacatgtatctatttcctgggattggtttaggtgcccttctttcaggtgcccggcatgtttcagatggcatgcttcaagcagcagctgagtgcctggcatcatacatcacagacgacgaaattcgaaaaggaatcctcttcccttcggtctccagtattaggcacatcaccgcacgtgtcggcgcagcagtcgtccgtgccgctgttgctgaagacctggctgaggggtgctgtgatgtgggtcctagggagcttgggagtatgtcagagtcggaagcagtggactacgtcgctcggaagatgtggtaccctatttacagccctcttgtgagcgacaaataataaatccgaagatctcgatgcctgcgcagaagcagatgttccattgaaggaatgtatcggatttgatatttttcttaaccatctctaaattagctgctcatctagaaagcatttcggcagagattggtgcccacgcatatggctaatgtatggctacattcatttgctctagacatgatttcgtcaccaggggacactcagttttgaaccgttgagcttcatactgccacgggaaccgtatttttcatcattattgtaatataaggcgccggagtttctgtcctgaaaataagcatgagatcagaagcgatatgatatcctttttataccaccaagaatcctgttcacggtccgtttaagaggaatttgatggaacacgtgctagaactgtttgaagacagaaaagtttcaccttagtatcatttcgctgcacttctgagtatacgtgcg

SEQ ID NO: 52974 - DNA, 2685 bp, Zea Mays
agccgcgtccccgcccgcgtccggtcctccgccgccaccactcacctcccttctgacccaaccggcgccctccccctcggccctcgcgttccacgaccacgagccgtgctctcgcgtgcgcgtcgcgtcgcactcgcatcacgaattcacgattcagccagcaacgcatcaccccttcccacccccacagggaccaggcctccaccacccaccttacccaggccataccccccgccccgaccgggggtctcctatcctcctgccctcaccgcgggtgcccgcaccgcgcggcgacgcctccccttcaaatctcccaggagctaggggcctcggccaccaccaccgcaccgcaccgtctcggacgcggctgcagctccgagcattggattccgaccaactgaccgagcggcgtgtcagatgatctcgccggcgatgtgtcgttcggcgccgcggcgggccgcgcaggtccggcgcctcctgtcgtcggccgcgcccccggcgcacgccggcgctgccgtgcctgggccctgcatcgtgcacaagcgcggcaacgacatcctccacgatccgtggtacaacaaggatacggcgttccccatgacggagcgcgaccgcctcggtctccgcggcttgctcccgccgcgggtcatgtccttcgagcagcagtacgagcgatttataaactctttccggtcgctggagcacaatacccgcggcgagcctgactccatcgtcgcgctggccaaatggaggatcctcaacaggttgcacgaccggaacgagacattgtactacagggtgctaattgacaatatcaaggattttgccccgataatatacactcccactgttggcttggtctgtgaaaattacagcggtctgttcagacgaccccgtgggatgtatttcagtgcaaaggataagggggagatgatgtcaatgatttacaactggccagcagagaaggttgacatgatagttgtgactgatgggagtcgcattctaggcttaggtgaccttggtgttcagggcataggtatacctattggtaaactggatgtttatgttgcagctgctggtattaacccacagaaggttcttccaataatgcttgatgtgggaacaaataatgaaaagcttctggaggacaagctatgtgcgggcttcccctactattttcgctcaaaatactgctccctttctgaagtgataaaatcacagtttgaagacttccaaatgaaatgggcctttgagactcttcagaggtatcggaaccgattttgcatgttcaatgatgacgtacaggggacagctggagttgctctagcaggcctacttggtgctgttagagcacagggccgtcctctccaggattttacgaatcaaaagatagtcgttgtgggagctggaagtgctgggataggtgtgcttagcatggctaaacaggcaatgttaaggatgcctgggatccacagaaccggggaagggcataatcaattctgggttctggacaaagatggccttattacgaaagctaggaaggacctggattctgcagtggcgcgttttgccagaggctttggtcctgatgaggtcccagatctctatgagggggctagtcttgttgaagtggtcaagaaagttaagccccatgtgcttttaggactatctggagttgggggcatatttaatgaggaggttctcaaagctatgaaagaatccgattcccctcggcctgcagtttttgcaatgtccaaccctactactaaagctgaatgcactcccgatgatgtattcaagcatgttggagataaagcgatatttgctagtggaagcccttttagtaatgtttctttaggaaatggtaaatctggttatgctaatcaagcaaacaacatgtatctatttcctgggattggtttaggtgcccttctttcaggtgcccggcatgtttcagatggcatgcttcaagcagcagctgagtgcctggcatcatacatcacagacgacgaaattcgaaaaggaatcctcttcccttcggtctccagtattaggcacatcaccgcacgtgtcggcgcagcagtcgtccgtgccgctgttgctgaagacctggctgaggggtgctgtgatgtgggtcctagggagcttgggagtatgtcagagtcggaagcagtggactacgtcgctcggaagatgtggtaccctatttacagccctcttgtgagcgacaaataataaatccgaagatctcgatgcctgcgcagaagcagatgttccattgaaggaatgtatcggatttgatatttttcttaaccatctctaaattagctgctcatctagaaagcatttcggcagagattggtgcccacgcatatggctaatgtatggctacattcatttgctctagacatgatttcgtcaccaggggacactcagttttgaaccgttgagcttcatactgccacgggaaccgtatttttcatcattattgtaatataaggcgccggagtttctgtcctgaaaataagcatgagatcagaagcgatatgatatcctttttataccaccaagaatcctgttcacggtccgtttaagaggaatttgatggaacacgtgctagaactgtttgaagacagaaaagtttcaccttagtatcatttcgctgcacttctgagtatacgtgcg

SEQ ID NO: 52975 - DNA, 3148 bp, Zea Mays
aggattcatcaaacagtcaacagttgggcctttcggcttatgcatgacataagtcctcccagggtttatgcatgacagcccctgtgtctcttccaaatgagctagaagcggtctcccattctgcaagggttgagttattccgagacgctagttgcaacatagaaaatgaggtgttggccagtttgggaaatggccaagattcaactgctgttggagcaactcctggtttcagagttggagagatcaggtttgctaatggagatatttattctggcacattgttggggaacacaccagagggttcaggccagtatcgctggtcagatggttgcacctatgatggtgagtggaataaagggatgaggcatgggcaaggaaagacggaatggccatctggagccacctatgagggtgagtattctggtggctatgtatatggtgaaggtacctataagggtccagataaaatcatttacaagggacgatggaagttgaatcacaagcatggacttggacatcagacatatccaaatggagacatgtttgaaggttcgtggattcagggagaaatagtaggtcatgggaagtacacgtgggcaaacggggacacttacgttggcaacatgaaaagtggcaagatgtcagggaaaggaactcttacatggaaaaatggggactcgtatgagggtaactggatagatggcatgatgcatgggtatggaatctatacatggaatgaatgtgggtattatattggaacatggacaaggggactgaaggatgggaaaggtaaattctttccgaaaggttgtagagtacctgttaacgacgagatgtatatcaataatctaagaaatcgtggtgtactgcctgatattagaaggcagaatcatggttcacgcatacttcactcttcctcggttgacatggggaacatgaaggttggtatggctaggcaatcttcagatgttttgttcaaaaggaattcagctgagcaatcttctttgaagaatgtgtctttggaaagacggtggagtcttgaggtggctattgaaaaatttattggccatgaatccagcgaaagttctggtctagaaagcttggaaaacttgagtgattctcgtttgcccatactggaaagagaatacatgcaaggtgttctaatcagtgaggtggttcttgacaggagtttttcagactcctcaaagaagacaaaacgccgccagaagaaaacggtgagggacacaaaaaagcctggagagacaataattaagggacacagaagctatgatttaatgctcagcctgcagcttggaatcaggtacacagttggaaagatcacaccaattcaaaaacgtgaagttcgtgcttcagattttggaccaagagcaagtttctggatgaacttcccaaaagaaggatctcggcttactccttcacattcagcggaagattttaaatggaaagactactgtcccatggttttcaggaatttgagagagatgttcaagattgatgctgcagactatatgatctccatatgtggaaattctgctcttaggcaactatcttcccctggaaagagtggaagtgtctttttcctgtcacaagatgatagattcatgattaagactctccgaaaatctgaagtgcaggttcttttacgaatgcttccaaactattatgatcatgtccgtacctatgagaacaccctcataactaagttttttggcctccacagggtgaaaccttctagtggtcaaaagtttcggtttgttgtaatgggaaacatgttttgcactgaattgagaatccaccggaggtttgatttgaaaggatcatctttaggccgttctactgataaaattgaaattgacgagaacacaactctgaaggatttggatcttaactattccttttatcttgaaccttcctggcgtgaggctcttcttaaacagattgaaacagacagtgattttttgagaacacagcggataatggattacagcctactgcttggtgtccattatagagctccacagcacttgcggacacgtgcatcttatcaccggagcatggcagcagatagattgactgttgtttcagaagaagatgctcaggaagatgatgcccttagccatccagaaggactagtcttggttcaaagcagtggtgagaacagtgttattgttggccctcacataagaggcagccgcttgcgtgcatcggctgctggatttggcgaagtagacctactgctgcctggaacagccaggcttcagatccagctaggagttaacatgcctgcaagggcagagcagacccctaaggaagatgaaagcaaaccgttccgtgaggtgtacgatgtggtcctctacctgggcatcattgacatactgcaagagtacaacatgacaaagaaaatcgagcacgctgtcaagtccatgcagtatgactcggtctcgatctcggctgtggacccccagttctactcggagcgtttcttgaacttcatccagaccgtcttccctgagaattcgtagctccatccaccaatacttttcttggaagatgcccgcccactaccacttgctgagaacttcatccagacgacagtccatgtcttcgaatttggagcttgcgagcatcataagaacattgcactctcttcagtgcgtgcctgttccttcctggatgaactggcaggaagagtggccaacaaaatgagattcgttagtgaaattgtgcagaagcaaatcgatcttctctaggctattttgccccgatccctggggtcaccggatcagccgtctggcttcctggagtaggcttggcgtattgggactcgagcaggaagtagatgtgagttgcgaggattctagtgacagcggcgccatagagctctgggattcactgttatgtctcggcagttgcagaaagctgaagcgcctgttgcctctggctcgtgtttcatctgttaaggtgctatggaggatatgtttaataagtccctgaaaacacgcatcaagctccgatacatttttttgtaggacaaacaaaagagtactatgtattttatcgcaaaaacgaaaagaaatggaagcaacagatgaaaatcgcgcgtggtgacggaggaattacgagtgcg

SEQ ID NO: 52976 - DNA, 3144 bp, Zea Mays
gttaaaaaaaaatctgccctacccaaagcacaatgcgaaacgccttaagtcctcccagggtttatgcatgacagcccctgtgtctcttccaaatgagctagaagcggtctcccattctgcaagggttgagttattccgagacgctagttgcaacatagaaaatgaggtgttggccagtttgggaaatggccaagattcaactgctgttggagcaactcctggtttcagagttggagagatcaggtttgctaatggagatatttattctggcacattgttggggaacacaccagagggttcaggccagtatcgctggtcagatggttgcacctatgatggtgagtggaataaagggatgaggcatgggcaaggaaagacggaatggccatctggagccacctatgagggtgagtattctggtggctatgtatatggtgaaggtacctataagggtccagataaaatcatttacaagggacgatggaagttgaatcacaagcatggacttggacatcagacatatccaaatggagacatgtttgaaggttcgtggattcagggagaaatagtaggtcatgggaagtacacgtgggcaaacggggacacttacgttggcaacatgaaaagtggcaagatgtcagggaaaggaactcttacatggaaaaatggggactcgtatgagggtaactggatagatggcatgatgcatgggtatggaatctatacatggaatgaatgtgggtattatattggaacatggacaaggggactgaaggatgggaaaggtaaattctttccgaaaggttgtagagtacctgttaacgacgagatgtatatcaataatctaagaaatcgtggtgtactgcctgatattagaaggcagaatcatggttcacgcatacttcactcttcctcggttgacatggggaacatgaaggttggtatggctaggcaatcttcagatgttttgttcaaaaggaattcagctgagcaatcttctttgaagaatgtgtctttggaaagacggtggagtcttgaggtggctattgaaaaatttattggccatgaatccagcgaaagttctggtctagaaagcttggaaaacttgagtgattctcgtttgcccatactggaaagagaatacatgcaaggtgttctaatcagtgaggtggttcttgacaggagtttttcagactcctcaaagaagacaaaacgccgccagaagaaaacggtgagggacacaaaaaagcctggagagacaataattaagggacacagaagctatgatttaatgctcagcctgcagcttggaatcaggtacacagttggaaagatcacaccaattcaaaaacgtgaagttcgtgcttcagattttggaccaagagcaagtttctggatgaacttcccaaaagaaggatctcggcttactccttcacattcagcggaagattttaaatggaaagactactgtcccatggttttcaggaatttgagagagatgttcaagattgatgctgcagactatatgatctccatatgtggaaattctgctcttaggcaactatcttcccctggaaagagtggaagtgtctttttcctgtcacaagatgatagattcatgattaagactctccgaaaatctgaagtgcaggttcttttacgaatgcttccaaactattatgatcatgtccgtacctatgagaacaccctcataactaagttttttggcctccacagggtgaaaccttctagtggtcaaaagtttcggtttgttgtaatgggaaacatgttttgcactgaattgagaatccaccggaggtttgatttgaaaggatcatctttaggccgttctactgataaaattgaaattgacgagaacacaactctgaaggatttggatcttaactattccttttatcttgaaccttcctggcgtgaggctcttcttaaacagattgaaacagacagtgattttttgagaacacagcggataatggattacagcctactgcttggtgtccattatagagctccacagcacttgcggacacgtgcatcttatcaccggagcatggcagcagatagattgactgttgtttcagaagaagatgctcaggaagatgatgcccttagccatccagaaggactagtcttggttcaaagcagtggtgagaacagtgttattgttggccctcacataagaggcagccgcttgcgtgcatcggctgctggatttggcgaagtagacctactgctgcctggaacagccaggcttcagatccagctaggagttaacatgcctgcaagggcagagcagacccctaaggaagatgaaagcaaaccgttccgtgaggtgtacgatgtggtcctctacctgggcatcattgacatactgcaagagtacaacatgacaaagaaaatcgagcacgctgtcaagtccatgcagtatgactcggtctcgatctcggctgtggacccccagttctactcggagcgtttcttgaacttcatccagaccgtcttccctgagaattcgtagctccatccaccaatacttttcttggaagatgcccgcccactaccacttgctgagaacttcatccagacgacagtccatgtcttcgaatttggagcttgcgagcatcataagaacattgcactctcttcagtgcgtgcctgttccttcctggatgaactggcaggaagagtggccaacaaaatgagattcgttagtgaaattgtgcagaagcaaatcgatcttctctaggctattttgccccgatccctggggtcaccggatcagccgtctggcttcctggagtaggcttggcgtattgggactcgagcaggaagtagatgtgagttgcgaggattctagtgacagcggcgccatagagctctgggattcactgttatgtctcggcagttgcagaaagctgaagcgcctgttgcctctggctcgtgtttcatctgttaaggtgctatggaggatatgtttaataagtccctgaaaacacgcatcaagctccgatacatttttttgtaggacaaacaaaagagtactatgtattttatcgcaaaaacgaaaagaaatggaagcaacagatgaaaatcgcgcgtggtgacggaggaattacgagtgcg

SEQ ID NO: 52977 - DNA, 3235 bp, Zea Mays
tgaccctccgcacggatcctctccgtcctcaccctcttctccctctccctccctctccatatctctgcaggtctgcgaggtagtaccgtcgacgaggcctccctcccctccggcgagccccccttccgaagtcgtgagagtcctcccagggtttatgcatgacagcccctgtgtctcttccaaatgagctagaagcggtctcccattctgcaagggttgagttattccgagacgctagttgcaacatagaaaatgaggtgttggccagtttgggaaatggccaagattcaactgctgttggagcaactcctggtttcagagttggagagatcaggtttgctaatggagatatttattctggcacattgttggggaacacaccagagggttcaggccagtatcgctggtcagatggttgcacctatgatggtgagtggaataaagggatgaggcatgggcaaggaaagacggaatggccatctggagccacctatgagggtgagtattctggtggctatgtatatggtgaaggtacctataagggtccagataaaatcatttacaagggacgatggaagttgaatcacaagcatggacttggacatcagacatatccaaatggagacatgtttgaaggttcgtggattcagggagaaatagtaggtcatgggaagtacacgtgggcaaacggggacacttacgttggcaacatgaaaagtggcaagatgtcagggaaaggaactcttacatggaaaaatggggactcgtatgagggtaactggatagatggcatgatgcatgggtatggaatctatacatggaatgaatgtgggtattatattggaacatggacaaggggactgaaggatgggaaaggtaaattctttccgaaaggttgtagagtacctgttaacgacgagatgtatatcaataatctaagaaatcgtggtgtactgcctgatattagaaggcagaatcatggttcacgcatacttcactcttcctcggttgacatggggaacatgaaggttggtatggctaggcaatcttcagatgttttgttcaaaaggaattcagctgagcaatcttctttgaagaatgtgtctttggaaagacggtggagtcttgaggtggctattgaaaaatttattggccatgaatccagcgaaagttctggtctagaaagcttggaaaacttgagtgattctcgtttgcccatactggaaagagaatacatgcaaggtgttctaatcagtgaggtggttcttgacaggagtttttcagactcctcaaagaagacaaaacgccgccagaagaaaacggtgagggacacaaaaaagcctggagagacaataattaagggacacagaagctatgatttaatgctcagcctgcagcttggaatcaggtacacagttggaaagatcacaccaattcaaaaacgtgaagttcgtgcttcagattttggaccaagagcaagtttctggatgaacttcccaaaagaaggatctcggcttactccttcacattcagcggaagattttaaatggaaagactactgtcccatggttttcaggaatttgagagagatgttcaagattgatgctgcagactatatgatctccatatgtggaaattctgctcttaggcaactatcttcccctggaaagagtggaagtgtctttttcctgtcacaagatgatagattcatgattaagactctccgaaaatctgaagtgcaggttcttttacgaatgcttccaaactattatgatcatgtccgtacctatgagaacaccctcataactaagttttttggcctccacagggtgaaaccttctagtggtcaaaagtttcggtttgttgtaatgggaaacatgttttgcactgaattgagaatccaccggaggtttgatttgaaaggatcatctttaggccgttctactgataaaattgaaattgacgagaacacaactctgaaggatttggatcttaactattccttttatcttgaaccttcctggcgtgaggctcttcttaaacagattgaaacagacagtgattttttgagaacacagcggataatggattacagcctactgcttggtgtccattatagagctccacagcacttgcggacacgtgcatcttatcaccggagcatggcagcagatagattgactgttgtttcagaagaagatgctcaggaagatgatgcccttagccatccagaaggactagtcttggttcaaagcagtggtgagaacagtgttattgttggccctcacataagaggcagccgcttgcgtgcatcggctgctggatttggcgaagtagacctactgctgcctggaacagccaggcttcagatccagctaggagttaacatgcctgcaagggcagagcagacccctaaggaagatgaaagcaaaccgttccgtgaggtgtacgatgtggtcctctacctgggcatcattgacatactgcaagagtacaacatgacaaagaaaatcgagcacgctgtcaagtccatgcagtatgactcggtctcgatctcggctgtggacccccagttctactcggagcgtttcttgaacttcatccagaccgtcttccctgagaattcgtagctccatccaccaatacttttcttggaagatgcccgcccactaccacttgctgagaacttcatccagacgacagtccatgtcttcgaatttggagcttgcgagcatcataagaacattgcactctcttcagtgcgtgcctgttccttcctggatgaactggcaggaagagtggccaacaaaatgagattcgttagtgaaattgtgcagaagcaaatcgatcttctctaggctattttgccccgatccctggggtcaccggatcagccgtctggcttcctggagtaggcttggcgtattgggactcgagcaggaagtagatgtgagttgcgaggattctagtgacagcggcgccatagagctctgggattcactgttatgtctcggcagttgcagaaagctgaagcgcctgttgcctctggctcgtgtttcatctgttaaggtgctatggaggatatgtttaataagtccctgaaaacacgcatcaagctccgatacatttttttgtaggacaaacaaaagagtactatgtattttatcgcaaaaacgaaaagaaatggaagcaacagatgaaaatcgcgcgtggtgacggaggaattacgagtgcg

SEQ ID NO: 52978 - DNA, 3204 bp, Zea Mays
tggatccggcggccggggtcttcgccgtccacagcagtctgcgaggtagtaccgtcgacgaggcctccctcccctccggcgagccccccttccgaagtcgtgaggcagtgcttttgatattagtttttgcatttttgtggatcagtcctcccagggtttatgcatgacagcccctgtgtctcttccaaatgagctagaagcggtctcccattctgcaagggttgagttattccgagacgctagttgcaacatagaaaatgaggtgttggccagtttgggaaatggccaagattcaactgctgttggagcaactcctggtttcagagttggagagatcaggtttgctaatggagatatttattctggcacattgttggggaacacaccagagggttcaggccagtatcgctggtcagatggttgcacctatgatggtgagtggaataaagggatgaggcatgggcaaggaaagacggaatggccatctggagccacctatgagggtgagtattctggtggctatgtatatggtgaaggtacctataagggtccagataaaatcatttacaagggacgatggaagttgaatcacaagcatggacttggacatcagacatatccaaatggagacatgtttgaaggttcgtggattcagggagaaatagtaggtcatgggaagtacacgtgggcaaacggggacacttacgttggcaacatgaaaagtggcaagatgtcagggaaaggaactcttacatggaaaaatggggactcgtatgagggtaactggatagatggcatgatgcatgggtatggaatctatacatggaatgaatgtgggtattatattggaacatggacaaggggactgaaggatgggaaaggtaaattctttccgaaaggttgtagagtacctgttaacgacgagatgtatatcaataatctaagaaatcgtggtgtactgcctgatattagaaggcagaatcatggttcacgcatacttcactcttcctcggttgacatggggaacatgaaggttggtatggctaggcaatcttcagatgttttgttcaaaaggaattcagctgagcaatcttctttgaagaatgtgtctttggaaagacggtggagtcttgaggtggctattgaaaaatttattggccatgaatccagcgaaagttctggtctagaaagcttggaaaacttgagtgattctcgtttgcccatactggaaagagaatacatgcaaggtgttctaatcagtgaggtggttcttgacaggagtttttcagactcctcaaagaagacaaaacgccgccagaagaaaacggtgagggacacaaaaaagcctggagagacaataattaagggacacagaagctatgatttaatgctcagcctgcagcttggaatcaggtcccttgtcatcaggctcttggaactaacgatgcgttttaaaaaaaatggtacacagttggaaagatcacaccaattcaaaaacgtgaagttcgtgcttcagattttggaccaagagcaagtttctggatgaacttcccaaaagaaggatctcggcttactccttcacattcagcggaagattttaaatggaaagactactgtcccatggttttcaggaatttgagagagatgttcaagattgatgctgcagactatatgatctccatatgtggaaattctgctcttaggcaactatcttcccctggaaagagtggaagtgtctttttcctgtcacaagatgatagattcatgattaagactctccgaaaatctgaagtgcagggtgaaaccttctagtggtcaaaagtttcggtttgttgtaatgggaaacatgttttgcactgaattgagaatccaccggaggtttgatttgaaaggatcatctttaggccgttctactgataaaattgaaattgacgagaacacaactctgaaggatttggatcttaactattccttttatcttgaaccttcctggcgtgaggctcttcttaaacagattgaaacagacagtgattttttgagaacacagcggataatggattacagcctactgcttggtgtccattatagagctccacagcacttgcggacacgtgcatcttatcaccggagcatggcagcagatagattgactgttgtttcagaagaagatgctcaggaagatgatgcccttagccatccagaaggactagtcttggttcaaagcagtggtgagaacagtgttattgttggccctcacataagaggcagccgcttgcgtgcatcggctgctggatttggcgaagtagacctactgctgcctggaacagccaggcttcagatccagctaggagttaacatgcctgcaagggcagagcagacccctaaggaagatgaaagcaaaccgttccgtgaggtgtacgatgtggtcctctacctgggcatcattgacatactgcaagagtacaacatgacaaagaaaatcgagcacgctgtcaagtccatgcagtatgactcggtctcgatctcggctgtggacccccagttctactcggagcgtttcttgaacttcatccagaccgtcttccctgagaattcgtagctccatccaccaatacttttcttggaagatgcccgcccactaccacttgctgagaacttcatccagacgacagtccatgtcttcgaatttggagcttgcgagcatcataagaacattgcactctcttcagtgcgtgcctgttccttcctggatgaactggcaggaagagtggccaacaaaatgagattcgttagtgaaattgtgcagaagcaaatcgatcttctctaggctattttgccccgatccctggggtcaccggatcagccgtctggcttcctggagtaggcttggcgtattgggactcgagcaggaagtagatgtgagttgcgaggattctagtgacagcggcgccatagagctctgggattcactgttatgtctcggcagttgcagaaagctgaagcgcctgttgcctctggctcgtgtttcatctgttaaggtgctatggaggatatgtttaataagtccctgaaaacacgcatcaagctccgatacatttttttgtaggacaaacaaaagagtactatgtattttatcgcaaaaacgaaaagaaatggaagcaacagatgaaaatcgcgcgtggtgacggaggaattacgagtgcg

SEQ ID NO: 52979 - DNA, 3299 bp, Zea Mays
cgcgattcgtggatccggcggccggggtcttcgccgtccacagcagtctgcgaggtagtaccgtcgacgaggcctccctcccctccggcgagccccccttccgaagtcgtgaggcagtgcttttgatattagtttttgcatttttgtggatcagtcctcccagggtttatgcatgacagcccctgtgtctcttccaaatgagctagaagcggtctcccattctgcaagggttgagttattccgagacgctagttgcaacatagaaaatgaggtgttggccagtttgggaaatggccaagattcaactgctgttggagcaactcctggtttcagagttggagagatcaggtttgctaatggagatatttattctggcacattgttggggaacacaccagagggttcaggccagtatcgctggtcagatggttgcacctatgatggtgagtggaataaagggatgaggcatgggcaaggaaagacggaatggccatctggagccacctatgagggtgagtattctggtggctatgtatatggtgaaggtacctataagggtccagataaaatcatttacaagggacgatggaagttgaatcacaagcatggacttggacatcagacatatccaaatggagacatgtttgaaggttcgtggattcagggagaaatagtaggtcatgggaagtacacgtgggcaaacggggacacttacgttggcaacatgaaaagtggcaagatgtcagggaaaggaactcttacatggaaaaatggggactcgtatgagggtaactggatagatggcatgatgcatgggtatggaatctatacatggaatgaatgtgggtattatattggaacatggacaaggggactgaaggatgggaaaggtaaattctttccgaaaggttgtagagtacctgttaacgacgagatgtatatcaataatctaagaaatcgtggtgtactgcctgatattagaaggcagaatcatggttcacgcatacttcactcttcctcggttgacatggggaacatgaaggttggtatggctaggcaatcttcagatgttttgttcaaaaggaattcagctgagcaatcttctttgaagaatgtgtctttggaaagacggtggagtcttgaggtggctattgaaaaatttattggccatgaatccagcgaaagttctggtctagaaagcttggaaaacttgagtgattctcgtttgcccatactggaaagagaatacatgcaaggtgttctaatcagtgaggtggttcttgacaggagtttttcagactcctcaaagaagacaaaacgccgccagaagaaaacggtgagggacacaaaaaagcctggagagacaataattaagggacacagaagctatgatttaatgctcagcctgcagcttggaatcaggtcccttgtcatcaggctcttggaactaacgatgcgttttaaaaaaaatggtacacagttggaaagatcacaccaattcaaaaacgtgaagttcgtgcttcagattttggaccaagagcaagtttctggatgaacttcccaaaagaaggatctcggcttactccttcacattcagcggaagattttaaatggaaagactactgtcccatggttttcaggaatttgagagagatgttcaagattgatgctgcagactatatgatctccatatgtggaaattctgctcttaggcaactatcttcccctggaaagagtggaagtgtctttttcctgtcacaagatgatagattcatgattaagactctccgaaaatctgaagtgcaggttcttttacgaatgcttccaaactattatgatcatgtccgtacctatgagaacaccctcataactaagttttttggcctccacagggtgaaaccttctagtggtcaaaagtttcggtttgttgtaatgggaaacatgttttgcactgaattgagaatccaccggaggtttgatttgaaaggatcatctttaggccgttctactgataaaattgaaattgacgagaacacaactctgaaggatttggatcttaactattccttttatcttgaaccttcctggcgtgaggctcttcttaaacagattgaaacagacagtgattttttgagaacacagcggataatggattacagcctactgcttggtgtccattatagagctccacagcacttgcggacacgtgcatcttatcaccggagcatggcagcagatagattgactgttgtttcagaagaagatgctcaggaagatgatgcccttagccatccagaaggactagtcttggttcaaagcagtggtgagaacagtgttattgttggccctcacataagaggcagccgcttgcgtgcatcggctgctggatttggcgaagtagacctactgctgcctggaacagccaggcttcagatccagctaggagttaacatgcctgcaagggcagagcagacccctaaggaagatgaaagcaaaccgttccgtgaggtgtacgatgtggtcctctacctgggcatcattgacatactgcaagagtacaacatgacaaagaaaatcgagcacgctgtcaagtccatgcagtatgactcggtctcgatctcggctgtggacccccagttctactcggagcgtttcttgaacttcatccagaccgtcttccctgagaattcgtagctccatccaccaatacttttcttggaagatgcccgcccactaccacttgctgagaacttcatccagacgacagtccatgtcttcgaatttggagcttgcgagcatcataagaacattgcactctcttcagtgcgtgcctgttccttcctggatgaactggcaggaagagtggccaacaaaatgagattcgttagtgaaattgtgcagaagcaaatcgatcttctctaggctattttgccccgatccctggggtcaccggatcagccgtctggcttcctggagtaggcttggcgtattgggactcgagcaggaagtagatgtgagttgcgaggattctagtgacagcggcgccatagagctctgggattcactgttatgtctcggcagttgcagaaagctgaagcgcctgttgcctctggctcgtgtttcatctgttaaggtgctatggaggatatgtttaataagtccctgaaaacacgcatcaagctccgatacatttttttgtaggacaaacaaaagagtactatgtattttatcgcaaaaacgaaaagaaatggaagcaacagatgaaaatcgcgcgtggtgacggaggaattacgagtgcg

SEQ ID NO: 52980 - DNA, 3319 bp, Zea Mays
tcccgcggccggatccccatcggcgcgacgcgattcgtggatccggcggccggggtcttcgccgtccacagcagtctgcgaggtagtaccgtcgacgaggcctccctcccctccggcgagccccccttccgaagtcgtgaggcagtgcttttgatattagtttttgcatttttgtggatcagtcctcccagggtttatgcatgacagcccctgtgtctcttccaaatgagctagaagcggtctcccattctgcaagggttgagttattccgagacgctagttgcaacatagaaaatgaggtgttggccagtttgggaaatggccaagattcaactgctgttggagcaactcctggtttcagagttggagagatcaggtttgctaatggagatatttattctggcacattgttggggaacacaccagagggttcaggccagtatcgctggtcagatggttgcacctatgatggtgagtggaataaagggatgaggcatgggcaaggaaagacggaatggccatctggagccacctatgagggtgagtattctggtggctatgtatatggtgaaggtacctataagggtccagataaaatcatttacaagggacgatggaagttgaatcacaagcatggacttggacatcagacatatccaaatggagacatgtttgaaggttcgtggattcagggagaaatagtaggtcatgggaagtacacgtgggcaaacggggacacttacgttggcaacatgaaaagtggcaagatgtcagggaaaggaactcttacatggaaaaatggggactcgtatgagggtaactggatagatggcatgatgcatgggtatggaatctatacatggaatgaatgtgggtattatattggaacatggacaaggggactgaaggatgggaaaggtaaattctttccgaaaggttgtagagtacctgttaacgacgagatgtatatcaataatctaagaaatcgtggtgtactgcctgatattagaaggcagaatcatggttcacgcatacttcactcttcctcggttgacatggggaacatgaaggttggtatggctaggcaatcttcagatgttttgttcaaaaggaattcagctgagcaatcttctttgaagaatgtgtctttggaaagacggtggagtcttgaggtggctattgaaaaatttattggccatgaatccagcgaaagttctggtctagaaagcttggaaaacttgagtgattctcgtttgcccatactggaaagagaatacatgcaaggtgttctaatcagtgaggtggttcttgacaggagtttttcagactcctcaaagaagacaaaacgccgccagaagaaaacggtgagggacacaaaaaagcctggagagacaataattaagggacacagaagctatgatttaatgctcagcctgcagcttggaatcaggtacacagttggaaagatcacaccaattcaaaaacgtgaagttcgtgcttcagattttggaccaagagcaagtttctggatgaacttcccaaaagaaggatctcggcttactccttcacattcagcggaagattttaaatggaaagactactgtcccatggttttcaggaatttgagagagatgttcaagattgatgctgcagactatatgatctccatatgtggaaattctgctcttaggcaactatcttcccctggaaagagtggaagtgtctttttcctgtcacaagatgatagattcatgattaagactctccgaaaatctgaagtgcaggtccattttctatatggattacagagattgtatttcttagctttcatgattgttggatagattgtgcatgtatagtacggccatttgcctaggaagcgaaattgaacttttcatgactctactaccctggtgaaaccttctagtggtcaaaagtttcggtttgttgtaatgggaaacatgttttgcactgaattgagaatccaccggaggtttgatttgaaaggatcatctttaggccgttctactgataaaattgaaattgacgagaacacaactctgaaggatttggatcttaactattccttttatcttgaaccttcctggcgtgaggctcttcttaaacagattgaaacagacagtgattttttgagaacacagcggataatggattacagcctactgcttggtgtccattatagagctccacagcacttgcggacacgtgcatcttatcaccggagcatggcagcagatagattgactgttgtttcagaagaagatgctcaggaagatgatgcccttagccatccagaaggactagtcttggttcaaagcagtggtgagaacagtgttattgttggccctcacataagaggcagccgcttgcgtgcatcggctgctggatttggcgaagtagacctactgctgcctggaacagccaggcttcagatccagctaggagttaacatgcctgcaagggcagagcagacccctaaggaagatgaaagcaaaccgttccgtgaggtgtacgatgtggtcctctacctgggcatcattgacatactgcaagagtacaacatgacaaagaaaatcgagcacgctgtcaagtccatgcagtatgactcggtctcgatctcggctgtggacccccagttctactcggagcgtttcttgaacttcatccagaccgtcttccctgagaattcgtagctccatccaccaatacttttcttggaagatgcccgcccactaccacttgctgagaacttcatccagacgacagtccatgtcttcgaatttggagcttgcgagcatcataagaacattgcactctcttcagtgcgtgcctgttccttcctggatgaactggcaggaagagtggccaacaaaatgagattcgttagtgaaattgtgcagaagcaaatcgatcttctctaggctattttgccccgatccctggggtcaccggatcagccgtctggcttcctggagtaggcttggcgtattgggactcgagcaggaagtagatgtgagttgcgaggattctagtgacagcggcgccatagagctctgggattcactgttatgtctcggcagttgcagaaagctgaagcgcctgttgcctctggctcgtgtttcatctgttaaggtgctatggaggatatgtttaataagtccctgaaaacacgcatcaagctccgatacatttttttgtaggacaaacaaaagagtactatgtattttatcgcaaaaacgaaaagaaatggaagcaacagatgaaaatcgcgcgtggtgacggaggaattacgagtgcg

SEQ ID NO: 52981 - DNA, 3204 bp, Zea Mays
ctacgtctactacctgctctgctctctctcccccacaggccccgcagcatccacacgaggacttcagaatcagcagcagccagcaggcagcagctcagcgagacagacgcgtccggggctcccctccgcgcgcccgccgatcaaggatcaacaacacacggggacgcctcccgtctccttcattcccagcctgcactgcgccgccccagacgcccgcgaccctctccacctcctccggcgaataccgttcctccccggcaagctaccctccgatcctttgttccgggtctgcgaggtagtaccgtcgacgaggcctccctcccctccggcgagccccccttccgaagtcgtgagtcctcccagggtttatgcatgacagcccctgtgtctcttccaaatgagctagaagcggtctcccattctgcaagggttgagttattccgagacgctagttgcaacatagaaaatgaggtgttggccagtttgggaaatggccaagattcaactgctgttggagcaactcctggtttcagagttggagagatcaggtttgctaatggagatatttattctggcacattgttggggaacacaccagagggttcaggccagtatcgctggtcagatggttgcacctatgatggtgagtggaataaagggatgaggcatgggcaaggaaagacggaatggccatctggagccacctatgagggtgagtattctggtggctatgtatatggtgaaggtacctataagggtccagataaaatcatttacaagggacgatggaagttgaatcacaagcatggacttggacatcagacatatccaaatggagacatgtttgaaggttcgtggattcagggagaaatagtaggtcatgggaagtacacgtgggcaaacggggacacttacgttggcaacatgaaaagtggcaagatgtcagggaaaggaactcttacatggaaaaatggggactcgtatgagggtaactggatagatggcatgatgcatgggtatggaatctatacatggaatgaatgtgggtattatattggaacatggacaaggggactgaaggatgggaaaggtaaattctttccgaaaggttgtagagtacctgttaacgacgagatgtatatcaataatctaagaaatcgtggtgtactgcctgatattagaaggcagaatcatggttcacgcatacttcactcttcctcggttgacatggggaacatgaaggagtttttcagactcctcaaagaagacaaaacgccgccagaagaaaacggtgagggacacaaaaaagcctggagagacaataattaagggacacagaagctatgatttaatgctcagcctgcagcttggaatcaggtacacagttggaaagatcacaccaattcaaaaacgtgaagttcgtgcttcagattttggaccaagagcaagtttctggatgaacttcccaaaagaaggatctcggcttactccttcacattcagcggaagattttaaatggaaagactactgtcccatggttttcaggaatttgagagagatgttcaagattgatgctgcagactatatgatctccatatgtggaaattctgctcttaggcaactatcttcccctggaaagagtggaagtgtctttttcctgtcacaagatgatagattcatgattaagactctccgaaaatctgaagtgcaggttcttttacgaatgcttccaaactattatgatcatgtccgtacctatgagaacaccctcataactaagttttttggcctccacagggtgaaaccttctagtggtcaaaagtttcggtttgttgtaatgggaaacatgttttgcactgaattgagaatccaccggaggtttgatttgaaaggatcatctttaggccgttctactgataaaattgaaattgacgagaacacaactctgaaggatttggatcttaactattccttttatcttgaaccttcctggcgtgaggctcttcttaaacagattgaaacagacagtgattttttgagaacacagcggataatggattacagcctactgcttggtgtccattatagagctccacagcacttgcggacacgtgcatcttatcaccggagcatggcagcagatagattgactgttgtttcagaagaagatgctcaggaagatgatgcccttagccatccagaaggactagtcttggttcaaagcagtggtgagaacagtgttattgttggccctcacataagaggcagccgcttgcgtgcatcggctgctggatttggcgaagtagacctactgctgcctggaacagccaggcttcagatccagctaggagttaacatgcctgcaagggcagagcagacccctaaggaagatgaaagcaaaccgttccgtgaggtgtacgatgtggtcctctacctgggcatcattgacatactgcaagagtacaacatgacaaagaaaatcgagcacgctgtcaagtccatgcagtatgactcggtctcgatctcggctgtggacccccagttctactcggagcgtttcttgaacttcatccagaccgtcttccctgagaattcgtagctccatccaccaatacttttcttggaagatgcccgcccactaccacttgctgagaacttcatccagacgacagtccatgtcttcgaatttggagcttgcgagcatcataagaacattgcactctcttcagtgcgtgcctgttccttcctggatgaactggcaggaagagtggccaacaaaatgagattcgttagtgaaattgtgcagaagcaaatcgatcttctctaggctattttgccccgatccctggggtcaccggatcagccgtctggcttcctggagtaggcttggcgtattgggactcgagcaggaagtagatgtgagttgcgaggattctagtgacagcggcgccatagagctctgggattcactgttatgtctcggcagttgcagaaagctgaagcgcctgttgcctctggctcgtgtttcatctgttaaggtgctatggaggatatgtttaataagtccctgaaaacacgcatcaagctccgatacatttttttgtaggacaaacaaaagagtactatgtattttatcgcaaaaacgaaaagaaatggaagcaacagatgaaaatcgcgcgtggtgacggaggaattacgagtgcg

SEQ ID NO: 52982 - DNA, 3445 bp, Zea Mays
ctacgtctactacctgctctgctctctctcccccacaggccccgcagcatccacacgaggacttcagaatcagcagcagccagcaggcagcagctcagcgagacagacgcgtccggggctcccctccgcgcgcccgccgatcaaggatcaacaacacacggggacgcctcccgtctccttcattcccagcctgcactgcgccgccccagacgcccgcgaccctctccacctcctccggcgaataccgttcctccccggcaagctaccctccgatcctttgttccgggtctgcgaggtagtaccgtcgacgaggcctccctcccctccggcgagccccccttccgaagtcgtgagtcctcccagggtttatgcatgacagcccctgtgtctcttccaaatgagctagaagcggtctcccattctgcaagggttgagttattccgagacgctagttgcaacatagaaaatgaggtgttggccagtttgggaaatggccaagattcaactgctgttggagcaactcctggtttcagagttggagagatcaggtttgctaatggagatatttattctggcacattgttggggaacacaccagagggttcaggccagtatcgctggtcagatggttgcacctatgatggtgagtggaataaagggatgaggcatgggcaaggaaagacggaatggccatctggagccacctatgagggtgagtattctggtggctatgtatatggtgaaggtacctataagggtccagataaaatcatttacaagggacgatggaagttgaatcacaagcatggacttggacatcagacatatccaaatggagacatgtttgaaggttcgtggattcagggagaaatagtaggtcatgggaagtacacgtgggcaaacggggacacttacgttggcaacatgaaaagtggcaagatgtcagggaaaggaactcttacatggaaaaatggggactcgtatgagggtaactggatagatggcatgatgcatgggtatggaatctatacatggaatgaatgtgggtattatattggaacatggacaaggggactgaaggatgggaaaggtaaattctttccgaaaggttgtagagtacctgttaacgacgagatgtatatcaataatctaagaaatcgtggtgtactgcctgatattagaaggcagaatcatggttcacgcatacttcactcttcctcggttgacatggggaacatgaaggttggtatggctaggcaatcttcagatgttttgttcaaaaggaattcagctgagcaatcttctttgaagaatgtgtctttggaaagacggtggagtcttgaggtggctattgaaaaatttattggccatgaatccagcgaaagttctggtctagaaagcttggaaaacttgagtgattctcgtttgcccatactggaaagagaatacatgcaaggtgttctaatcagtgaggtggttcttgacaggagtttttcagactcctcaaagaagacaaaacgccgccagaagaaaacggtgagggacacaaaaaagcctggagagacaataattaagggacacagaagctatgatttaatgctcagcctgcagcttggaatcaggtacacagttggaaagatcacaccaattcaaaaacgtgaagttcgtgcttcagattttggaccaagagcaagtttctggatgaacttcccaaaagaaggatctcggcttactccttcacattcagcggaagattttaaatggaaagactactgtcccatggttttcaggaatttgagagagatgttcaagattgatgctgcagactatatgatctccatatgtggaaattctgctcttaggcaactatcttcccctggaaagagtggaagtgtctttttcctgtcacaagatgatagattcatgattaagactctccgaaaatctgaagtgcaggttcttttacgaatgcttccaaactattatgatcatgtccgtacctatgagaacaccctcataactaagttttttggcctccacagggtgaaaccttctagtggtcaaaagtttcggtttgttgtaatgggaaacatgttttgcactgaattgagaatccaccggaggtttgatttgaaaggatcatctttaggccgttctactgataaaattgaaattgacgagaacacaactctgaaggatttggatcttaactattccttttatcttgaaccttcctggcgtgaggctcttcttaaattgaaacagacagtgattttttgagaacacagcggataatggattacagcctactgcttggtgtccattatagagctccacagcacttgcggacacgtgcatcttatcaccggagcatggcagcagatagattgactgttgtttcagaagaagatgctcaggaagatgatgcccttagccatccagaaggactagtcttggttcaaagcagtggtgagaacagtgttattgttggccctcacataagaggcagccgcttgcgtgcatcggctgctggatttggcgaagtagacctactgctgcctggaacagccaggcttcagatccagctaggagttaacatgcctgcaagggcagagcagacccctaaggaagatgaaagcaaaccgttccgtgaggtgtacgatgtggtcctctacctgggcatcattgacatactgcaagagtacaacatgacaaagaaaatcgagcacgctgtcaagtccatgcagtatgactcggtctcgatctcggctgtggacccccagttctactcggagcgtttcttgaacttcatccagaccgtcttccctgagaattcgtagctccatccaccaatacttttcttggaagatgcccgcccactaccacttgctgagaacttcatccagacgacagtccatgtcttcgaatttggagcttgcgagcatcataagaacattgcactctcttcagtgcgtgcctgttccttcctggatgaactggcaggaagagtggccaacaaaatgagattcgttagtgaaattgtgcagaagcaaatcgatcttctctaggctattttgccccgatccctggggtcaccggatcagccgtctggcttcctggagtaggcttggcgtattgggactcgagcaggaagtagatgtgagttgcgaggattctagtgacagcggcgccatagagctctgggattcactgttatgtctcggcagttgcagaaagctgaagcgcctgttgcctctggctcgtgtttcatctgttaaggtgctatggaggatatgtttaataagtccctgaaaacacgcatcaagctccgatacatttttttgtaggacaaacaaaagagtactatgtattttatcgcaaaaacgaaaagaaatggaagcaacagatgaaaatcgcgcgtggtgacggaggaattacgagtgcg

SEQ ID NO: 52983 - DNA, 3586 bp, Zea Mays
ctacgtctactacctgctctgctctctctcccccacaggccccgcagcatccacacgaggacttcagaatcagcagcagccagcaggcagcagctcagcgagacagacgcgtccggggctcccctccgcgcgcccgccgatcaaggatcaacaacacacggggacgcctcccgtctccttcattcccagcctgcactgcgccgccccagacgcccgcgaccctctccacctcctccggcgaataccgttcctccccggcaagctaccctccgatcctttgttccgggtgagtctacgcgcagcgcttcctcccgcggccggatccccatcggcgcgacgcgattcgtggatccggcggccggggtcttcgccgtccacagcagtctgcgaggtagtaccgtcgacgaggcctccctcccctccggcgagccccccttccgaagtcgtgaggcagtgcttttgatattagtttttgcatttttgtggatcagtcctcccagggtttatgcatgacagcccctgtgtctcttccaaatgagctagaagcggtctcccattctgcaagggttgagttattccgagacgctagttgcaacatagaaaatgaggtgttggccagtttgggaaatggccaagattcaactgctgttggagcaactcctggtttcagagttggagagatcaggtttgctaatggagatatttattctggcacattgttggggaacacaccagagggttcaggccagtatcgctggtcagatggttgcacctatgatggtgagtggaataaagggatgaggcatgggcaaggaaagacggaatggccatctggagccacctatgagggtgagtattctggtggctatgtatatggtgaaggtacctataagggtccagataaaatcatttacaagggacgatggaagttgaatcacaagcatggacttggacatcagacatatccaaatggagacatgtttgaaggttcgtggattcagggagaaatagtaggtcatgggaagtacacgtgggcaaacggggacacttacgttggcaacatgaaaagtggcaagatgtcagggaaaggaactcttacatggaaaaatggggactcgtatgagggtaactggatagatggcatgatgcatgggtatggaatctatacatggaatgaatgtgggtattatattggaacatggacaaggggactgaaggatgggaaaggtaaattctttccgaaaggttgtagagtacctgttaacgacgagatgtatatcaataatctaagaaatcgtggtgtactgcctgatattagaaggcagaatcatggttcacgcatacttcactcttcctcggttgacatggggaacatgaaggttggtatggctaggcaatcttcagatgttttgttcaaaaggaattcagctgagcaatcttctttgaagaatgtgtctttggaaagacggtggagtcttgaggtggctattgaaaaatttattggccatgaatccagcgaaagttctggtctagaaagcttggaaaacttgagtgattctcgtttgcccatactggaaagagaatacatgcaaggtgttctaatcagtgaggtggttcttgacaggagtttttcagactcctcaaagaagacaaaacgccgccagaagaaaacggtgagggacacaaaaaagcctggagagacaataattaagggacacagaagctatgatttaatgctcagcctgcagcttggaatcaggtacacagttggaaagatcacaccaattcaaaaacgtgaagttcgtgcttcagattttggaccaagagcaagtttctggatgaacttcccaaaagaaggatctcggcttactccttcacattcagcggaagattttaaatggaaagactactgtcccatggttttcaggaatttgagagagatgttcaagattgatgctgcagactatatgatctccatatgtggaaattctgctcttaggcaactatcttcccctggaaagagtggaagtgtctttttcctgtcacaagatgatagattcatgattaagactctccgaaaatctgaagtgcaggttcttttacgaatgcttccaaactattatgatcatgtccgtacctatgagaacaccctcataactaagttttttggcctccacagggtgaaaccttctagtggtcaaaagtttcggtttgttgtaatgggaaacatgttttgcactgaattgagaatccaccggaggtttgatttgaaaggatcatctttaggccgttctactgataaaattgaaattgacgagaacacaactctgaaggatttggatcttaactattccttttatcttgaaccttcctggcgtgaggctcttcttaaacagattgaaacagacagtgattttttgagaacacagcggataatggattacagcctactgcttggtgtccattatagagctccacagcacttgcggacacgtgcatcttatcaccggagcatggcagcagatagattgactgttgtttcagaagaagatgctcaggaagatgatgcccttagccatccagaaggactagtcttggttcaaagcagtggtgagaacagtgttattgttggccctcacataagaggcagccgcttgcgtgcatcggctgctggatttggcgaagtagacctactgctgcctggaacagccaggcttcagatccagctaggagttaacatgcctgcaagggcagagcagacccctaaggaagatgaaagcaaaccgttccgtgaggtgtacgatgtggtcctctacctgggcatcattgacatactgcaagagtacaacatgacaaagaaaatcgagcacgctgtcaagtccatgcagtatgactcggtctcgatctcggctgtggacccccagttctactcggagcgtttcttgaacttcatccagaccgtcttccctgagaattcgtagctccatccaccaatacttttcttggaagatgcccgcccactaccacttgctgagaacttcatccagacgacagtccatgtcttcgaatttggagcttgcgagcatcataagaacattgcactctcttcagtgcgtgcctgttccttcctggatgaactggcaggaagagtggccaacaaaatgagattcgttagtgaaattgtgcagaagcaaatcgatcttctctaggctattttgccccgatccctggggtcaccggatcagccgtctggcttcctggagtaggcttggcgtattgggactcgagcaggaagtagatgtgagttgcgaggattctagtgacagcggcgccatagagctctgggattcactgttatgtctcggcagttgcagaaagctgaagcgcctgttgcctctggctcgtgtttcatctgttaaggtgctatggaggatatgtttaataagtccctgaaaacacgcatcaagctccgatacatttttttgtaggacaaacaaaagagtactatgtattttatcgcaaaaacgaaaagaaatggaagcaacagatgaaaatcgcgcgtggtgacggaggaattacgagtgcg

SEQ ID NO: 52984 - DNA, 3674 bp, Zea Mays
ctacgtctactacctgctctgctctctctcccccacaggccccgcagcatccacacgaggacttcagaatcagcagcagccagcaggcagcagctcagcgagacagacgcgtccggggctcccctccgcgcgcccgccgatcaaggatcaacaacacacggggacgcctcccgtctccttcattcccagcctgcactgcgccgccccagacgcccgcgaccctctccacctcctccggcgaataccgttcctccccggcaagctaccctccgatcctttgttccgggtgagtctacgcgcagcgcttcctcccgcggccggatccccatcggcgcgacgcgattcgtggatccggcggccggggtcttcgccgtccacagcagtacagcatcgcttctcagtcctcctcctccccttgcctctagtctggcagcgcacccctgcctccactagtccactgtcctttttttacatggagactagagttgaccctccgcacggatcctctccgtcctcaccctcttctccctctccctccctctccatatctctgcaggtctgcgaggtagtaccgtcgacgaggcctccctcccctccggcgagccccccttccgaagtcgtgaggcagtgcttttgatattagtttttgcatttttgtggatcagtcctcccagggtttatgcatgacagcccctgtgtctcttccaaatgagctagaagcggtctcccattctgcaagggttgagttattccgagacgctagttgcaacatagaaaatgaggtgttggccagtttgggaaatggccaagattcaactgctgttggagcaactcctggtttcagagttggagagatcaggtttgctaatggagatatttattctggcacattgttggggaacacaccagagggttcaggccagtatcgctggtcagatggttgcacctatgatggtgagtggaataaagggatgaggcatgggcaaggaaagacggaatggccatctggagccacctatgagggtgagtattctggtggctatgtatatggtgaaggtacctataagggtccagataaaatcatttacaagggacgatggaagttgaatcacaagcatggacttggacatcagacatatccaaatggagacatgtttgaaggttcgtggattcagggagaaatagtaggtcatgggaagtacacgtgggcaaacggggacacttacgttggcaacatgaaaagtggcaagatgtcagggaaaggaactcttacatggaaaaatggggactcgtatgagggtaactggatagatggcatgatgcatgggtatggaatctatacatggaatgaatgtgggtattatattggaacatggacaaggggactgaaggatgggaaaggtaaattctttccgaaaggttgtagagtacctgttaacgacgagatgtatatcaataatctaagaaatcgtggtgtactgcctgatattagaaggcagaatcatggttcacgcatacttcactcttcctcggttgacatggggaacatgaaggttggtatggctaggcaatcttcagatgttttgttcaaaaggaattcagctgagcaatcttctttgaagaatgtgtctttggaaagacggtggagtcttgaggtggctattgaaaaatttattggccatgaatccagcgaaagttctggtctagaaagcttggaaaacttgagtgattctcgtttgcccatactggaaagagaatacatgcaaggtgttctaatcagtgaggtggttcttgacaggagtttttcagactcctcaaagaagacaaaacgccgccagaagaaaacggtgagggacacaaaaaagcctggagagacaataattaagggacacagaagctatgatttaatgctcagcctgcagcttggaatcaggtacacagttggaaagatcacaccaattcaaaaacgtgaagttcgtgcttcagattttggaccaagagcaagtttctggatgaacttcccaaaagaaggatctcggcttactccttcacattcagcggaagattttaaatggaaagactactgtcccatggttttcaggaatttgagagagatgttcaagattgatgctgcagactatatgatctccatatgtggaaattctgctcttaggcaactatcttcccctggaaagagtggaagtgtctttttcctgtcacaagatgatagattcatgattaagactctccgaaaatctgaagtgcagggtgaaaccttctagtggtcaaaagtttcggtttgttgtaatgggaaacatgttttgcactgaattgagaatccaccggaggtttgatttgaaaggatcatctttaggccgttctactgataaaattgaaattgacgagaacacaactctgaaggatttggatcttaactattccttttatcttgaaccttcctggcgtgaggctcttcttaaacagattgaaacagacagtgattttttgagaacacagcggataatggattacagcctactgcttggtgtccattatagagctccacagcacttgcggacacgtgcatcttatcaccggagcatggcagcagatagattgactgttgtttcagaagaagatgctcaggaagatgatgcccttagccatccagaaggactagtcttggttcaaagcagtggtgagaacagtgttattgttggccctcacataagaggcagccgcttgcgtgcatcggctgctggatttggcgaagtagacctactgctgcctggaacagccaggcttcagatccagctaggagttaacatgcctgcaagggcagagcagacccctaaggaagatgaaagcaaaccgttccgtgaggtgtacgatgtggtcctctacctgggcatcattgacatactgcaagagtacaacatgacaaagaaaatcgagcacgctgtcaagtccatgcagtatgactcggtctcgatctcggctgtggacccccagttctactcggagcgtttcttgaacttcatccagaccgtcttccctgagaattcgtagctccatccaccaatacttttcttggaagatgcccgcccactaccacttgctgagaacttcatccagacgacagtccatgtcttcgaatttggagcttgcgagcatcataagaacattgcactctcttcagtgcgtgcctgttccttcctggatgaactggcaggaagagtggccaacaaaatgagattcgttagtgaaattgtgcagaagcaaatcgatcttctctaggctattttgccccgatccctggggtcaccggatcagccgtctggcttcctggagtaggcttggcgtattgggactcgagcaggaagtagatgtgagttgcgaggattctagtgacagcggcgccatagagctctgggattcactgttatgtctcggcagttgcagaaagctgaagcgcctgttgcctctggctcgtgtttcatctgttaaggtgctatggaggatatgtttaataagtccctgaaaacacgcatcaagctccgatacatttttttgtaggacaaacaaaagagtactatgtattttatcgcaaaaacgaaaagaaatggaagcaacagatgaaaatcgcgcgtggtgacggaggaattacgagtgcg

SEQ ID NO: 52985 - DNA, 3594 bp, Zea Mays
cgagtccaagcggccaaatccaatcgctaaccaccgccggcgtcctcgtctacgtctactacctgctctgctctctctcccccacaggccccgcagcatccacacgaggacttcagaatcagcagcagccagcaggcagcagctcagcgagacagacgcgtccggggctcccctccgcgcgcccgccgatcaaggatcaacaacacacggggacgcctcccgtctccttcattcccagcctgcactgcgccgccccagacgcccgcgaccctctccacctcctccggcgaataccgttcctccccggcaagctaccctccgatcctttgttccgggtgagtctacgcgcagcgcttcctcccgcggccggatccccatcggcgcgacgcgattcgtggatccggcggccggggtcttcgccgtccacagcagtctgcgaggtagtaccgtcgacgaggcctccctcccctccggcgagccccccttccgaagtcgtgagtcctcccagggtttatgcatgacagcccctgtgtctcttccaaatgagctagaagcggtctcccattctgcaagggttgagttattccgagacgctagttgcaacatagaaaatgaggtgttggccagtttgggaaatggccaagattcaactgctgttggagcaactcctggtttcagagttggagagatcaggtttgctaatggagatatttattctggcacattgttggggaacacaccagagggttcaggccagtatcgctggtcagatggttgcacctatgatggtgagtggaataaagggatgaggcatgggcaaggaaagacggaatggccatctggagccacctatgagggtgagtattctggtggctatgtatatggtgaaggtacctataagggtccagataaaatcatttacaagggacgatggaagttgaatcacaagcatggacttggacatcagacatatccaaatggagacatgtttgaaggttcgtggattcagggagaaatagtaggtcatgggaagtacacgtgggcaaacggggacacttacgttggcaacatgaaaagtggcaagatgtcagggaaaggaactcttacatggaaaaatggggactcgtatgagggtaactggatagatggcatgatgcatgggtatggaatctatacatggaatgaatgtgggtattatattggaacatggacaaggggactgaaggatgggaaaggtaaattctttccgaaaggttgtagagtacctgttaacgacgagatgtatatcaataatctaagaaatcgtggtgtactgcctgatattagaaggcagaatcatggttcacgcatacttcactcttcctcggttgacatggggaacatgaaggttggtatggctaggcaatcttcagatgttttgttcaaaaggaattcagctgagcaatcttctttgaagaatgtgtctttggaaagacggtggagtcttgaggtggctattgaaaaatttattggccatgaatccagcgaaagttctggtctagaaagcttggaaaacttgagtgattctcgtttgcccatactggaaagagaatacatgcaaggtgttctaatcagtgaggtggttcttgacaggagtttttcagactcctcaaagaagacaaaacgccgccagaagaaaacggtgagggacacaaaaaagcctggagagacaataattaagggacacagaagctatgatttaatgctcagcctgcagcttggaatcaggtacacagttggaaagatcacaccaattcaaaaacgtgaagttcgtgcttcagattttggaccaagagcaagtttctggatgaacttcccaaaagaaggatctcggcttactccttcacattcagcggaagattttaaatggaaagactactgtcccatggttttcaggaatttgagagagatgttcaagattgatgctgcagactatatgatctccatatgtggaaattctgctcttaggcaactatcttcccctggaaagagtggaagtgtctttttcctgtcacaagatgatagattcatgattaagactctccgaaaatctgaagtgcaggttcttttacgaatgcttccaaactattatgatcatgtccgtacctatgagaacaccctcataactaagttttttggcctccacagggtgaaaccttctagtggtcaaaagtttcggtttgttgtaatgggaaacatgttttgcactgaattgagaatccaccggaggtttgatttgaaaggatcatctttaggccgttctactgataaaattgaaattgacgagaacacaactctgaaggatttggatcttaactattccttttatcttgaaccttcctggcgtgaggctcttcttaaacagattgaaacagacagtgattttttgagaacacagcggataatggattacagcctactgcttggtgtccattatagagctccacagcacttgcggacacgtgcatcttatcaccggagcatggcagcagatagattgactgttgtttcagaagaagatgctcaggaagatgatgcccttagccatccagaaggactagtcttggttcaaagcagtggtgagaacagtgttattgttggccctcacataagaggcagccgcttgcgtgcatcggctgctggatttggcgaagtagacctactgctgcctggaacagccaggcttcagatccagctaggagttaacatgcctgcaagggcagagcagacccctaaggaagatgaaagcaaaccgttccgtgaggtgtacgatgtggtcctctacctgggcatcattgacatactgcaagagtacaacatgacaaagaaaatcgagcacgctgtcaagtccatgcagtatgactcggtctcgatctcggctgtggacccccagttctactcggagcgtttcttgaacttcatccagaccgtcttccctgagaattcgtagctccatccaccaatacttttcttggaagatgcccgcccactaccacttgctgagaacttcatccagacgacagtccatgtcttcgaatttggagcttgcgagcatcataagaacattgcactctcttcagtgcgtgcctgttccttcctggatgaactggcaggaagagtggccaacaaaatgagattcgttagtgaaattgtgcagaagcaaatcgatcttctctaggctattttgccccgatccctggggtcaccggatcagccgtctggcttcctggagtaggcttggcgtattgggactcgagcaggaagtagatgtgagttgcgaggattctagtgacagcggcgccatagagctctgggattcactgttatgtctcggcagttgcagaaagctgaagcgcctgttgcctctggctcgtgtttcatctgttaaggtgctatggaggatatgtttaataagtccctgaaaacacgcatcaagctccgatacatttttttgtaggacaaacaaaagagtactatgtattttatcgcaaaaacgaaaagaaatggaagcaacagatgaaaatcgcgcgtggtgacggaggaattacgagtgcg

SEQ ID NO: 52986 - DNA, 3543 bp, Zea Mays
tagcttttcgccccttttttttcccccacgaccaggatcggtgagcgagtccaagcggccaaatccaatcgctaaccaccgccggcgtcctcgtctacgtctactacctgctctgctctctctcccccacaggccccgcagcatccacacgaggacttcagaatcagcagcagccagcaggcagcagctcagcgagacagacgcgtccggggctcccctccgcgcgcccgccgatcaaggatcaacaacacacggggacgcctcccgtctccttcattcccagcctgcactgcgccgccccagacgcccgcgaccctctccacctcctccggcgaataccgttcctccccggcaagctaccctccgatcctttgttccgggtctgcgaggtagtaccgtcgacgaggcctccctcccctccggcgagccccccttccgaagtcgtgagtcctcccagggtttatgcatgacagcccctgtgtctcttccaaatgagctagaagcggtctcccattctgcaagggttgagttattccgagacgctagttgcaacatagaaaatgaggtgttggccagtttgggaaatggccaagattcaactgctgttggagcaactcctggtttcagagttggagagatcaggtttgctaatggagatatttattctggcacattgttggggaacacaccagagggttcaggccagtatcgctggtcagatggttgcacctatgatggtgagtggaataaagggatgaggcatgggcaaggaaagacggaatggccatctggagccacctatgagggtgagtattctggtggctatgtatatggtgaaggtacctataagggtccagataaaatcatttacaagggacgatggaagttgaatcacaagcatggacttggacatcagacatatccaaatggagacatgtttgaaggttcgtggattcagggagaaatagtaggtcatgggaagtacacgtgggcaaacggggacacttacgttggcaacatgaaaagtggcaagatgtcagggaaaggaactcttacatggaaaaatggggactcgtatgagggtaactggatagatggcatgatgcatgggtatggaatctatacatggaatgaatgtgggtattatattggaacatggacaaggggactgaaggatgggaaaggtaaattctttccgaaaggttgtagagtacctgttaacgacgagatgtatatcaataatctaagaaatcgtggtgtactgcctgatattagaaggcagaatcatggttcacgcatacttcactcttcctcggttgacatggggaacatgaaggttggtatggctaggcaatcttcagatgttttgttcaaaaggaattcagctgagcaatcttctttgaagaatgtgtctttggaaagacggtggagtcttgaggtggctattgaaaaatttattggccatgaatccagcgaaagttctggtctagaaagcttggaaaacttgagtgattctcgtttgcccatactggaaagagaatacatgcaaggtgttctaatcagtgaggtggttcttgacaggagtttttcagactcctcaaagaagacaaaacgccgccagaagaaaacggtgagggacacaaaaaagcctggagagacaataattaagggacacagaagctatgatttaatgctcagcctgcagcttggaatcaggtacacagttggaaagatcacaccaattcaaaaacgtgaagttcgtgcttcagattttggaccaagagcaagtttctggatgaacttcccaaaagaaggatctcggcttactccttcacattcagcggaagattttaaatggaaagactactgtcccatggttttcaggaatttgagagagatgttcaagattgatgctgcagactatatgatctccatatgtggaaattctgctcttaggcaactatcttcccctggaaagagtggaagtgtctttttcctgtcacaagatgatagattcatgattaagactctccgaaaatctgaagtgcaggttcttttacgaatgcttccaaactattatgatcatgtccgtacctatgagaacaccctcataactaagttttttggcctccacagggtgaaaccttctagtggtcaaaagtttcggtttgttgtaatgggaaacatgttttgcactgaattgagaatccaccggaggtttgatttgaaaggatcatctttaggccgttctactgataaaattgaaattgacgagaacacaactctgaaggatttggatcttaactattccttttatcttgaaccttcctggcgtgaggctcttcttaaacagattgaaacagacagtgattttttgagaacacagcggataatggattacagcctactgcttggtgtccattatagagctccacagcacttgcggacacgtgcatcttatcaccggagcatggcagcagatagattgactgttgtttcagaagaagatgctcaggaagatgatgcccttagccatccagaaggactagtcttggttcaaagcagtggtgagaacagtgttattgttggccctcacataagaggcagccgcttgcgtgcatcggctgctggatttggcgaagtagacctactgctgcctggaacagccaggcttcagatccagctaggagttaacatgcctgcaagggcagagcagacccctaaggaagatgaaagcaaaccgttccgtgaggtgtacgatgtggtcctctacctgggcatcattgacatactgcaagagtacaacatgacaaagaaaatcgagcacgctgtcaagtccatgcagtatgactcggtctcgatctcggctgtggacccccagttctactcggagcgtttcttgaacttcatccagaccgtcttccctgagaattcgtagctccatccaccaatacttttcttggaagatgcccgcccactaccacttgctgagaacttcatccagacgacagtccatgtcttcgaatttggagcttgcgagcatcataagaacattgcactctcttcagtgcgtgcctgttccttcctggatgaactggcaggaagagtggccaacaaaatgagattcgttagtgaaattgtgcagaagcaaatcgatcttctctaggctattttgccccgatccctggggtcaccggatcagccgtctggcttcctggagtaggcttggcgtattgggactcgagcaggaagtagatgtgagttgcgaggattctagtgacagcggcgccatagagctctgggattcactgttatgtctcggcagttgcagaaagctgaagcgcctgttgcctctggctcgtgtttcatctgttaaggtgctatggaggatatgtttaataagtccctgaaaacacgcatcaagctccgatacatttttttgtaggacaaacaaaagagtactatgtattttatcgcaaaaacgaaaagaaatggaagcaacagatgaaaatcgcgcgtggtgacggaggaattacgagtgcg

SEQ ID NO: 52987 - DNA, 3457 bp, Zea Mays
tagcttttcgccccttttttttcccccacgaccaggatcggtgagcgagtccaagcggccaaatccaatcgctaaccaccgccggcgtcctcgtctacgtctactacctgctctgctctctctcccccacaggccccgcagcatccacacgaggacttcagaatcagcagcagccagcaggcagcagctcagcgagacagacgcgtccggggctcccctccgcgcgcccgccgatcaaggatcaacaacacacggggacgcctcccgtctccttcattcccagcctgcactgcgccgccccagacgcccgcgaccctctccacctcctccggcgaataccgttcctccccggcaagctaccctccgatcctttgttccgggtctgcgaggtagtaccgtcgacgaggcctccctcccctccggcgagccccccttccgaagtcgtgagtcctcccagggtttatgcatgacagcccctgtgtctcttccaaatgagctagaagcggtctcccattctgcaagggttgagttattccgagacgctagttgcaacatagaaaatgaggtgttggccagtttgggaaatggccaagattcaactgctgttggagcaactcctggtttcagagttggagagatcaggtttgctaatggagatatttattctggcacattgttggggaacacaccagagggttcaggccagtatcgctggtcagatggttgcacctatgatggtgagtggaataaagggatgaggcatgggcaaggaaagacggaatggccatctggagccacctatgagggtgagtattctggtggctatgtatatggtgaaggtacctataagggtccagataaaatcatttacaagggacgatggaagttgaatcacaagcatggacttggacatcagacatatccaaatggagacatgtttgaaggttcgtggattcagggagaaatagtaggtcatgggaagtacacgtgggcaaacggggacacttacgttggcaacatgaaaagtggcaagatgtcagggaaaggaactcttacatggaaaaatggggactcgtatgagggtaactggatagatggcatgatgcatgggtatggaatctatacatggaatgaatgtgggtattatattggaacatggacaaggggactgaaggatgggaaaggtaaattctttccgaaaggttgtagagtacctgttaacgacgagatgtatatcaataatctaagaaatcgtggtgtactgcctgatattagaaggcagaatcatggttcacgcatacttcactcttcctcggttgacatggggaacatgaaggttggtatggctaggcaatcttcagatgttttgttcaaaaggaattcagctgagcaatcttctttgaagaatgtgtctttggaaagacggtggagtcttgaggtggctattgaaaaatttattggccatgaatccagcgaaagttctggtctagaaagcttggaaaacttgagtgattctcgtttgcccatactggaaagagaatacatgcaaggtgttctaatcagtgaggtggttcttgacaggagtttttcagactcctcaaagaagacaaaacgccgccagaagaaaacggtgagggacacaaaaaagcctggagagacaataattaagggacacagaagctatgatttaatgctcagcctgcagcttggaatcaggtacacagttggaaagatcacaccaattcaaaaacgtgaagttcgtgcttcagattttggaccaagagcaagtttctggatgaacttcccaaaagaaggatctcggcttactccttcacattcagcggaagattttaaatggaaagactactgtcccatggttttcaggaatttgagagagatgttcaagattgatgctgcagactatatgatctccatatgtggaaattctgctcttaggcaactatcttcccctggaaagagtggaagtgtctttttcctgtcacaagatgatagattcatgattaagactctccgaaaatctgaagtgcagggtgaaaccttctagtggtcaaaagtttcggtttgttgtaatgggaaacatgttttgcactgaattgagaatccaccggaggtttgatttgaaaggatcatctttaggccgttctactgataaaattgaaattgacgagaacacaactctgaaggatttggatcttaactattccttttatcttgaaccttcctggcgtgaggctcttcttaaacagattgaaacagacagtgattttttgagaacacagcggataatggattacagcctactgcttggtgtccattatagagctccacagcacttgcggacacgtgcatcttatcaccggagcatggcagcagatagattgactgttgtttcagaagaagatgctcaggaagatgatgcccttagccatccagaaggactagtcttggttcaaagcagtggtgagaacagtgttattgttggccctcacataagaggcagccgcttgcgtgcatcggctgctggatttggcgaagtagacctactgctgcctggaacagccaggcttcagatccagctaggagttaacatgcctgcaagggcagagcagacccctaaggaagatgaaagcaaaccgttccgtgaggtgtacgatgtggtcctctacctgggcatcattgacatactgcaagagtacaacatgacaaagaaaatcgagcacgctgtcaagtccatgcagtatgactcggtctcgatctcggctgtggacccccagttctactcggagcgtttcttgaacttcatccagaccgtcttccctgagaattcgtagctccatccaccaatacttttcttggaagatgcccgcccactaccacttgctgagaacttcatccagacgacagtccatgtcttcgaatttggagcttgcgagcatcataagaacattgcactctcttcagtgcgtgcctgttccttcctggatgaactggcaggaagagtggccaacaaaatgagattcgttagtgaaattgtgcagaagcaaatcgatcttctctaggctattttgccccgatccctggggtcaccggatcagccgtctggcttcctggagtaggcttggcgtattgggactcgagcaggaagtagatgtgagttgcgaggattctagtgacagcggcgccatagagctctgggattcactgttatgtctcggcagttgcagaaagctgaagcgcctgttgcctctggctcgtgtttcatctgttaaggtgctatggaggatatgtttaataagtccctgaaaacacgcatcaagctccgatacatttttttgtaggacaaacaaaagagtactatgtattttatcgcaaaaacgaaaagaaatggaagcaacagatgaaaatcgcgcgtggtgacggaggaattacgagtgcg

SEQ ID NO: 52988 - DNA, 3585 bp, Zea Mays
ctagcttttcgccccttttttttcccccacgaccaggatcggtgagcgagtccaagcggccaaatccaatcgctaaccaccgccggcgtcctcgtctacgtctactacctgctctgctctctctcccccacaggccccgcagcatccacacgaggacttcagaatcagcagcagccagcaggcagcagctcagcgagacagacgcgtccggggctcccctccgcgcgcccgccgatcaaggatcaacaacacacggggacgcctcccgtctccttcattcccagcctgcactgcgccgccccagacgcccgcgaccctctccacctcctccggcgaataccgttcctccccggcaagctaccctccgatcctttgttccgggtctgcgaggtagtaccgtcgacgaggcctccctcccctccggcgagccccccttccgaagtcgtgaggcagtgcttttgatattagtttttgcatttttgtggatcagtcctcccagggtttatgcatgacagcccctgtgtctcttccaaatgagctagaagcggtctcccattctgcaagggttgagttattccgagacgctagttgcaacatagaaaatgaggtgttggccagtttgggaaatggccaagattcaactgctgttggagcaactcctggtttcagagttggagagatcaggtttgctaatggagatatttattctggcacattgttggggaacacaccagagggttcaggccagtatcgctggtcagatggttgcacctatgatggtgagtggaataaagggatgaggcatgggcaaggaaagacggaatggccatctggagccacctatgagggtgagtattctggtggctatgtatatggtgaaggtacctataagggtccagataaaatcatttacaagggacgatggaagttgaatcacaagcatggacttggacatcagacatatccaaatggagacatgtttgaaggttcgtggattcagggagaaatagtaggtcatgggaagtacacgtgggcaaacggggacacttacgttggcaacatgaaaagtggcaagatgtcagggaaaggaactcttacatggaaaaatggggactcgtatgagggtaactggatagatggcatgatgcatgggtatggaatctatacatggaatgaatgtgggtattatattggaacatggacaaggggactgaaggatgggaaaggtaaattctttccgaaaggttgtagagtacctgttaacgacgagatgtatatcaataatctaagaaatcgtggtgtactgcctgatattagaaggcagaatcatggttcacgcatacttcactcttcctcggttgacatggggaacatgaaggttggtatggctaggcaatcttcagatgttttgttcaaaaggaattcagctgagcaatcttctttgaagaatgtgtctttggaaagacggtggagtcttgaggtggctattgaaaaatttattggccatgaatccagcgaaagttctggtctagaaagcttggaaaacttgagtgattctcgtttgcccatactggaaagagaatacatgcaaggtgttctaatcagtgaggtggttcttgacaggagtttttcagactcctcaaagaagacaaaacgccgccagaagaaaacggtgagggacacaaaaaagcctggagagacaataattaagggacacagaagctatgatttaatgctcagcctgcagcttggaatcaggtacacagttggaaagatcacaccaattcaaaaacgtgaagttcgtgcttcagattttggaccaagagcaagtttctggatgaacttcccaaaagaaggatctcggcttactccttcacattcagcggaagattttaaatggaaagactactgtcccatggttttcaggaatttgagagagatgttcaagattgatgctgcagactatatgatctccatatgtggaaattctgctcttaggcaactatcttcccctggaaagagtggaagtgtctttttcctgtcacaagatgatagattcatgattaagactctccgaaaatctgaagtgcaggttcttttacgaatgcttccaaactattatgatcatgtccgtacctatgagaacaccctcataactaagttttttggcctccacagggtgaaaccttctagtggtcaaaagtttcggtttgttgtaatgggaaacatgttttgcactgaattgagaatccaccggaggtttgatttgaaaggatcatctttaggccgttctactgataaaattgaaattgacgagaacacaactctgaaggatttggatcttaactattccttttatcttgaaccttcctggcgtgaggctcttcttaaacagattgaaacagacagtgattttttgagaacacagcggataatggattacagcctactgcttggtgtccattatagagctccacagcacttgcggacacgtgcatcttatcaccggagcatggcagcagatagattgactgttgtttcagaagaagatgctcaggaagatgatgcccttagccatccagaaggactagtcttggttcaaagcagtggtgagaacagtgttattgttggccctcacataagaggcagccgcttgcgtgcatcggctgctggatttggcgaagtagacctactgctgcctggaacagccaggcttcagatccagctaggagttaacatgcctgcaagggcagagcagacccctaaggaagatgaaagcaaaccgttccgtgaggtgtacgatgtggtcctctacctgggcatcattgacatactgcaagagtacaacatgacaaagaaaatcgagcacgctgtcaagtccatgcagtatgactcggtctcgatctcggctgtggacccccagttctactcggagcgtttcttgaacttcatccagaccgtcttccctgagaattcgtagctccatccaccaatacttttcttggaagatgcccgcccactaccacttgctgagaacttcatccagacgacagtccatgtcttcgaatttggagcttgcgagcatcataagaacattgcactctcttcagtgcgtgcctgttccttcctggatgaactggcaggaagagtggccaacaaaatgagattcgttagtgaaattgtgcagaagcaaatcgatcttctctaggctattttgccccgatccctggggtcaccggatcagccgtctggcttcctggagtaggcttggcgtattgggactcgagcaggaagtagatgtgagttgcgaggattctagtgacagcggcgccatagagctctgggattcactgttatgtctcggcagttgcagaaagctgaagcgcctgttgcctctggctcgtgtttcatctgttaaggtgctatggaggatatgtttaataagtccctgaaaacacgcatcaagctccgatacatttttttgtaggacaaacaaaagagtactatgtattttatcgcaaaaacgaaaagaaatggaagcaacagatgaaaatcgcgcgtggtgacggaggaattacgagtgcg

SEQ ID NO: 52989 - DNA, 1952 bp, Zea Mays
aattctgcaactgcatgatggtatgatacaattatgctgcaaggaaaatcttcaaatatgttacttttcggaaggaaaaattgttgatactttggagggagtaaacccagccagcctggccaataaggttgcaaaagtagctgggcctgctagtgttgctgagtctgctgtacctgctagccttggagtcgctgctgggcctgctgtacttgaaaacatccaaaagatggcacagcaaaatggatcctctgctgctgaaagcacaaactctggcagtactcaagatgcattgaataagcgattggagcagcttgtcaattcccatcctgtgtttttatttatgaagggaaccccagaacaaccaaggtgtggtttcagccgtaaagtggtcaacattttgaagcaagaaggggtcgaatttgggagctttgacatccttacagataatgatgttcgtgaaggtatgaagaagttctccaactggcccacttttcctcaactgtactgcaaaggcgagctgcttggtggatgtgatattgttattgctatgcatgacagtggtgaattgaaggatgtttttgaggagcacaatattcccctcaaaccacagggtagcaaaaatgaagaagcaggtcagcccgagtctgcaactgagaagggtgctgcagttgctgaaccaatggggcttactgatgctcagaaatctcgtttggaaagccttattaattccagcccagtgatggtattcatcaaaggtacaccagaggaaccaaagtgtgggttcagtgggaagttggtccacatacttaagcaagagaatattcctttctcaagttttgacatcctttcagatgatgaggttagacaggggctgaaggtgctctcaaactggcccagttaccctcaactgtacataaaaggtgagctggttggcggctcagacatagtgatggagatgcacaagagtggtgagctgaagaaggttctgtctgagaaaggggttattccaaaggaaagcctggaggacagattgaagtccctggtttcctctgcaccggtgatgcttttcatgaagggcactcccgatgctcctcgctgcggcttcagttcgaaggttgtgaacgccttgaagaaggaaggggtcagctttgggtccttcgacatcttatctgacgaggaagttaggcaaggtttgaagacgtactccaactggcctaccttcccccagctctactacaaatcggagctgattgggggatgtgatatcgttcttgagatggagaagagcggagagctgaagtcgaccctgtcagagtagacacctagcattcttgcttcgctggcgtttttaccatattgcctgcattggatcactctactctggtattcatgccattgtattcatagatccacgttggtacttgtctgcagtgccacattgctagaattgtgacacatctgcagaaggaataacttacgcttgttcggtactgattgcattgttcttatatcaccagttctatttagcgggtggaagcttttttgttcgggtattgtcacgatttatagacggataaagtaaaatatttatagagtatatgtgtacgtgtaattgtgtatttaagtcatgccattgttcttgggaagtcacatgtggaaaattgactttcacaatgaacaagcttataaatctaattagaagtggttcgtacaacatttattcacaggaacggagataaggctggctcaaggctccagcaagggcagctaatagaactatgtgaagaaatttaattaaaaaaactaaatttaatagttatagcaaataattttataattgtgccaaaatggtacgtgtaggtctatatagtgtagcaacatatcataaaagtttggttaggaaaagaaaaaataaaaaaagtttggttgagaaaagaaaaaaaataaaaata

SEQ ID NO: 52990 - DNA, 2021 bp, Zea Mays
gtgtcgataaggcggaggtagttaggtttctacggccgcttgttgggctgcctgccttgttgtagttgaagctgaagaacaacctgaaatatcagaggcatatggagttacagcggttccatattttgttttctgcaaggaaggaaaaattgttgatactttggagggagtaaacccagccagcctggccaataaggttgcaaaagtagctgggcctgctagtgttgctgagtctgctgtacctgctagccttggagtcgctgctgggcctgctgtacttgaaaacatccaaaagatggcacagcaaaatggatcctctgctgctgaaagcacaaactctggcagtactcaagatgcattgaataagcgattggagcagcttgtcaattcccatcctgtgtttttatttatgaagggaaccccagaacaaccaaggtgtggtttcagccgtaaagtggtcaacattttgaagcaagaaggggtcgaatttgggagctttgacatccttacagataatgatgttcgtgaaggtatgaagaagttctccaactggcccacttttcctcaactgtactgcaaaggcgagctgcttggtggatgtgatattgttattgctatgcatgacagtggtgaattgaaggatgtttttgaggagcacaatattcccctcaaaccacagggtagcaaaaatgaagaagcaggtcagcccgagtctgcaactgagaagggtgctgcagttgctgaaccaatggggcttactgatgctcagaaatctcgtttggaaagccttattaattccagcccagtgatggtattcatcaaaggtacaccagaggaaccaaagtgtgggttcagtgggaagttggtccacatacttaagcaagagaatattcctttctcaagttttgacatcctttcagatgatgaggttagacaggggctgaaggtgctctcaaactggcccagttaccctcaactgtacataaaaggtgagctggttggcggctcagacatagtgatggagatgcacaagagtggtgagctgaagaaggttctgtctgagaaaggggttattccaaaggaaagcctggaggacagattgaagtccctggtttcctctgcaccggtgatgcttttcatgaagggcactcccgatgctcctcgctgcggcttcagttcgaaggttgtgaacgccttgaagaaggaaggggtcagctttgggtccttcgacatcttatctgacgaggaagttaggcaaggtttgaagacgtactccaactggcctaccttcccccagctctactacaaatcggagctgattgggggatgtgatatcgttcttgagatggagaagagcggagagctgaagtcgaccctgtcagagtagacacctagcattcttgcttcgctggcgtttttaccatattgcctgcattggatcactctactctggtattcatgccattgtattcatagatccacgttggtacttgtctgcagtgccacattgctagaattgtgacacatctgcagaaggaataacttacgcttgttcggtactgattgcattgttcttatatcaccagttctatttagcgggtggaagcttttttgttcgggtattgtcacgatttatagacggataaagtaaaatatttatagagtatatgtgtacgtgtaattgtgtatttaagtcatgccattgttcttgggaagtcacatgtggaaaattgactttcacaatgaacaagcttataaatctaattagaagtggttcgtacaacatttattcacaggaacggagataaggctggctcaaggctccagcaagggcagctaatagaactatgtgaagaaatttaattaaaaaaactaaatttaatagttatagcaaataattttataattgtgccaaaatggtacgtgtaggtctatatagtgtagcaacatatcataaaagtttggttaggaaaagaaaaaataaaaaaagtttggttgagaaaagaaaaaaaataaaaata

SEQ ID NO: 52991 - DNA, 2138 bp, Zea Mays
atgttcagtcgccgtcgcggcgccgcgcgggagcccccagaaaagccgaggaggaggcagcgtacaccttctgcctcgctgcgccggcctcccaatcgatcgaggcggcgcagagcagaggaaaaccccgagccgcaaccctcctcaccgcacagcaactcgagtactcgttctcttccgcatcctcctcctcgtcaactccagtcgtcttcagcccttcaccacaatcaggcccacctcccaccaccacatttcttctcatccaaccgccccgtaggatcacagagaagggggatggcgagcggcggggcggtgagggatgtgggctcgcctgcggagctggaggcggcggtggccggggcgcgggcggtggccgtgcacttctgggcgtcctggtgcgaggcgtccaagcagatggacgaggtcttcgcgcacctcgccgtcgacttcccccacgcagccttcctgcgggttgaagctgaagaacaacctgaaatatcagaggcatatggagttacagcggttccatattttgttttctgcaaggaaggaaaaattgttgatactttggagggagtaaacccagccagcctggccaataaggttgcaaaagtagctgggcctgctagtgttgctgagtctgctgtacctgctagccttggagtcgctgctgggcctgctgtacttgaaaacatccaaaagatggcacagcaaaatggatcctctgctgctgaaagcacaaactctggcagtactcaagatgcattgaataagcgattggagcagcttgtcaattcccatcctgtgtttttatttatgaagggaaccccagaacaaccaaggtgtggtttcagccgtaaagtggtcaacattttgaagcaagaaggggtcgaatttgggagctttgacatccttacagataatgatgttcgtgaaggtatgaagaagttctccaactggcccacttttcctcaactgtactgcaaaggcgagctgcttggtggatgtgatattgttattgctatgcatgacagtggtgaattgaaggatgtttttgaggagcacaatattcccctcaaaccacagggtagcaaaaatgaagaagcaggtcagcccgagtctgcaactgagaagggtgctgcagttgctgaaccaatggggcttactgatgctcagaaatctcgtttggaaagccttattaattccagcccagtgatggtattcatcaaaggtacaccagaggaaccaaagtgtgggttcagtgggaagttggtccacatacttaagcaagagaatattcctttctcaagttttgacatcctttcagatgatgaggttagacaggggctgaaggtgctctcaaactggcccagttaccctcaactgtacataaaaggtgagctggttggcggctcagacatagtgatggagatgcacaagagtggtgagctgaagaaggttctgtctgagaaaggggttattccaaaggaaagcctggaggacagattgaagtccctggtttcctctgcaccggtgatgcttttcatgaagggcactcccgatgctcctcgctgcggcttcagttcgaaggttgtgaacgccttgaagaaggaaggggtcagctttgggtccttcgacatcttatctgacgaggaagttaggcaaggtttgaagacgtactccaactggcctaccttcccccagctctactacaaatcggagctgattgggggatgtgatatcgttcttgagatggagaagagcggagagctgaagtcgaccctgtcagagtagacacctagcattcttgcttcgctggcgtttttaccatattgcctgcattggatcactctactctggtattcatgccattgtattcatagatccacgttggtacttgtctgcagtgccacattgctagaattgtgacacatctgcagaaggaataacttacgcttgttcggtactgattgcattgttcttatatcaccagttctatttagcgggtggaagcttttttgttcgggtattgtcacgatttatagacggataaagtaaaatatttatagagtatatgtgtacgtgtaattgtgtatttaagtcatgccattgttcttgggaaaaaaaaaataaaaata

SEQ ID NO: 52992 - DNA, 2349 bp, Zea Mays
cacgtgcccgcttctggaatgttcagtcgccgtcgcggcgccgcgcgggagcccccagaaaagccgaggaggaggcagcgtacaccttctgcctcgctgcgccggcctcccaatcgatcgaggcggcgcagagcagaggaaaaccccgagccgcaaccctcctcaccgcacagcaactcgagtactcgttctcttccgcatcctcctcctcgtcaactccagtcgtcttcagcccttcaccacaatcaggcccacctcccaccaccacatttcttctcatccaaccgccccgtaggatcacagagaagggggatggcgagcggcggggcggtgagggatgtgggctcgcctgcggagctggaggcggcggtggccggggcgcgggcggtggccgtgcacttctgggcgtcctggtgcgaggcgtccaagcagatggacgaggtcttcgcgcacctcgccgtcgacttcccccacgcagccttcctgcgggttgaagctgaagaacaacctgaaatatcagaggcatatggagttacagcggttccatattttgttttctgcaaggaaggaaaaattgttgatactttggagggagtaaacccagccagcctggccaataaggttgcaaaagtagctgggcctgctagtgttgctgagtctgctgtacctgctagccttggagtcgctgctgggcctgctgtacttgaaaacatccaaaagatggcacagcaaaatggatcctctgctgctgaaagcacaaactctggcagtactcaagatgcattgaataagcgattggagcagcttgtcaattcccatcctgtgtttttatttatgaagggaaccccagaacaaccaaggtgtggtttcagccgtaaagtggtcaacattttgaagcaagaaggggtcgaatttgggagctttgacatccttacagataatgatgttcgtgaagtggtgaattgaaggatgtttttgaggagcacaatattcccctcaaaccacagggtagcaaaaatgaagaagcaggtcagcccgagtctgcaactgagaagggtgctgcagttgctgaaccaatggggcttactgatgctcagaaatctcgtttggaaagccttattaattccagcccagtgatggtattcatcaaaggtacaccagaggaaccaaagtgtgggttcagtgggaagttggtccacatacttaagcaagagaatattcctttctcaagttttgacatcctttcagatgatgaggttagacaggggctgaaggtgctctcaaactggcccagttaccctcaactgtacataaaaggtgagctggttggcggctcagacatagtgatggagatgcacaagagtggtgagctgaagaaggttctgtctgagaaaggggttattccaaaggaaagcctggaggacagattgaagtccctggtttcctctgcaccggtgatgcttttcatgaagggcactcccgatgctcctcgctgcggcttcagttcgaaggttgtgaacgccttgaagaaggaaggggtcagctttgggtccttcgacatcttatctgacgaggaagttaggcaaggtttgaagacgtactccaactggcctaccttcccccagctctactacaaatcggagctgattgggggatgtgatatcgttcttgagatggagaagagcggagagctgaagtcgaccctgtcagagtagacacctagcattcttgcttcgctggcgtttttaccatattgcctgcattggatcactctactctggtattcatgccattgtattcatagatccacgttggtacttgtctgcagtgccacattgctagaattgtgacacatctgcagaaggaataacttacgcttgttcggtactgattgcattgttcttatatcaccagttctatttagcgggtggaagcttttttgttcgggtattgtcacgatttatagacggataaagtaaaatatttatagagtatatgtgtacgtgtaattgtgtatttaagtcatgccattgttcttgggaagtcacatgtggaaaattgactttcacaatgaacaagcttataaatctaattagaagtggttcgtacaacatttattcacaggaacggagataaggctggctcaaggctccagcaagggcagctaatagaactatgtgaagaaatttaattaaaaaaactaaatttaatagttatagcaaataattttataattgtgccaaaatggtacgtgtaggtctatatagtgtagcaacatatcataaaagtttggttaggaaaagaaaaaataaaaaaagtttggttgagaaaagaaaaaaaataaaaata

SEQ ID NO: 52993 - DNA, 1116 bp, Zea Mays
ctcgaaaacggcgccgctttgatcggagtcttggaatgaaagtatcttggaggcccttgatgcgattctgagcggggcgcaggtgctggccgtccccctccgcgctggcgggcgcaagaagcagctcgttggcgccgccgacggcgacttctgctggctcacgcaggaggacctcgtgcgctacttcctcaactacatctgcctcgtctacaatgtggcggcgcgctccgtgtcctccctcgggctcgtgcgcgccgacttcctctcggtgcgccccggcgaggcggccctgtccgccgtgcccctcatccgccgcgccgtcgccacggagacggcggttgccgtggtcgccgaagacgggcacctcgtcggcgagatctcccctgcccttctcgcggcctgcgacgagacggcggcggcagccatcgccacgctctcggccgccgacctcatggcctacatcgaccactacgtgtcgccgcctgagcacatcctgcgcgccgtcaaggccggactgaaggacaagggcctggacgccttgcttgcgctggttgaggacgagacgctgtcatcgttctcgtccctctcctccgcgtcctcctcgtccgacgaggaggcaggccgggcgcagctgaggcgtccgtcgtcggggagctacgggcggcgggcggctgacgagccggtggtgtgcagccccgcgagctcactggtggccgtcttggtgcaggccctcgcgcacagggtgagctacgtctgggtcctcgacgaggacaacgactgccgcctcgccggcatcgtcacgttcgcggacgtgctgagggttttccgggagcagctgctgtgaggcctgacgagtgcttactgtttcctggctcccatcttgtggtgtcatggaattgagaagaatatgagctcttgtttctgaaacatttttatttgaagagtatgtgtttgcttgcttggtagccagttcagaattcagatgaacagctttgacattggtgcgttttcattaaatttcttcctattaataaggcagcactgtggcttgatgcggtaggttgtttgtgcttaaaactgtatcttgataaccgaaaaaattaatcattcttgaac

SEQ ID NO: 52994 - DNA, 1850 bp, Zea Mays
gatcgatggattctacggttcctgcctgtcaagtgtttgtcctcgtctcgtcttcggaaaacaacaaacgacaagtccaaggcagagtaggcacgtgggagactgatcaccgtgtctgaatcagggattacattttcggtttggaatttgggaaaaccccgttttatttgacttttgaatttcagattttagaccgaaatataccaaaaactggatcgaaaattgcatatcggactggactgagtacgaaaaaaaaaataccgagggaaagttcaagtgttcaaccttgaatggccatggccttcttttcgttttcgttttttttttgaagaacagacagacttgaaagttgagatatctcactaatccccaaaatgtccctataaaactgatgatctgctgatgagacatcccactcgccggccgtccttgaagagcgagcagcaatggcgcaggagatcgagcacacccacctccccatccgcggcctcaacctccacgtcgcacaagtaggcacaggtgagtcctcatcgttgctttgagccgatggatcccagcggagcaggcagagtatcgatcattcatgggctacggcctgcgggccgcacggctggccggctggtgccgttggttcgtgtgccgcaggtgaactgggcacggtggtgttcctgcacggcttcccggagatatggtactcgtggcgccaccagatgcgggccgtggccgcggcggggtaccgcgccatcgcgccggactgccgcgggtacggcctgtcggagcagccgccggagcacgaggaggtctctcctgacgacctcatcgccgacgtgctgggcatcctcgacgccctcagcgtcccgaaggcgttcttggtgggcaaggacttcggcgccatgccggcgtacgagttcgcgctgcagcacccgggccgcaccctcggcgtggtgtgcctgggcatccccttcaacccggctcccatgtccttcgacgccatcatgcccgaaggattctacatcctgcgctggcgcgtgcgtagccgcccgccactgactgcatacatacagctcttgctattctagtattcttcttcttcttgagctggtgttctccttttgctttctcttcttgttcaggagccgggcagggcggaggccgacttcggccggttcgacgtgaggcgcgtggtgcgcaccatctacgtgctcttcgccggcgccgagatcccgattgccaaggaagggcaggagatcatggacctggccgacctgtccacgcccctcccggagtggttcaccgaggaggacctggacgcctacgccaagctctacgagaagtccggcttcggatctatgcacaagctcccgaaccggctggacgccaagttccaggtgccggtgttcatggtgatgggggagaaggactacgcgttcaagttcccggggttcgagaccgccatgcgcggcggcgtcatggacaacttcatgccggacctcaagatcacctacatccctgaggggagccacttcgtgcaggagcagctcccagagcaggtcaacgacctgctactcggcttcctcagggaccatccctccgccgcataagcagcgggtgagaccgtcagaataatggaatgcttcctgagcaacggtttctctactctattgccgttgcctggatccatgaccgtgttaattaattaattagtacatatacctcctactcaaatcagatgtacggtttttttaatctgcaataaaaatcatcgttgctgcattactcgatccgtacctttgcgtagaggttcttttgatttagataacggagtgaagtctactcagactgaccgcagc

SEQ ID NO: 52995 - DNA, 2137 bp, Zea Mays
cccaccgtcaccgaccgccgcgccacgattttatccattcctcactcgtctctcaaactcaagcgaaagccatcaccccgaccccaatcccacgttcgccacgtgcgcgccacctcccccaccgcgtccgcgtcgccggccatactccatcgcgaacgagatcacgggctggtttcgcgggccgaccatggggacgctcatccggccggggcccgccgcgtcgcctctccccatcgcttccccctcctcctcatccgcccacgtggctgtcgttggcggtggcgcgaggagcttgcggcatcgggtgtcggtgtcggtggcggtgttccggtccccgagtacgcaggttctggcgacgagatggcgccgccggagaggtatggttgtgcggtcggatgtcgtcgccggtggcgcagccgccgcggcagctggggattcgacgcgggcgctcccaggtatccaccttgctgagtatgttaaaatgttttaaccgtttcatttgaagatggccgtgagatgtcaggtaaataatctgccactatgataaagtgaatgtgagagggatccctttcataatcgcaaaaggttaaatgccctaaattatggggtgctgaaatctggattatacaatctgtgcagattgtaatcgcaaacaaacacccccctaaatcactgttgctaatgctccgtggtttaaacgatcacggtagattcaaattgcaaacaaagagtcgtttggttcctatcattataatactatcaactatgatcacaaccggccctcctatctaactgaaattgggacacatctggcagtgtgtatccttttagacatcttatagcaaatagcatggtatagccgtgctgcaccattgtgtttcactgtttcaggcgcgtagaagaatcaatagatgcaggtgctagctgtgtctcatgtttattagaaagcatgtgcacatgtacaacaaggtgacaaatagcttgtgtggattgaatcgtctacaaagaacaccacaatgtatcaaactgtagaattggatctccttgtgctaacttgaaattgttttaacaggtcagcaattggcttcaagagtcagaggggtttgcttctatttggtgactgcagttgcagcaatctttttgtttgtagctatggttgtggttcatccacttgtgttgctatttgaccggtaccgtaggagagcacagcactacatcgcaaagatttgggctacggtgacaatctccatgttctacaatcttgaggtcgaaggaatggagaatctgcctccaaatagctgtcctggtgtctatgttgctaaccatcagagcttcttggatatttatacccttctaactctagggaggtgcttcaaatttataagcaagaccagcatctttatgttccctattatagggtgggcaatgtatctcttgggtgtgattcctctgcggcgtatggacagcaggagccagttggaaaaggagcttctgtatttttctttccggagggtactcgaagtagagatggcaagttaggtgtatttaagcgtggcgcattcagtgtcgccgcaaagacaggagctcctgtgatagctattactcttatcggaactgggaaattgatgccttctggaatggaaggaattctcaattcaggttcggtaaaggtgattattcaccgacctattcaaggcaatgatgcagaaacattatgttccgaagcaaggaatgtgatagcagacactcttcttctgcatggttatggagcccattaaagcaagtggggtgctttggtctgttttttcttctgaacgagtgctttggtctattctttagtggacttttcagagcacaagacttgagagttgagacaaagctcgttgcagatgtaatcctgtaaaggcaagagggaggaaaatggcgtgaattggcggttgtaacatgtggtcttcaatttgttgtaaaccctacttatttttgttggtttgatagtacaaagaaatgtaaaaggcagaggccatcttcattggatggaaaatgaagctcacgtgatattttgccattttggcctagtttgtgaaccctattttctcaggaaaaaaaactaaattttcatagaaaaatggaaatcgtg

SEQ ID NO: 52996 - DNA, 857 bp, Zea Mays
attttacaacataacaaagcgaggatgacgaagaatctttgttgcaaggagaacgcgaagccgaaatgatgatcgtggaggcctacgcagcacttgtgctcgcctttctttcaacggaaagtatgaaggttcgaggagccatttccagctgccttccggacaacaacttaaaagttcttgtaccagtgctagagaagtttgtgtcatttcacctgcagctcaacatgatgacaagggaaacacattcagctgtcaccgaagtcattgaaagatgcaggcagtcatagaagttggaagagggcgccctgtacagattaaccgacctctctgcagtgcagccgaagccacacacaggtgttgctcctcacctggccagggcgcaacgaattgattgatgccagaggctggcttgggagctaacagtgtttctattctttcttttgcccctcctgctgttctgatcctgtcatgtgcatctcctttagtttcttctccacacactcccccccggaaatcatgtagtccatattatgagtggaacaataacagtgtaggctatagggaatgtagttgtggtgcttcagttcttcgtctctgttttacatgttgtattttcgtgtcacatggaatcagtgaccacacatgcctcaatctgacaaattaagagtgtatatcacataatagtagtgtaatttaactatgtctctttttccgtataaagaacctattagttggaagcatcttccggttgcagaaaatgaccatgttgtatgcaaacggtgtaacctggtgtacacaattctttcgttgctatgtactgttctgagggaattagaacccaggtcttctgttgcttg

SEQ ID NO: 52997 - DNA, 1316 bp, Zea Mays
aaagttttgatcagccagctttaccaaacaaacatcttttgcagcaggttcttatgaacttggcaaatgacaacccttctggttgcgaacaaattgcgtcatgtggtggaattaatacaatggcctccttgatcattaaacattttccctcatttgatttctccatggacagtaacaatcaaatgaaagaaagagtatcctctggtgatctgtcgtcttcccagaacagcaagtcactccaaatcaaaactaagcaattgcgagcctatgaacttgattttctggtcgccatattgggattgcttgtcaaccttgtggagaaggataaccttaatagggtacgacttgcgaatgcccgtgtttctgtcaatctatctcaaagtccagatactgaagaggtacagagggatgtcataccccttctctgttcaatattcttagcgagtcaaagtactggggaaactgctgaagctatatcaccggatgacgaagaatctttgttgcaaggagaacgcgaagccgaaatgatgatcgtggaggcctacgcagcacttgtgctcgcctttctttcaacggaaagtatgaaggttcgaggagccatttccagctgccttccggacaacaacttaaaagttcttgtaccagtgctagagaagtttgtgtcatttcacctgcagctcaacatgatgacaagggaaacacattcagctgtcaccgaagtcattgaaagatgcaggcagtcatagaagttggaagagggcgccctgtacagattaaccgacctctctgcagtgcagccgaagccacacacaggtgttgctcctcacctggccagggcgcaacgaattgattgatgccagaggctggcttgggagctaacagtgtttctattctttcttttgcccctcctgctgttctgatcctgtcatgtgcatctcctttagtttcttctccacacactcccccccggaaatcatgtagtccatattatgagtggaacaataacagtgtaggctatagggaatgtagttgtggtgcttcagttcttcgtctctgttttacatgttgtattttcgtgtcacatggaatcagtgaccacacatgcctcaatctgacaaattaagagtgtatatcacataatagtagtgtaatttaactatgtctctttttccgtataaagaacctattagttggaagcatcttccggttgcagaaaatgaccatgttgtatgcaaacggtgtaacctggtgtacacaattctttcgttgctatgtactgttctgagggaattagaacccaggtcttctgttgcttg

SEQ ID NO: 52998 - DNA, 2440 bp, Zea Mays
aaatttgattgatgacactagattctggaactcagattctagttcagaggacatacttttaaaagttgaagaaatcctcttaagctgcaaagagatcaagccactagacagtgatgataagaaaacaacaaggccagaactatgttcaaagtggcttgctttgttgacaatggaaaaggcgtgcttgtctgctgttgcattagaggatacatctgagatggtgttgaaacttggaggaaattttaaagaaacattaaggcagtcgggtggccttgataatatttttaatgtcatggtgaattgccattcagagctggagaaacttgtaaaggatgcctccactacggatgtggagggaaaggaaagagctcctctgcaaagcgctgcactcctcttgaaatgtttgaaaattttggagaatgccacatttctaagtgacaacaacaagacccatttgctcagcttgaatcgaaaattgagccctaaatgccccccacttccttttgttggtgtcattctcaatattattgaattactatcagccctctctcttcttcagaaaccttccactgtttcaagaaaagcagacccaaaaaatactaaagtttgcaatggggcttgctctgccgacagtagatgtttgaacttattgaatcatcatggcaagtgcaataactcaaagaaaaagagtcctttactgaatcatcatggcaagtgccaggattgctcatccaccaaattcaatggtgctagtttgaagctcaatgtaagaaaggaccgttctaaagctaattcaaccagaggttcaagtggttggatttctataaaagcacgtacttctgattggaactccagagaaatggcaaaaaagcgacgtctatcagaaaatgcacaaactgctttgagtaatggtggtgatgatccatttgcatttgatgataccgatcaagaaccttcaaattgggatccatttggtccaaaaaggaaatcaccacagaagcgagcgaaacgatctaatggtgaactagtgctggatgattgtgacactgcagtaacgggaagtcctgaattatgtcaacctgaaggtattaatcagtcaggtgcaacttctgattctaaggctgcagatgagtccaaccttttagaagattgccttttggcatcagttaaggttcttatgaacttggcaaatgacaacccttctggttgcgaacaaattgcgtcatgtggtggaattaatacaatggcctccttgatcattaaacattttccctcatttgatttctccatggacagtaacaatcaaatgaaagaaagagtatcctctggtgatctgtcgtcttcccagaacagcaagtcactccaaatcaaaactaagcaattgcgagcctatgaacttgattttctggtcgccatattgggattgcttgtcaaccttgtggagaaggataaccttaatagggtacgacttgcgaatgcccgtgtttctgtcaatctatctcaaagtccagatactgaagaggtacagagggatgtcataccccttctctgttcaatattcttagcgagtcaaagtactggggaaactgctgaagctatatcaccggatgacgaagaatctttgttgcaaggagaacgcgaagccgaaatgatgatcgtggaggcctacgcagcacttgtgctcgcctttctttcaacggaaagtatgaaggttcgaggagccatttccagctgccttccggacaacaacttaaaagttcttgtaccagtgctagagaagtttgtgtcatttcacctgcagctcaacatgatgacaagggaaacacattcagctgtcaccgaagtcattgaaagatgcaggcagtcatagaagttggaagagggcgccctgtacagattaaccgacctctctgcagtgcagccgaagccacacacaggtgttgctcctcacctggccagggcgcaacgaattgattgatgccagaggctggcttgggagctaacagtgtttctattctttcttttgcccctcctgctgttctgatcctgtcatgtgcatctcctttagtttcttctccacacactcccccccggaaatcatgtagtccatattatgagtggaacaataacagtgtaggctatagggaatgtagttgtggtgcttcagttcttcgtctctgttttacatgttgtattttcgtgtcacatggaatcagtgaccacacatgcctcaatctgacaaattaagagtgtatatcacataatagtagtgtaatttaactatgtctctttttccgtataaagaacctattagttggaagcatcttccggttgcagaaaatgaccatgttgtatgcaaacggtgtaacctggtgtacacaattctttcgttgctatgtactgttctgagggaattagaacccaggtcttctgttgcttg

SEQ ID NO: 52999 - DNA, 3230 bp, Zea Mays
ctcgcggccccactcgccagtggcacaacaacctgatcgagccgaagccgagttcctcgctcccccaaaatcccccaagcagctctgcagctgcccctcacaacttcattcccaaatccgccgcaacgcgaagcaaacgacgccccgaacacacccaagccacgcccaattcctatctctcgccgcgcatcgacgacggcgcggacgccatgatcctgcgaacgtacgggcgcagatcccgctccttctccgacggcgggggcggggtctcgtcctcgcaggacgcgttcgactgcgacgacgccgccgacttgctggtgtcgtcggcctcgcagccgctcccgctcccgccgtcgcaggagtcctcttcgatgtgggacttcgacgaggacccacctccgtccccgccgcggccccggccggaggggcggcggcgcggggcaagaagaggagggtgggagctcgcggaagcccccgcggtggcgccgacggcaacgctgatggaggcggaggagtacggagagatgatggagagcgtggacgaagtcacgttcgcgctcgacgggctccgacccgcagcgcagaagcggacgcggcgggccagcctgctcgcgctgctcgggatctgcgcctccgccgagcgccgccgcgtgctccggtcccaaggactggtacagcaaattatcgatgctattttggttctggacattgatgatcctccctgcgctattgctgcaggagctcttttatttgttttggcaagtgatgtccaagacaataattcgctggattcagaaacttgtgtccatttccttcttaaattattaaaccctccagtgaatgttgttgatgccaaagcgccatcaataggttccaaacttcttggaatcagtaaatttcagatgcttaacagttccaataaggatgcagattctagttcagaggacatacttttaaaagttgaagaaatcctcttaagctgcaaagagatcaagccactagacagtgatgataagaaaacaacaaggccagaactatgttcaaagtggcttgctttgttgacaatggaaaaggcgtgcttgtctgctgttgcattagaggagctggagaaacttgtaaaggatgcctccactacggatgtggagggaaaggaaagagctcctctgcaaagcgctgcactcctcttgaaatgtttgaaaattttggagaatgccacatttctaagtgacaacaacaagacccatttgctcagcttgaatcgaaaattgagccctaaatgccccccacttccttttgttggtgtcattctcaatattattgaattactatcagccctctctcttcttcagaaaccttccactgtttcaagaaaagcagacccaaaaaatactaaagtttgcaatggggcttgctctgccgacagtagatgtttgaacttattgaatcatcatggcaagtgcaataactcaaagaaaaagagtcctttactgaatcatcatggcaagtgccaggattgctcatccaccaaattcaatggtgctagtttgaagctcaatgtaagaaaggaccgttctaaagctaattcaaccagaggttcaagtggttggatttctataaaagcacgtacttctgattggaactccagagaaatggcaaaaaagcgacgtctatcagaaaatgcacaaactgctttgagtaatggtggtgatgatccatttgcatttgatgataccgatcaagaaccttcaaattgggatccatttggtccaaaaaggaaatcaccacagaagcgagcgaaacgatctaatggtgaactagtgctggatgattgtgacactgcagtaacgggaagtcctgaattatgtcaacctgaaggtattaatcagtcaggtgcaacttctgattctaaggctgcagatgagtccaaccttttagaagattgccttttggcatcagttaaggttcttatgaacttggcaaatgacaacccttctggttgcgaacaaattgcgtcatgtggtggaattaatacaatggcctccttgatcattaaacattttccctcatttgatttctccatggacagtaacaatcaaatgaaagaaagagtatcctctggtgatctgtcgtcttcccagaacagcaagtcactccaaatcaaaactaagcaattgcgagcctatgaacttgattttctggtcgccatattgggattgcttgtcaaccttgtggagaaggataaccttaatagggtacgacttgcgaatgcccgtgtttctgtcaatctatctcaaagtccagatactgaagaggtacagagggatgtcataccccttctctgttcaatattcttagcgagtcaaagtactggggaaactgctgaagctatatcaccggatgacgaagaatctttgttgcaaggagaacgcgaagccgaaatgatgatcgtggaggcctacgcagcacttgtgctcgcctttctttcaacggaaagtatgaaggttcgaggagccatttccagctgccttccggacaacaacttaaaagttcttgtaccagtgctagagaagtttgtgtcatttcacctgcagctcaacatgatgacaagggaaacacattcagctgtcaccgaagtcattgaaagatgcaggcagtcatagaagttggaagagggcgccctgtacagattaaccgacctctctgcagtgcagccgaagccacacacaggtgttgctcctcacctggccagggcgcaacgaattgattgatgccagaggctggcttgggagctaacagtgtttctattctttcttttgcccctcctgctgttctgatcctgtcatgtgcatctcctttagtttcttctccacacactcccccccggaaatcatgtagtccatattatgagtggaacaataacagtgtaggctatagggaatgtagttgtggtgcttcagttcttcgtctctgttttacatgttgtattttcgtgtcacatggaatcagtgaccacacatgcctcaatctgacaaattaagagtgtatatcacataatagtagtgtaatttaactatgtctctttttccgtataaagaacctattagttggaagcatcttccggttgcagaaaatgaccatgttgtatgcaaacggtgtaacctggtgtacacaattctttcgttgctatgtactgttctgagggaattagaacccaggtcttctgttgcttg

SEQ ID NO: 53000 - DNA, 3101 bp, Zea Mays
ctcgcggccccactcgccagtggcacaacaacctgatcgagccgaagccgagttcctcgctcccccaaaatcccccaagcagctctgcagctgcccctcacaacttcattcccaaatccgccgcaacgcgaagcaaacgacgccccgaacacacccaagccacgcccaattcctatctctcgccgcgcatcgacgacggcgcggacgccatgatcctgcgaacgtacgggcgcagatcccgctccttctccgacggcgggggcggggtctcgtcctcgcaggacgcgttcgactgcgacgacgccgccgacttgctggtgtcgtcggcctcgcagccgctcccgctcccgccgtcgcaggagtcctcttcgatgtgggacttcgacgaggacccacctccgtccccgccgcggccccggccggaggggcggcggcgcggggcaagaagaggagggtgggagctcgcggaagcccccgcggtggcgccgacggcaacgctgatggaggcggaggagtacggagagatgatggagagcgtggacgaagtcacgttcgcgctcgacgggctccgacccgcagcgcagaagcggacgcggcgggccagcctgctcgcgctgctcgggatctgcgcctccgccgagcgccgccgcgtgctccggtcccaaggactggtacagcaaattatcgatgctattttggttctggacattgatgatcctccctgcgctattgctgcaggagctcttttatttgttttggcaagtgatgtccaagacaataattcgctggattcagaaacttgtgtccatttccttcttaaattattaaaccctccagtgaatgttgttgatgccaaagcgccatcaataggttccaaacttcttggaatcagtaaatttcagatgcttaacagttccaataaggatgcagattctagttcagaggacatacttttaaaagttgaagaaatcctcttaagctgcaaagagatcaagccactagacagtgatgataagaaaacaacaaggccagaactatgttcaaagtggcttgctttgttgacaatggaaaaggcgtgcttgtctgctgttgcattagaggagctggagacccatttgctcagcttgaatcgaaaattgagccctaaatgccccccacttccttttgttggtgtcattctcaatattattgaattactatcagccctctctcttcttcagaaaccttccactgtttcaagaaaagcagacccaaaaaatactaaagtttgcaatggggcttgctctgccgacagtagatgtttgaacttattgaatcatcatggcaagtgcaataactcaaagaaaaagagtcctttactgaatcatcatggcaagtgccaggattgctcatccaccaaattcaatggtgctagtttgaagctcaatgtaagaaaggaccgttctaaagctaattcaaccagaggttcaagtggttggatttctataaaagcacgtacttctgattggaactccagagaaatggcaaaaaagcgacgtctatcagaaaatgcacaaactgctttgagtaatggtggtgatgatccatttgcatttgatgataccgatcaagaaccttcaaattgggatccatttggtccaaaaaggaaatcaccacagaagcgagcgaaacgatctaatggtgaactagtgctggatgattgtgacactgcagtaacgggaagtcctgaattatgtcaacctgaaggtattaatcagtcaggtgcaacttctgattctaaggctgcagatgagtccaaccttttagaagattgccttttggcatcagttaaggttcttatgaacttggcaaatgacaacccttctggttgcgaacaaattgcgtcatgtggtggaattaatacaatggcctccttgatcattaaacattttccctcatttgatttctccatggacagtaacaatcaaatgaaagaaagagtatcctctggtgatctgtcgtcttcccagaacagcaagtcactccaaatcaaaactaagcaattgcgagcctatgaacttgattttctggtcgccatattgggattgcttgtcaaccttgtggagaaggataaccttaatagggtacgacttgcgaatgcccgtgtttctgtcaatctatctcaaagtccagatactgaagaggtacagagggatgtcataccccttctctgttcaatattcttagcgagtcaaagtactggggaaactgctgaagctatatcaccggatgacgaagaatctttgttgcaaggagaacgcgaagccgaaatgatgatcgtggaggcctacgcagcacttgtgctcgcctttctttcaacggaaagtatgaaggttcgaggagccatttccagctgccttccggacaacaacttaaaagttcttgtaccagtgctagagaagtttgtgtcatttcacctgcagctcaacatgatgacaagggaaacacattcagctgtcaccgaagtcattgaaagatgcaggcagtcatagaagttggaagagggcgccctgtacagattaaccgacctctctgcagtgcagccgaagccacacacaggtgttgctcctcacctggccagggcgcaacgaattgattgatgccagaggctggcttgggagctaacagtgtttctattctttcttttgcccctcctgctgttctgatcctgtcatgtgcatctcctttagtttcttctccacacactcccccccggaaatcatgtagtccatattatgagtggaacaataacagtgtaggctatagggaatgtagttgtggtgcttcagttcttcgtctctgttttacatgttgtattttcgtgtcacatggaatcagtgaccacacatgcctcaatctgacaaattaagagtgtatatcacataatagtagtgtaatttaactatgtctctttttccgtataaagaacctattagttggaagcatcttccggttgcagaaaatgaccatgttgtatgcaaacggtgtaacctggtgtacacaattctttcgttgctatgtactgttctgagggaattagaacccaggtcttctgttgcttg

SEQ ID NO: 53001 - DNA, 3323 bp, Zea Mays
ctcgcggccccactcgccagtggcacaacaacctgatcgagccgaagccgagttcctcgctcccccaaaatcccccaagcagctctgcagctgcccctcacaacttcattcccaaatccgccgcaacgcgaagcaaacgacgccccgaacacacccaagccacgcccaattcctatctctcgccgcgcatcgacgacggcgcggacgccatgatcctgcgaacgtacgggcgcagatcccgctccttctccgacggcgggggcggggtctcgtcctcgcaggacgcgttcgactgcgacgacgccgccgacttgctggtgtcgtcggcctcgcagccgctcccgctcccgccgtcgcaggagtcctcttcgatgtgggacttcgacgaggacccacctccgtccccgccgcggccccggccggaggggcggcggcgcggggcaagaagaggagggtgggagctcgcggaagcccccgcggtggcgccgacggcaacgctgatggaggcggaggagtacggagagatgatggagagcgtggacgaagtcacgttcgcgctcgacgggctccgacccgcagcgcagaagcggacgcggcgggccagcctgctcgcgctgctcgggatctgcgcctccgccgagcgccgccgcgtgctccggtcccaaggactggtacagcaaattatcgatgctattttggttctggacattgatgatcctccctgcgctattgctgcaggagctcttttatttgttttggcaagtgatgtccaagacaataattcgctggattcagaaacttgtgtccatttccttcttaaattattaaaccctccagtgaatgttgttgatgccaaagcgccatcaataggttccaaacttcttggaatcagtaaatttcagatgcttaacagttccaataaggatgcagattctagttcagaggacatacttttaaaagttgaagaaatcctcttaagctgcaaagagatcaagccactagacagtgatgataagaaaacaacaaggccagaactatgttcaaagtggcttgctttgttgacaatggaaaaggcgtgcttgtctgctgttgcattagaggatacatctgagatggtgttgaaacttggaggaaattttaaagaaacattaaggcagtcgggtggccttgataatatttttaatgtcatggtgaattgccattcagagctggagaaacttgtaaaggatgcctccactacggatgtggagggaaaggaaagagctcctctgcaaagcgctgcactcctcttgaaatgtttgaaaattttggagaatgccacatttctaagtgacaacaacaagacccatttgctcagcttgaatcgaaaattgagccctaaatgccccccacttccttttgttggtgtcattctcaatattattgaattactatcagccctctctcttcttcagaaaccttccactgtttcaagaaaagcagacccaaaaaatactaaagtttgcaatggggcttgctctgccgacagtagatgtttgaacttattgaatcatcatggcaagtgcaataactcaaagaaaaagagtcctttactgaatcatcatggcaagtgccaggattgctcatccaccaaatttttgaagctcaatgtaagaaaggaccgttctaaagctaattcaaccagaggttcaagtggttggatttctataaaagcacgtacttctgattggaactccagagaaatggcaaaaaagcgacgtctatcagaaaatgcacaaactgctttgagtaatggtggtgatgatccatttgcatttgatgataccgatcaagaaccttcaaattgggatccatttggtccaaaaaggaaatcaccacagaagcgagcgaaacgatctaatggtgaactagtgctggatgattgtgacactgcagtaacgggaagtcctgaattatgtcaacctgaaggtattaatcagtcaggtgcaacttctgattctaaggctgcagatgagtccaaccttttagaagattgccttttggcatcagttaaggttcttatgaacttggcaaatgacaacccttctggttgcgaacaaattgcgtcatgtggtggaattaatacaatggcctccttgatcattaaacattttccctcatttgatttctccatggacagtaacaatcaaatgaaagaaagagtatcctctggtgatctgtcgtcttcccagaacagcaagtcactccaaatcaaaactaagcaattgcgagcctatgaacttgattttctggtcgccatattgggattgcttgtcaaccttgtggagaaggataaccttaatagggtacgacttgcgaatgcccgtgtttctgtcaatctatctcaaagtccagatactgaagaggtacagagggatgtcataccccttctctgttcaatattcttagcgagtcaaagtactggggaaactgctgaagctatatcaccggatgacgaagaatctttgttgcaaggagaacgcgaagccgaaatgatgatcgtggaggcctacgcagcacttgtgctcgcctttctttcaacggaaagtatgaaggttcgaggagccatttccagctgccttccggacaacaacttaaaagttcttgtaccagtgctagagaagtttgtgtcatttcacctgcagctcaacatgatgacaagggaaacacattcagctgtcaccgaagtcattgaaagatgcaggcagtcatagaagttggaagagggcgccctgtacagattaaccgacctctctgcagtgcagccgaagccacacacaggtgttgctcctcacctggccagggcgcaacgaattgattgatgccagaggctggcttgggagctaacagtgtttctattctttcttttgcccctcctgctgttctgatcctgtcatgtgcatctcctttagtttcttctccacacactcccccccggaaatcatgtagtccatattatgagtggaacaataacagtgtaggctatagggaatgtagttgtggtgcttcagttcttcgtctctgttttacatgttgtattttcgtgtcacatggaatcagtgaccacacatgcctcaatctgacaaattaagagtgtatatcacataatagtagtgtaatttaactatgtctctttttccgtataaagaacctattagttggaagcatcttccggttgcagaaaatgaccatgttgtatgcaaacggtgtaacctggtgtacacaattctttcgttgctatgtactgttctgagggaattagaacccaggtcttctgttgcttg

SEQ ID NO: 53002 - DNA, 3120 bp, Zea Mays
ttttatttaataatttaaatgtcgttgcaattatggttatataaagggagaaatattaagaaaacagtgatggatgccctcacgctcgagatgtgtgccgaggtcgaggcaacagcgaccgatcccgtccgtgcgaggagacaaaaaaaatatcaaagcctgctaattaccgaaagtatcctatctaactatccatccccagggtgggaccggcctggggcagggaaatccaagccaccaagctcccattggccgggcttgtgccaggtcggcgccgcgtggcgaaccccaccccaccccaccctatcgcgttatcgccaccggctcaccgctcacggtcacggccgaataaactcccgcggtgccgtgcctcgctttcgcatccccccgcggagaggagaggaagaagaagaacccagccaaatcctcagtcttcaggctgctcacagctcgtgccgtccactctcccccgaggcagtctcttgcgttcgctgctcgacatggcgctccaggcggcgacgtcctttctcccctcggccctctccgcgcgcaaggaggggtcggtgaaggactcggcgtcgttcttgggtgttcgtctcgcggcggatggcctcaagctggacaccaccgctctgggcctacgcaccgtggtatttggactaaggctactgcttatatattaccttccgtcttcttacgaagctccttaaatcgtgctcctatgttgaaatggtgtggtatgaagctgaaaataataatttttcgcacattctccatgcacttgtcggtcctgtaggctgtagctagctgttttgctaaacagatctccaaaagagtttttttaaatctttcaagcaaggagctgaaatatataaaaaaaacagcttcattagtaaagctgagttgtgccaaacgtggatagggatagggagcggatagtagtctttgcctactgaaaccttggacatcatttggctggctagaattgtctgtcttcaagttcagtgtcttactgactttctctattccaagtacaaggctgaaagccatggaaagtcttgactggatagttagggttattttggaaactgaaatcctttttggaatttttagagatcgaggagaaaattagcttatttttctctcaatcccgggaatccagagcggatttaaaattttaaactaggcttaaagggacattttcttcccagcatcacatgtataactcgtaattgctactcctaatgccaaattaagcaatggagtactttgtacgcagtagatcatgttaatgaggcagctctgtggtcaactggacacttgagcctcaaagttggtgttttttaagggaaagataaaagttgaatttaggttgtgtcatgacatgacactgttcgtttggttttaatctgtattggcttctactgcttttacaaaggctgttgattaaagtctattcagacggttgtagttgcagctgcaactgactttaatccgaagccggcaatcaggcattctaggatcatcacttaattttaccacttcagatgtcgctagcctagccattgtaggttgtacattgtttgtcactggttccctgtctgatgcttgatgtcactgtaagtctgtaactaaaaaaaatacacatccaaaacctgcagagggtgagcaggtcggcggacatccgcgcgcagacggcagcggtgtcctccccgtcagtgacccccgcgtcgccgtctggcaagaagaccctccgcaagggcacggcggtcatcaccggcgcgtcgtccggcctcggcctcgccacggcgaaggccctcgcggagacaggcaagtggcacgtcatcatggcctgccgcgacttcctcaaggcgtcgcgcgcggccaaggcggccggcatggacaaggacagcttcaccgtcgtgcacctggacctcgcctccctggacagcgtccgccagttcgtcaggaacgtgcgccagctggagatgcccatcgacgtggtggtctgcaacgccgccgtgtaccagcccaccgccaaggagccgtcctacaccgccgacggcttcgagatgagcgtcggcgtcaaccacctcggccatttcctcctcgcccgcgagctcctcagcgacctccagtcctccgactacccctctaagcgcctcatcatcgtcggctccatcaccgggaacacgaacacgctggcggggaacgtgcccccgaaggcgaacctgggcgacctgcgcggcctcgccggcggcctcaacggcgttggcagctcggtgatgatcgacggcggggagttcgacggcgccaaggcatacaaggacagcaaggtgtgcaacatgctgacgatgcaggagttccaccgccggtaccacgaggagacgggcgtgaccttcgcgtcgctctacccgggctgcatcgccaccacgggcctgttccgcgagcacatcccgctgttccgcctgctcttcccgccgttccagaagtacatcaccaaggggtacgtctccgaggaggaggccgggaagcggctggcgcaggtggtgagcgaccccagcctgaccaagtccggcgtgtactggagctggaacaagaactccgcgtccttcgagaaccagctctctgaggaggccagcgacgccgacaaggccaagaagctctgggagatcagcgagaagctcgtcggcttggcgtgatgcccaccgtggccggcgccggcagccggcgacagtttttcctacctaggacatgctcattagttggtctcactctcagtcgagtagtcgacgtgtggtgcgcccgtgtcagagtgccaagccaagacagaaagtgagtacaaacgtgtaaaatatgtgctactgcgacgtgatggtttgggcagtggactgtatgtatctctactctctaggcttctgctttgctttgcatatttaattttctgctaataagaggacagcaaatgcctttcgagcttctttactttgtcggcatttagcagattcagatttttcttgaggacatggcacgtgaataatttcttctgtcagtagttcagtacaagttctccaatgttttttgtatccagctactcaaatgttcccagcacagaatgac

SEQ ID NO: 53003 - DNA, 1823 bp, Zea Mays
attaaggaatggtaaattactgcaaacagctttgaaccttttttttaaaaaaaaaaagggaacagctttgagatatgaagaaaacaaactcgtgaggtgatgcaagcatggcattgttgatgccaaatagtcaacttcacatatcatggatcagcaaggccatactgaactcaaaaaggtcaaattactacattagcagtactgaaaacattaaagcatctgtgtttctccctcacagcgtcagtaagtatggtttgattctgaatataattacacaaatatgtgtcgatgagtacacagcagaaagcatcttttagttcctgctacttttctgctccacactaataagacccgaccctgtttgtttcactcctaaattatataagctgaattattgtggaatagtagaaaggtaaaatatcactttggaatcataaataagctgaaataagctaaccaatgctaacttatttcagcttatttgtggcctaaaattgatattttaccctcctatccttccaccataatccaacttatataatctagaagagaaacaaacaggacctaagtagcagactatcaaacccacattttcaacacacggatgccattcatcttgtcatataaactaaccatgtgcacattttcctagaatagttgagattccaaaacatccttcacaagtatgcatgaaagggaaacatgtaccatagcggaaccaagtgtataccggtagtttggtttcaggtttgaactagccacgtggtttttttactttcttcgtccccactctccatgaacctatttcctgagatgggaaaaagagtcagttatgcactacgtgtcatagactaaggccctgttccaatctcgcgagataaactttagcagcttttttttagctacttttagccatttataatctaaacaagagagctaatggtggtaattgaaactaaactttagcacttcaattcatatagctaaagtttagcaggaagctaaagtttatcccgtgagattgaaacggggcctaacttaagagttcattatactattagcaaaacctagatttttcactcatcggaactttacaatttacgaaagcaactatcagcttgtcatcaacagcctcgtcagcaccctgtgctaagcatttagcaatagaaagtgtagtagggaaggaaaccattggcacctcctcattggctgcgctgaaagctccagctgttctgctcatgcccattcctttgtcaagaaagcgggacttgcttttgtccccgatgaggcgatgatgagtatgcagcatcaagtgctgattcggttacaccacattgttccctggaataaagttgcctttttggtggcttcaccctataaatgccccccatatggctcagactctgggcactagcaggcatccacttctcacaggctaagagaagtctcctagcatcaaagcagatttgcagatagaccttctccaagccatggagactttcacccaggagcatgtcattggaattccattgacttcgtttgcatatgccgatgaggaaagacaaggaaaatcttcctgttctgccatggttcataaaaaaaataagaagagttccttcattcatcggatgaacaaactgagccataaaacagatagctgacgtagttttgtaagtttgtacattaattctcaaggatcagattgaattcttcaacacttggtctcattttccattttttgtccttgagattgttatatctggttactgtatattttgtctgcaacatcaaaagtgttatatctggtaactgtacgttcacat

SEQ ID NO: 53004 - DNA, 3192 bp, Zea Mays
attaaggaatggtaaattactgcaaacagctttgaaccttttttttaaaaaaaaaaagggaacagctttgagatatgaagaaaacaaactcgtgaggtgatgcaagcatggcattgttgatgccaaatagtcaacttcacatatcatggatcagcaaggccatactgaactcaaaaaggtcaaattactacattagcagtactgaaaacattaaagcatctgtgtttctccctcacagcgtcagtaagtatggtttgattctgaatataattacacaaatatgtgtcgatgagtacacagcagaaagcatcttttagttcctgctacttttctgctccacactaataagacccgaccctgtttgtttcactcctaaattatataagctgaattattgtggaatagtagaaaggtaaaatatcactttggaatcataaataagctgaaataagctaaccaatgctaacttatttcagcttatttgtggcctaaaattgatattttaccctcctatccttccaccataatccaacttatataatctagaagagaaacaaacaggacctaagtagcagactatcaaacccacattttcaacacacggatgccattcatcttgtcatataaactaaccatgtgcacattttcctagaatagttgagattccaaaacatccttcacaagtatgcatgaaagggaaacatgtaccatagcggaaccaagtgtataccggtagtttggtttcaggtttgaactagccacgtggtttttttactttcttcgtccccactctccatgaacctatttcctgagatgggaaaaagagtcagttatgcactacgtgtcatagactaaggccctgttccaatctcgcgagataaactttagcagcttttttttagctacttttagccatttataatctaaacaagagagctaatggtggtaattgaaactaaactttagcacttcaattcatatagctaaagtttagcaggaagctaaagtttatcccgtgagattgaaacggggcctaacttaagagttcattatactattagcaaaacctagatttttcactcatcggaactttacaatttacgaaagcaactatcagcttgtcatcaacagcctcgtcagcaccctgtgctaagcatttagcaatagaaagtgtagtagggaaggaaaccattggcacctcctcattggctgcgctgaaagctccagctgttctgctcatgcccattcctttgtcaagaaagcgggacttgcttttgtccccgatgaggcgatgatgagtatgcagcatcaagtgctgattcggttacaccacattgttccctggaataaagttgcctttttggtggcttcaccctataaatgccccccatatggctcagactctgggcactagcaggcatccacttctcacaggctaagagaagtctcctagcatcaaagcagatttgcagatagaccttctccaagccatggagactttcacccaggagcatgtcattggaattccattgacttcgtttgcatatgccgatgaggaaagacaaggaaaatcttcctgttctgccatggttcataaaaaaaataagaagagttccttcattcatcggatgaacaaactgagccataaaacagatagctacatgcaaggattcaaagaacacttaaccatgggaccaaaaatttcagaaactataaaagggaaactaagcttcggtgcaaaggttctccaagctggcggtattgataaagtcttcagagaatactttgcagttgagaaagatgagaaactacggaaggctttccagtgctatctttcaaccacagctggtccaatagctggaatgcttttcatctcaactaagaagattgctttccatagtgataggcctttgagtttcacgtctcctaaaggaggcagtacaagggtgccttacaaggtgttaatccccacagagagaatgaaaagtgcttcagtgcgggaaaatttatacaatccagatgagaagtatattgatgtagtcactgttgatggctttgatttttggttcatgggctttgtcagctatgagaagtcattcaaatatctccaacaagtaattatggagctgagatgatgcacacagttttgtaacgtgaaacatcatagataccatgttgatatggtatatgtacattgaagagatagaattgatctatcacattgattgtgaagcaaagtttttcaactatgtccttgaatattcagtattatcaaatgcattgaccgatcatactaaacgaactaaccaatcagatcctgtcggtaccttttttactaaccaaccggttatcttagactgaaagatttatcttaagagagagagctctcaacaggaacttccatttaaaaaatatctggacagggaaatatgcataactaaaggtctcaccctaagtaaagcgtgcaaacagcttttctaattcaaggatatgacagttccagccaagggcctgttagctatcctgtgtgttcatgttcattgtgtctaggttcagtttttaatgctactagattttcagctcgtacctaatgataataataggcaatgataggagttatgactgcagtaattaggaggataccatgggcaggtgtattagctatatatatgataaaatggtgaggacagagagctgcatcaaccgagggagagagaggaggggatttcctaggtgcttgtgataaacataaaagacagagggagtgattccctggtgttgataccaaagacagagggagcgactccctagtactccctccgttcttttttatttgtcgtgttttagttcaaaattgaactagtggacgacaaatattcgagaacggaggtagtatttgtgataaaaactgaagacagggagtgatttcatagtgtgtgtttgcgataaacactgaagaaaggagagggagtgatttccaacagggccaagctagagcttagtcgactctggtggctcactccaaatacacgttcccatatggtcagacaaaattttgattttttgtccaaattggacttttcataaaaaaaactttttggcaaaatgtattaaataactcagttccacttggtctcattttccagtaacctcccatagctagtcttactggagtgttaagccaaatatgtt

SEQ ID NO: 53005 - DNA, 1838 bp, Zea Mays
ctactatccaccccgctgtctcggcctcacccaccgttcccatccaaacgccggtgccacgtcgtcgccccgcgccttccgccccaccaactcaccggcgaggtttaggacacagcgcatctcgccgcagcggatgccgtatatatccgcgcgccgagcttgagggacgccacaccccaccctcccctcccatcgcgattcgcgaatcaccaaactacccctcgttgtgaaaggaaggagacgaacgaggcagcggaaaggggagaggatttttcagattttccggcagcgacctacctagcccagcccagcgagagagaccgagcgacagcagctaccttctcccgacatgacgccgcatctgcccgccgtctcctcctcctccacgacgaccacatcccgcgccgccgccgccgctgccgcgcctccgtcctcgccgcatcagtaccggaggcggaggcggcgccgggtgccgggctgcctccgcccgcgcgccgcgtccgtccgctgctgcgccgcggcggcgcccgcgccgcaggcagcggtgcccgcggccgcgcgggccgaggcaaccacgcgggtcttcgtcgtgtccgacctgcacacggactacccggagaacatggagtgggtgcgccgcctgcccgccgaggtcggggcgggcaagggggaaggcgtcgacgcgctcgtcgtcgcgggcgacgtggccgagacaagggacaacttcgcgcgcaccatggagatgctcagggatggattcgccgccgtcttctacgtgccggggaaccacgacctctggctgcgccgcgagggcggccgctactgagctgggtgtggatacaggcccaagaacgataggtgacttgggaatcataccattgttctcatggtatcacaagagctttgacaaggagaaggatgttagcagtgtgcgtgttccgtcgctagaaatggcttgtaaagactttcatgcttgccaatggccttcagacctgacaaatgatgatgaggctcttgctctttactttgacaagttgaatgacaagaatcatgatgctactgaagaagtgaaaagtagcagcaaacagatattaacattttcacacttcgtaccaaggcaagagttgtgtccagagaaacgtatgctttattacccataccttcctaaggtaattggatctgattttttggaaaggaggctgagagatatacacagcaacagaaaagacggaggagcttgccatgtttttgggcacactcatttctgttgggattccgtggttgatgagatcaggtatgtgcaagcccctctggcatacccccgagaaagaaaacgtcggatgaacggcgaaggttggctgccattttgtgtataccgtgacggtttcaacccagaaatatatccggcattgtggtcagactactacaacaagaacaaaagggaacccgagaacactcagctcgcgccttgggttgccagccatttcgcgaggtaccacaagttccactgaccctttctaagttccctggctttttgccgaagtggatgcagttcgtctgttcaggatggtgttgaaacctgcatttacctgggaaaaggagatattgacgttttacctgtacacgatctttttcttgtttccactcttaccataacttttgggcaaagtaagcgctagcatctgttttgtactagtatgttgcacagatctgaataatgtgcataagattcttcaaagccttgctgcagtgcagaaatagtgaaattcttcatcccttttaaattatttagaagtcatttcaattttcttagagagtcaaatcatcttaagtttgac

SEQ ID NO: 53006 - DNA, 1537 bp, Zea Mays
ccatggtctccgttgatctgcggcgtcctgggagttcccgacgaatggacgtttgccagccgatgcttggcaccacgctgagatggacagcgtcgagtacttcaatctttccgacctctgggaacagtactacgagtggagcgcgtacggcgccggagctacggtgcagctcccaggaggggagagagtagttcagtactatgttccatacctgtccgggatgcagctattcaccaacaaggtcctgacggcatccaggagttttggtgaagataatggcatggatttctggagtgatgatgaggacaacgagaagatgtcaagatcgtggagttcgacttctgatgaatcattgttcaactgtgatgtggtatggcccaacaggaagcgtccagggcacttgtcctttgagttctttgaagtaggttcaccttacggaagggtcccgttcattgacaaggtctatgaactatcccagggctttcctggattgacattactgaagagtgctgacctatcgcctgttagctggatgtcagttgcctggtaccctatataccacattccttaccagcgtagcgtgaaggatttatctgcatgcttcttgacttaccatactatttcctcctcgttccaagattacgggctcgagaccatgaccaatgattgttgccatccagttgccgacggcaagcagaatggccacatggataaaaagagtaacaccgtgtcactgcctccattcggcctcgcagcacacaaggtacatggttccctctggaccaaccccatgacaggagatcacagaaagatggacttcctcttcagtgcagcggactcctggttgaagcagcttggagtccagcaccatgacttcaacttcttcatcactcaccccatgtgaaccgctgctctggaacagcttccgaagaaccacatggacgcagtgtgaagctactaatgttacttacaccaccaacgacggtagcaaaacgttcacagtacagtccgttggtaaagtaagtctaacaatcgcagggtagatttatacttgagtttactgcagcgaataccaaacatgtcggcagtcggcactcaaaaggttttctgtttcttgtttcttggcagaaagatgtaacagatctgtacagaagttttgcaactaatttggtatccattgtggggttgggtatttggatccatattgtagctgttgcttgtgaacattagggctagtttgggagccagaaaaccgtagaggattggtgcggctaaaatcctcttttattcaattttaaataacaaggggattttagaccctataatcctgatttctgtctgccattgtcaacttcattttcctaatagatttatattttttaaaggaaaatgaactaatttttcttcgggaaattgaaatcactcgaggaaaggttgccaaactagcccttagtgtcctagagaatgttagtcctgctttacgcagctgaatctgttgacgacaatttcattctcttctgcagtaaggcagttgtac

SEQ ID NO: 53007 - DNA, 553 bp, Zea Mays
attttctgctaggcatatcgacagtaggatcatcggaaggggcaaaaggtggaggattattggcagtacttgtatctctcaaagtcctagttctaagcctcgaagcaatctctgtgagggctcctcttgcaatagctggaggccctgcaacctgaaagcttggaacaaatatacaggtacaacaaaagttaacaaataaatggtctagataataaaaacatatagaaatatgttgatgctgttagcaaatattaagtcacctgcacaagttcatcaccaaaagacaagtattttggtttatctgccttcgagtaaactcgaatttcagccccagttcgtcttctcatttcagtaatcacctgcccaccttccccaagaatacagccaactttgtttgatggtacaacaagccttgtacttgaatggtgtttctcagaggatgcacttactttatcgtggagcaaaatgagtgcctcaattgttggggatattggttcagttggtatctggatgaatgaaaaggagataaaattgtgagtattggtgcaagaaa

SEQ ID NO: 53008 - DNA, 2040 bp, Zea Mays
gcggcaggtattcactggatcttcatgagaaagaagaaattgctgaggaaattgcacgtttaaagattggtatgagtgccttggcagatgctaagaagactacgaagggagttgctgcccaacttctggattccgtcaacaagctggaaagtaacatgaaaaccaacttggaaagggctatgaaggagaatgatcgtgtttacttgatgcgggttccagctgctggttccttgggtgccctccctgcagcgtcccttgtaaaacctacctctttggctgaagttttagatgccagcaaggaaaggcttttttcatcacttgtgcctgatggcagcatgaaagcactttctaagtacacagagatggtagataatagtatccggacccaggctgagaaattgcagcaagctagtgagatcactagagtcaggctgaaggaaatggacttaccagattctattctttcattggaaggaaatataaccttgcccatggatctgaaggaagacgtagaggctgtgcagataagcggtggccctgctggcttagaatctgagttgcagcaacttagggatttgagcagggtcaatcaggaactacttgtccagactgaagagcttctacagaaggaggcgaatgaagacgctcaatttcgtacacaatttgggagtcgttggactagacctcaatcaagcaccctaacaaagaatattcaggatagattgaatctgtttgcttctaatttgaagagagctgctgatagtgattctctgattgaacgaggcgtgaaggagaactattcattgatgtctatccttgacaaaaggccgatagagtctgcacttccaagtatttccaggcctatcatgtccttggatggaaatgaagatgccattgttggagccctgaaacaaagcttgagacaactggagtctcttggcgcacaaagggcaggtcttgaagacatgctcaaagaaatgaaaagaaaggatgatatattgcctaagttgatggttggcgtgggatcacatgatgatcttttcaagaaggagattgctaagtatgatcctatatgtgctgatattgctgataacattgtggcacaggaacaattgttgctacaaatacaggcacaaaacgagcaatttgctgctgtattcaacctagaggattacaaagctgcccgtgagagatgttacaagcaaatcgctgctgctgttgtgaaataccaggagtttaaaaagaacatcaacgagggcctaaacttttatgtgactttacaggaagcaattggcaaaataaaacagcagtgcagcgacttcataatgacccgaaacattcagtgccgtgaaatgatggaagatgtgcagaggaagctacccggcttcagattctcgtcgtccagccgctcctctatgcagaggaatgctgcttctgtgccacctgacgagagcagcccatcaccgccaccgccgcatgcccaggctccctatgcctctccaccaggggtagactcgaggcatggatattctcaaccggaggcaagacctgcatactcgcagccataccccccatcctatggggcgacaccgcaacagccgacgtatggtgcacaacaccccgggcagtaccagccgcctcctggccatgactgcggtcagccggcatatcctggatggcgcgggccatacccatactacaatgccccccagccgcagcaatctgtgccttgtccacaggcgccgtacaatgccactggggcttaccctccgcaccagagcaactattaccgacctcaataagtgctgcaactatttcttattattttgcttcttttttttccattgggtcttaccattctggtgtactactactgcatacgagagagttcgggtagtgtaatagcaggtatagctttgtatgatttagtggcggacccagaaagacccggtccgaagcgaccataaactataatatagtagcatataaaaaattgtacggcgaaacaatgttgtcatagatattaaagatgacatacaa

SEQ ID NO: 53009 - DNA, 102 bp, Zea Mays
acccaaacaaaacgagctcggcactaggaccgattttccgccagagggacgcgtacggaggcagtggtcggtggtgcggtgagtgtggtgatgcaattgtag

SEQ ID NO: 53010 - DNA, 194 bp, Zea Mays
cgaacgatgaaacagtcacaggaacggggaaatgcagttcctcataagatgcagcaaatcgctctcaaacgccaaacatcaggctgaacttggtggcgagggggacggatatgatggcaactcccagcgcgacaccgaagatacggtgcgagatagagaaagtagcgctgaactgtggcttcttcagaggaaga

SEQ ID NO: 53011 - DNA, 2032 bp, Zea Mays
gaaggcgttcctcggttttgaatttctttggtaggagcaatgaatcctagctggccagagaaaccactggggttattgtctctgctggatgaggaatctactttccccaatgccacagatcttacttttgcaaacaagcttaagcaacatcttaactcgaattcttgcttcagaggagaaagagacaagggatttgctgtccgtcactatgcaggagaggtggcttatgatacttcgggttttctggagaagaatagagatttattgcacatggactcgattcagctccttgccaaatgcaaaacttttctgccaaaaatgtttgcatctaagatgttagttcaaccagatgattctatgtctgttccatatagatctagtgctgctgattctcaaaaactaagtgttgccatgaagttcaagggtcaactgttccaacttatgcaaagactggaaagtacaacaccacactttattcgttgcattaaaccaaataatttacaacttcctgcaatttatgaacaaggacttgtgcttcaacaacttaaatgctgtggggttctcgaggttgtccggatttcaagatctgggtatccaacaagaatgactcaccagaagtttgctcggcggatgttgcatctcaagatccactcagtgtttcagttgcaattcttcatcagttcaacattttacctgagatgtatcaagttggctacacaaagttgttcttccgaactggacagattggcaaacttgaagatactcggaatcgtactctacacggtattctaagggttcaaagctgtttcagggggcatcaagcccgtcatcatgcgagagaacgaataagaggagttttggctcttcaaacattcattcgtggtgagaaagcacggcaaatttattcctctttgttgaggaaacatagagcagcagttattttgcagagtaacttgagatgttggcttgcaagaaggtatttcataaatgtccggaaggcctcagtgataatacagtctggtattcgtggcagtcttgttcgaagatgtaatggcaatattgatctaataaacgtgctaagagagtttgaatcaaaacaggaggcagagggtgaccaaattttgatcaaggcatcagtcctggccgagttacagaggcggatactaaaagccgaggccacagtacgtgaaaaggaggaagagaatgagacgcttcatcagcggcttcagcaatatgaaaaccgctggttagagtacgagcagaaaatgaaagctatggaggaaatgtggcagaagcaaatgcgttcgttgcagtcgagcctttccgtagcaaagaagagtcttgctctgcatgagacacctaggatgtcggactcatcagtggatcagagctgggaaagcaacgggaaccatgtcagcagcgggtctcagctggtgccacgcactggtgggcgcgaaatgagcgctggcctgagcgtcatcggccgcctagcagaagaattcgaacagcggagccaggtttttgctgatgacgccaagttcctggttgaggtcaagtccgggcaggcggatgccagcctaaacccagacatggagctccggaggctgaagcacaacttcgactcgtggaagaaagatttcagtggccgaataagggagacaaagatgatcctgaacaagctcgggaacggcaacgagtcatcgcccaactccgtgaagcggaaatggtggggcaggctgaacacctccaagttttcgtgagtttgttatgtatactgattggtaattcgtagatgtaccggtattttacacgccggtgtggttctagcttcctagagtttctattctacggggtgtcgtgacttgtgaaagtcgagtgtgttgggctggagttgtgttccgtggagggcgagttgtatagttcttccacaatggcttcctttgaggggggtcaaggactactgaattgtgatgtaattacttgctgaagtagttgtcgaagcgggaagattgtgacatcgctcactattcca

SEQ ID NO: 53012 - DNA, 2489 bp, Zea Mays
gtagatactccttttcagaatctgcccacccaaggtcgagccttggtgtttctagcttcaaaaatggttgcagaacttcttggctgcagtattgaagatctcaatttagctttgacaaagcgccacatgaaagtaaataatgaaaacattgtccagaaacttacccttgctcaggcaactgacacaagagatgctctggccaaatcattgtatgccagtttgtttgaatggcttgtagaacaaattaataagtctctctcagttggcaagcgtcgaactgggagatctatcagtattcttgatatctatggctttgaatcatttgataagaacagttttgaacagttctgcatcaattatgctaatgaaaggttgcaacaacatttcaatcgtcatttatttaagcttgagcaagaggaatatgtggaggatggcatcgactgggcaaaggtcgactttgaggataatcaagattgtttgagtctatttgagaaaaaaccactggggttattgtctctgctggatgaggaatctactttccccaatgccacagatcttacttttgcaaacaagcttaagcaacatcttaactcgaattcttgcttcagaggagaaagagacaagggatttgctgtccgtcactatgcaggagaggtggcttatgatacttcgggttttctggagaagaatagagatttattgcacatggactcgattcagctccttgccaaatgcaaaacttttctgccaaaaatgtttgcatctaagatgttagttcaaccagatgattctatgtctgttccatatagatctagtgctgctgattctcaaaaactaagtgttgccatgaagttcaagggtcaactgttccaacttatgcaaagactggaaagtacaacaccacactttattcgttgcattaaaccaaataatttacaacttcctgcaatttatgaacaaggacttgtgcttcaacaacttaaatgctgtggggttctcgaggttgtccggatttcaagatctgggtatccaacaagaatgactcaccagaagtttgctcggcggtatggctttcttcttcttgaggatgttgcatctcaagatccactcagtgtttcagttgcaattcttcatcagttcaacattttacctgagatgtatcaagttggctacacaaagttgttcttccgaactggacagattggcaaacttgaagatactcggaatcgtactctacacggtattctaagggttcaaagctgtttcagggggcatcaagcccgtcatcatgcgagagaacgaataagaggagttttggctcttcaaacattcattcgtggtgagaaagcacggcaaatttattcctctttgttgaggaaacatagagcagcagttattttgcagagtaacttgagatgttggcttgcaagaaggtatttcataaatgtccggaaggcctcagtgataatacagtctggtattcgtggcagtcttgttcgaagatgtaatggcaatattgatctaataaacgtgctaagagagtttgaatcaaaacaggaggcagagggtgaccaaattttgatcaaggcatcagtcctggccgagttacagaggcggatactaaaagccgaggccacagtacgtgaaaaggaggaagagaatgagacgcttcatcagcggcttcagcaatatgaaaaccgctggttagagtacgagcagaaaatgaaagctatggaggaaatgtggcagaagcaaatgcgttcgttgcagtcgagcctttccgtagcaaagaagagtcttgctctgcatgagacacctaggatgtcggactcatcagtggatcagagctgggaaagcaacgggaaccatgtcagcagcgggtctcagctggtgccacgcactggtgggcgcgaaatgagcgctggcctgagcgtcatcggccgcctagcagaagaattcgaacagcggagccaggtttttgctgatgacgccaagttcctggttgaggtcaagtccgggcaggcggatgccagcctaaacccagacatggagctccggaggctgaagcacaacttcgactcgtggaagaaagatttcagtggccgaataagggagacaaagatgatcctgaacaagctcgggaacggcaacgagtcatcgcccaactccgtgaagcggaaatggtggggcaggctgaacacctccaagttttcgtgagtttgttatgtatactgattggtaattcgtagatgtaccggtattttacacgccggtgtggttctagcttcctagagtttctattctacggggtgtcgtgacttgtgaaagtcgagtgtgttgggctggagttgtgttccgtggagggcgagttgtatagttcttccacaatggcttcctttgaggggggtcaaggactactgaattgtgatgtaattacttgctgaagtagttgtcgaagcgggaagattgtgacatcgctcactattcca

SEQ ID NO: 53013 - DNA, 3798 bp, Zea Mays
aatccacggccctgcgggcgcgcggcgggcccagcaagctgcagtcggcgcggtcgatgccgctcgactacaggtactcggacggtccctcggcggcgaacggcgccggtggcgggccggctgggaacggcgtcgggcgccgggcggttgcggtggaggcagggaaggaggagaaggaaggtgaagtggtgcggttggagggggacgacgcggactctccgtacagctccaatgtggtgacagcggaggaggaggcggggaatacaggtggaggaggagacgaggtggattcggcggccgcggcgacgccaaggcggttgtcgccaagggcagcagcgagccccacgcaagtcgacgcccggtggggtgacaccagctcgtacggcgctaagaagaagcatagagtgttttgtcagcttcgaaatggtgattgggcattatgcacagtacttgcaacctccggtgacgagtctgttctaaaggtttctgaagggaaagtactgagattgaaaacagagagccttcaacctgcaaatcctgaaattcttgatggagtggatgaccttatgcagctaagttatctaagtgaaccatcagtgctgtacaatctgcagtacagatactcccaggacatgatttatactaaagcaggtccagttttggtggctgtcaatcctttcaagaaagtttctctgtatggtaacgagtacattgatgcatatagaaataaatcaatggatagtccacatgtttatgcaatagcagatgcagcactttgtgaaatgaaaagagatgaagtcaaccaatctataattataagtggtgagagtggcgcaggaaaaacagaaactgcgaaaattgctatgcagtatctggcttctcttggaggtggaagtggcattgaatacgaaattcttcagaccaatccaatactcgaggcttttggcaatgcaaagacattgagaaatgataactcaagtcgttttcttatcgaaattcatttcagtaccactggaagaatatgtggtgccatgattcaaacatttttgcttgagaagtccagagttgtgcaatgtgcagttggtgaacgatcgtaccatatattttatcagctgtgtgctggtgcacctgcatctctaagagagaagttgaatttgaaaaaggtagatgagtacaaatatcttaaacagagctgttgctattcaattgcgggcgtggatgatgcccaaatgtttcgaactgtgacggaagctatggacatcgttcatatcagcaaagaggaccaagagaatgtttttgcaatggtctctgctgttctatggctgggggatgtctcgttcacagtaattgacaatgaaaatcatgttgaaatcattgcggatgaagcttcaaaaatggttgcagaacttcttggctgcagtattgaagatctcaatttagctttgacaaagcgccacatgaaagtaaataatgaaaacattgtccagaaacttacccttgctcaggcaactgacacaagagatgctctggccaaatcattgtatgccagtttgtttgaatggcttgtagaacaaattaataagtctctctcagttggcaagcgtcgaactgggagatctatcagtattcttgatatctatggctttgaatcatttgataagaacagttttgaacagttctgcatcaattatgctaatgaaaggttgcaacaacatttcaatcgtcatttatttaagcttgagcaagaggaatatgtggaggatggcatcgactgggcaaaggtcgactttgaggataatcaagattgtttgagtctatttgagaaaaaaccactggggttattgtctctgctggatgaggaatctactttccccaatgccacagatcttacttttgcaaacaagcttaagcaacatcttaactcgaattcttgcttcagaggagaaagagacaagggatttgctgtccgtcactatgcaggagaggtggcttatgatacttcgggttttctggagaagaatagagatttattgcacatggactcgattcagctccttgccaaatgcaaaacttttctgccaaaaatgtttgcatctaagatgttagttcaaccagatgattctatgtctgttccatatagatctagtgctgctgattctcaaaaactaagtgttgccatgaagttcaagggtcaactgttccaacttatgcaaagactggaaagtacaacaccacactttattcgttgcattaaaccaaataatttacaacttcctgcaatttatgaacaaggacttgtgcttcaacaacttaaatgctgtggggttctcgaggttgtccggatttcaagatctgggtatccaacaagaatgactcaccagaagtttgctcggcggatgttgcatctcaagatccactcagtgtttcagttgcaattcttcatcagttcaacattttacctgagatgtatcaagttggctacacaaagttgttcttccgaactggacagattggcaaacttgaagatactcggaatcgtactctacacggtattctaagggttcaaagctgtttcagggggcatcaagcccgtcatcatgcgagagaacgaataagaggagttttggctcttcaaacattcattcgtggtgagaaagcacggcaaatttattcctctttgttgaggaaacatagagcagcagttattttgcagagtaacttgagatgttggcttgcaagaaggtatttcataaatgtccggaaggcctcagtgataatacagtctggtattcgtggcagtcttgttcgaagatgtaatggcaatattgatctaataaacgtgctaagagagtttgaatcaaaacaggaggcagagggtgaccaaattttgatcaaggcatcagtcctggccgagttacagaggcggatactaaaagccgaggccacagtacgtgaaaaggaggaagagaatgagacgcttcatcagcggcttcagcaatatgaaaaccgctggttagagtacgagcagaaaatgaaagctatggaggaaatgtggcagaagcaaatgcgttcgttgcagtcgagcctttccgtagcaaagaagagtcttgctctgcatgagacacctaggatgtcggactcatcagtggatcagagctgggaaagcaacgggaaccatgtcagcagcgggtctcagctggtgccacgcactggtgggcgcgaaatgagcgctggcctgagcgtcatcggccgcctagcagaagaattcgaacagcggagccaggtttttgctgatgacgccaagttcctggttgaggtcaagtccgggcaggcggatgccagcctaaacccagacatggagctccggaggctgaagcacaacttcgactcgtggaagaaagatttcagtggccgaataagggagacaaagatgatcctgaacaagctcgggaacggcaacgagtcatcgcccaactccgtgaagcggaaatggtggggcaggctgaacacctccaagttttcgtgagtttgttatgtatactgattggtaattcgtagatgtaccggtattttacacgccggtgtggttctagcttcctagagtttctattctacggggtgtcgtgacttgtgaaagtcgagtgtgttgggctggagttgtgttccgtggagggcgagttgtatagttcttccacaatggcttcctttgaggggggtcaaggactactgaattgtgatgtaattacttgctgaagtagttgtcgaagcgggaagattgtgacatcgctcactattcca

SEQ ID NO: 53014 - DNA, 4242 bp, Zea Mays
gtattaaattgttttatctctcccgagccagcccgttgctggctgcttgcttctcgcagagacagggagtgagtgaggcagaggaggcgtacctgcggaggcgggcagccgaggcccgcgcaattcgcgtccagcagggtgggtcgggctcgcggcgcctctattggcattcccgcggttgtgcgggcgggttggcggccagcgagatcggctgttgtttctggcggtttttgtgaggtgtttagtgttttgctgggtgtgactgtgagcgtggattggcgactgctggaggggtttggggatcgatttgaggtcgtcggagcggagatcccgaggggacctgcggtttcgttgtggcccgtgagttggattccggacgcagtgccgtccggcgggccgccgagacgatggcgtcggtggaggtgaggtcggtgcggaaatccacggccctgcgggcgcgcggcgggcccagcaagctgcagtcggcgcggtcgatgccgctcgactacaggtactcggacggtccctcggcggcgaacggcgccggtggcgggccggctgggaacggcgtcgggcgccgggcggttgcggtggaggcagggaaggaggagaaggaaggtgaagtggtgcggttggagggggacgacgcggactctccgtacagctccaatgtggtgacagcggaggaggaggcggggaatacaggtggaggaggagacgaggtggattcggcggccgcggcgacgccaaggcggttgtcgccaagggcagcagcgagccccacgcaagtcgacgcccggtggggtgacaccagctcgtacggcgctaagaagaagcatagagtgttttgtcagcttcgaaatggtgattgggcattatgcacagtacttgcaacctccggtgacgagtctgttctaaaggtttctgaagggaaagtactgagattgaaaacagagagccttcaacctgcaaatcctgaaattcttgatggagtggatgaccttatgcagctaagttatctaagtgaaccatcagtgctgtacaatctgcagtacagatactcccaggacatgatttatactaaagcaggtccagttttggtggctgtcaatcctttcaagaaagtttctctgtatggtaacgagtacattgatgcatatagaaataaatcaatggatagtccacatgtttatgcaatagcagatgcagcactttgtgaaatgaaaagagatgaagtcaaccaatctataattataagtggtgagagtggcgcaggaaaaacagaaactgcgaaaattgctatgcagtatctggcttctcttggaggtggaagtggcattgaatacgaaattcttcagaccaatccaatactcgaggcttttggcaatgcaaagacattgagaaatgataactcaagtcgttttggaaagcttatcgaaattcatttcagtaccactggaagaatatgtggtgccatgattcaaacatttttgcttgagaagtccagagttgtgcaatgtgcagttggtgaacgatcgtaccatatattttatcagctgtgtgctggtgcacctgcatctctaagagagaagttgaatttgaaaaaggtagatgagtacaaatatcttaaacagagctgttgctattcaattgcgggcgtggatgatgcccaaatgtttcgaactgtgacggaagctatggacatcgttcatatcagcaaagaggaccaagagaatgtttttgcaatggtctctgctgttctatggctgggggatgtctcgttcacagtaattgacaatgaaaatcatgttgaaatcattgcggatgaagcttcaaaaatggttgcagaacttcttggctgcagtattgaagatctcaatttagctttgacaaagcgccacatgaaagtaaataatgaaaacattgtccagaaacttacccttgctcaggcaactgacacaagagatgctctggccaaatcattgtatgccagtttgtttgaatggcttgtagaacaaattaataagtctctctcagttggcaagcgtcgaactgggagatctatcagtattcttgatatctatggctttgaatcatttgataagaacagttttgaacagttctgcatcaattatgctaatgaaaggttgcaacaacatttcaatcgtcatttatttaagcttgagcaagaggaatatgtggaggatggcatcgactgggcaaaggtcgactttgaggataatcaagattgtttgagtctatttgagaaaaaaccactggggttattgtctctgctggatgaggaatctactttccccaatgccacagatcttacttttgcaaacaagcttaagcaacatcttaactcgaattcttgcttcagaggagaaagagacaagggatttgctgtccgtcactatgcaggagaggtggcttatgatacttcgggttttctggagaagaatagagatttattgcacatggactcgattcagctccttgccaaatgcaaaacttttctgccaaaaatgtttgcatctaagatgttagttcaaccagatgattctatgtctgttccatatagatctagtgctgctgattctcaaaaactaagtgttgccatgaagttcaagggtcaactgttccaacttatgcaaagactggaaagtacaacaccacactttattcgttgcattaaaccaaataatttacaacttcctgcaatttatgaacaaggacttgtgcttcaacaacttaaatgctgtggggttctcgaggttgtccggatttcaagatctgggtatccaacaagaatgactcaccagaagtttgctcggcggatgttgcatctcaagatccactcagtgtttcagttgcaattcttcatcagttcaacattttacctgagatgtatcaagttggctacacaaagttgttcttccgaactggacagattggcaaacttgaagatactcggaatcgtactctacacggtattctaagggttcaaagctgtttcagggggcatcaagcccgtcatcatgcgagagaacgaataagaggagttttggctcttcaaacattcattcgtggtgagaaagcacggcaaatttattcctctttgttgaggaaacatagagcagcagttattttgcagagtaacttgagatgttggcttgcaagaaggtatttcataaatgtccggaaggcctcagtgataatacagtctggtattcgtggcagtcttgttcgaagatgtaatggcaatattgatctaataaacgtgctaagagagtttgaatcaaaacaggaggcagagggtgaccaaattttgatcaaggcatcagtcctggccgagttacagaggcggatactaaaagccgaggccacagtacgtgaaaaggaggaagagaatgagacgcttcatcagcggcttcagcaatatgaaaaccgctggttagagtacgagcagaaaatgaaagctatggaggaaatgtggcagaagcaaatgcgttcgttgcagtcgagcctttccgtagcaaagaagagtcttgctctgcatgagacacctaggatgtcggactcatcagtggatcagagctgggaaagcaacgggaaccatgtcagcagcgggtctcagctggtgccacgcactggtgggcgcgaaatgagcgctggcctgagcgtcatcggccgcctagcagaagaattcgaacagcggagccaggtttttgctgatgacgccaagttcctggttgaggtcaagtccgggcaggcggatgccagcctaaacccagacatggagctccggaggctgaagcacaacttcgactcgtggaagaaagatttcagtggccgaataagggagacaaagatgatcctgaacaagctcgggaacggcaacgagtcatcgcccaactccgtgaagcggaaatggtggggcaggctgaacacctccaagttttcgtgagtttgttatgtatactgattggtaattcgtagatgtaccggtattttacacgccggtgtggttctagcttcctagagtttctattctacggggtgtcgtgacttgtgaaagtcgagtgtgttgggctggagttgtgttccgtggagggcgagttgtatagttcttccacaatggcttcctttgaggggggtcaaggactactgaattgtgatgtaattacttgctgaagtagttgtcgaagcgggaagattgtgacatcgctcactattcca

SEQ ID NO: 53015 - DNA, 4241 bp, Zea Mays
gtattaaattgttttatctctcccgagccagcccgttgctggctgcttgcttctcgcagagacagggagtgagtgaggcagaggaggcgtacctgcggaggcgggcagccgaggcccgcgcaattcgcgtccagcagggtgggtcgggctcgcggcgcctctattggcattcccgcggttgtgcgggcgggttggcggccagcgagatcggctgttgtttctggcggtttttgtgaggtgtttagtgttttgctgggtgtgactgtgagcgtggattggcgactgctggaggggtttggggatcgatttgaggtcgtcggagcggagatcccgaggggacctgcggtttcgttgtggcccgtgagttggattccggacgcagtgccgtccggcgggccgccgagacgatggcgtcggtggaggtgaggtcggtgcggaaatccacggccctgcgggcgcgcggcgggcccagcaagctgcagtcggcgcggtcgatgccgctcgactacaggtactcggacggtccctcggcggcgaacggcgccggtggcgggccggctgggaacggcgtcgggcgccgggcggttgcggtggaggcagggaaggaggagaaggaaggtgaagtggtgcggttggagggggacgacgcggactctccgtacagctccaatgtggtgacagcggaggaggaggcggggaatacaggtggaggaggagacgaggtggattcggcggccgcggcgacgccaaggcggttgtcgccaagggcagcagcgagccccacgcaagtcgacgcccggtggggtgacaccagctcgtacggcgctaagaagaagcatagagtgttttgtcagcttcgaaatggtgattgggcattatgcacagtacttgcaacctccggtgacgagtctgttctaaaggtttctgaagggaaagtactgagattgaaaacagagagccttcaacctgcaaatcctgaaattcttgatggagtggatgaccttatgcagctaagttatctaagtgaaccatcagtgctgtacaatctgcagtacagatactcccaggacatgatttatactaaagcaggtccagttttggtggctgtcaatcctttcaagaaagtttctctgtatggtaacgagtacattgatgcatatagaaataaatcaatggatagtccacatgtttatgcaatagcagatgcagcactttgtgaaatgaaaagagatgaagtcaaccaatctataattataagtggtgagagtggcgcaggaaaaacagaaactgcgaaaattgctatgcagtatctggcttctcttggaggtggaagtggcattgaatacgaaattcttcagaccaatccaatactcgaggcttttggcaatgcaaagacattgagaaatgataactcaagtcgttttggaaagcttatcgaaattcatttcagtaccactggaagaatatgtggtgccatgattcaaacatttttgcttgagaagtccagagttgtgcaatgtgcagttggtgaacgatcgtaccatatattttatcagctgtgtgctggtgcacctgcatctctaagagagaagttgaatttgaaaaaggtagatgagtacaaatatcttaaacagagctgttgctattcaattgcgggcgtggatgatgcccaaatgtttcgaactgtgacggaagctatggacatcgttcatatcagcaaagaggaccaagagaatgtttttgcaatggtctctgctgttctatggctgggggatgtctcgttcacagtaattgacaatgaaaatcatgttgaaatcattgcggatgaagcttcaaaaatggttgcagaacttcttggctgcagtattgaagatctcaatttagctttgacaaagcgccacatgaaagtaaataatgaaaacattgtccagaaacttacccttgctcaggcaactgacacaagagatgctctggccaaatcattgtatgccagtttgtttgaatggcttgtagaacaaattaataagtctctctcagttggcaagcgtcgaactgggagatctatcagtattcttgatatctatggctttgaatcatttgaaagaacagttttgaacagttctgcatcaattatgctaatgaaaggttgcaacaacatttcaatcgtcatttatttaagcttgagcaagaggaatatgtggaggatggcatcgactgggcaaaggtcgactttgaggataatcaagattgtttgagtctatttgagaaaaaaccactggggttattgtctctgctggatgaggaatctactttccccaatgccacagatcttacttttgcaaacaagcttaagcaacatcttaactcgaattcttgcttcagaggagaaagagacaagggatttgctgtccgtcactatgcaggagaggtggcttatgatacttcgggttttctggagaagaatagagatttattgcacatggactcgattcagctccttgccaaatgcaaaacttttctgccaaaaatgtttgcatctaagatgttagttcaaccagatgattctatgtctgttccatatagatctagtgctgctgattctcaaaaactaagtgttgccatgaagttcaagggtcaactgttccaacttatgcaaagactggaaagtacaacaccacactttattcgttgcattaaaccaaataatttacaacttcctgcaatttatgaacaaggacttgtgcttcaacaacttaaatgctgtggggttctcgaggttgtccggatttcaagatctgggtatccaacaagaatgactcaccagaagtttgctcggcggatgttgcatctcaagatccactcagtgtttcagttgcaattcttcatcagttcaacattttacctgagatgtatcaagttggctacacaaagttgttcttccgaactggacagattggcaaacttgaagatactcggaatcgtactctacacggtattctaagggttcaaagctgtttcagggggcatcaagcccgtcatcatgcgagagaacgaataagaggagttttggctcttcaaacattcattcgtggtgagaaagcacggcaaatttattcctctttgttgaggaaacatagagcagcagttattttgcagagtaacttgagatgttggcttgcaagaaggtatttcataaatgtccggaaggcctcagtgataatacagtctggtattcgtggcagtcttgttcgaagatgtaatggcaatattgatctaataaacgtgctaagagagtttgaatcaaaacaggaggcagagggtgaccaaattttgatcaaggcatcagtcctggccgagttacagaggcggatactaaaagccgaggccacagtacgtgaaaaggaggaagagaatgagacgcttcatcagcggcttcagcaatatgaaaaccgctggttagagtacgagcagaaaatgaaagctatggaggaaatgtggcagaagcaaatgcgttcgttgcagtcgagcctttccgtagcaaagaagagtcttgctctgcatgagacacctaggatgtcggactcatcagtggatcagagctgggaaagcaacgggaaccatgtcagcagcgggtctcagctggtgccacgcactggtgggcgcgaaatgagcgctggcctgagcgtcatcggccgcctagcagaagaattcgaacagcggagccaggtttttgctgatgacgccaagttcctggttgaggtcaagtccgggcaggcggatgccagcctaaacccagacatggagctccggaggctgaagcacaacttcgactcgtggaagaaagatttcagtggccgaataagggagacaaagatgatcctgaacaagctcgggaacggcaacgagtcatcgcccaactccgtgaagcggaaatggtggggcaggctgaacacctccaagttttcgtgagtttgttatgtatactgattggtaattcgtagatgtaccggtattttacacgccggtgtggttctagcttcctagagtttctattctacggggtgtcgtgacttgtgaaagtcgagtgtgttgggctggagttgtgttccgtggagggcgagttgtatagttcttccacaatggcttcctttgaggggggtcaaggactactgaattgtgatgtaattacttgctgaagtagttgtcgaagcgggaagattgtgacatcgctcactattcca

SEQ ID NO: 53016 - DNA, 4512 bp, Zea Mays
gtattaaattgttttatctctcccgagccagcccgttgctggctgcttgcttctcgcagagacagggagtgagtgaggcagaggaggcgtacctgcggaggcgggcagccgaggcccgcgcaattcgcgtccagcagggtgggtcgggctcgcggcgcctctattggcattcccgcggttgtgcgggcgggttggcggccagcgagatcggctgttgtttctggcggtttttgtgaggtgtttagtgttttgctgggtgtgactgtgagcgtggattggcgactgctggaggggtttggggatcgatttgaggtcgtcggagcggagatcccgaggggacctgcggtttcgttgtggcccgtgagttggattccggacgcagtgccgtccggcgggccgccgagacgatggcgtcggtggaggtgaggtcggtgcggaaatccacggccctgcgggcgcgcggcgggcccagcaagctgcagtcggcgcggtcgatgccgctcgactacaggtactcggacggtccctcggcggcgaacggcgccggtggcgggccggctgggaacggcgtcgggcgccgggcggttgcggtggaggcagggaaggaggagaaggaaggtgaagtggtgcggttggagggggacgacgcggactctccgtacagctccaatgtggtgacagcggaggaggaggcggggaatacaggtggaggaggagacgaggtggattcggcggccgcggcgacgccaaggcggttgtcgccaagggcagcagcgagccccacgcaagtcgacgcccggtggggtgacaccagctcgtacggcgctaagaagaagcatagagtgttttgtcagcttcgaaatggtgattgggcattatgcacagtacttgcaacctccggtgacgagtctgttctaaaggtttctgaagggaaagtactgagattgaaaacagagagccttcaacctgcaaatcctgaaattcttgatggagtggatgaccttatgcagctaagttatctaagtgaaccatcagtgctgtacaatctgcagtacagatactcccaggacatgatttatactaaagcaggtccagttttggtggctgtcaatcctttcaagaaagtttctctgtatggtaacgagtacattgatgcatatagaaataaatcaatggatagtccacatgtttatgcaatagcagatgcagcactttgtgaaatgaaaagagatgaagtcaaccaatctataattataagtggtgagagtggcgcaggaaaaacagaaactgcgaaaattgctatgcagtatctggcttctcttggaggtggaagtggcattgaatacgaaattcttcagaccaatccaatactcgaggcttttggcaatgcaaagacattgagaaatgataactcaagtcgttttgtaagttttatttattcgtgtgtgttcactatactacagcttcgaatgaagatcaatctttattctcaattgcagggaaagcttatcgaaattcatttcagtaccactggaagaatatgtggtgccatgattcaaacatttttgcttgagaagtccagagttgtgcaatgtgcagttggtgaacgatcgtaccatatattttatcagctgtgtgctggtgcacctgcatctctaagagagaagttgaatttgaaaaaggtagatgagtacaaatatcttaaacagagctgttgctattcaattgcgggcgtggatgatgcccaaatgtttcgaactgtgacggaagctatggacatcgttcatatcagcaaagaggaccaagagaatgtttttgcaatggtctctgctgttctatggctgggggatgtctcgttcacagtaattgacaatgaaaatcatgttgaaatcattgcggatgaagcttcaaaaatggttgcagaacttcttggctgcagtattgaagatctcaatttagctttgacaaagcgccacatgaaagtaaataatgaaaacattgtccagaaacttacccttgctcaggcaactgacacaagagatgctctggccaaatcattgtatgccagtttgtttgaatggcttgtagaacaaattaataagtctctctcagttggcaagcgtcgaactgggagatctatcagtattcttgatatctatggctttgaatcatttgataagaacagttttgaacagttctgcatcaattatgctaatgaaaggttgcaacaacatttcaatcgtcatttatttaagcttgagcaagaggaatatgtggaggatggcatcgactgggcaaaggtcgactttgaggataatcaagattgtttgagtctatttgagaaagtatgagccattacattctgttcactgatatcacttgctaacaataatatgggtccacaagttctggagattcattatttagcatttagcaatccttttcccccacaatcatggttgaagctggaaggcgttcctcggttttgaatttctttggtaggagcaatgaatcctagctggccagaggttcgaacctggaaaccactggggttattgtctctgctggatgaggaatctactttccccaatgccacagatcttacttttgcaaacaagcttaagcaacatcttaactcgaattcttgcttcagaggagaaagagacaagggatttgctgtccgtcactatgcaggagaggtggcttatgatacttcgggttttctggagaagaatagagatttattgcacatggactcgattcagctccttgccaaatgcaaaacttttctgccaaaaatgtttgcatctaagatgttagttcaaccagatgattctatgtctgttccatatagatctagtgctgctgattctcaaaaactaagtgttgccatgaagttcaagggtcaactgttccaacttatgcaaagactggaaagtacaacaccacactttattcgttgcattaaaccaaataatttacaacttcctgcaatttatgaacaaggacttgtgcttcaacaacttaaatgctgtggggttctcgaggttgtccggatttcaagatctgggtatccaacaagaatgactcaccagaagtttgctcggcggatgttgcatctcaagatccactcagtgtttcagttgcaattcttcatcagttcaacattttacctgagatgtatcaagttggctacacaaagttgttcttccgaactggacagattggcaaacttgaagatactcggaatcgtactctacacggtattctaagggttcaaagctgtttcagggggcatcaagcccgtcatcatgcgagagaacgaataagaggagttttggctcttcaaacattcattcgtggtgagaaagcacggcaaatttattcctctttgttgaggaaacatagagcagcagttattttgcagagtaacttgagatgttggcttgcaagaaggtatttcataaatgtccggaaggcctcagtgataatacagtctggtattcgtggcagtcttgttcgaagatgtaatggcaatattgatctaataaacgtgctaagagagtttgaatcaaaacaggaggcagagggtgaccaaattttgatcaaggcatcagtcctggccgagttacagaggcggatactaaaagccgaggccacagtacgtgaaaaggaggaagagaatgagacgcttcatcagcggcttcagcaatatgaaaaccgctggttagagtacgagcagaaaatgaaagctatggaggaaatgtggcagaagcaaatgcgttcgttgcagtcgagcctttccgtagcaaagaagagtcttgctctgcatgagacacctaggatgtcggactcatcagtggatcagagctgggaaagcaacgggaaccatgtcagcagcgggtctcagctggtgccacgcactggtgggcgcgaaatgagcgctggcctgagcgtcatcggccgcctagcagaagaattcgaacagcggagccaggtttttgctgatgacgccaagttcctggttgaggtcaagtccgggcaggcggatgccagcctaaacccagacatggagctccggaggctgaagcacaacttcgactcgtggaagaaagatttcagtggccgaataagggagacaaagatgatcctgaacaagctcgggaacggcaacgagtcatcgcccaactccgtgaagcggaaatggtggggcaggctgaacacctccaagttttcgtgagtttgttatgtatactgattggtaattcgtagatgtaccggtattttacacgccggtgtggttctagcttcctagagtttctattctacggggtgtcgtgacttgtgaaagtcgagtgtgttgggctggagttgtgttccgtggagggcgagttgtatagttcttccacaatggcttcctttgaggggggtcaaggactactgaattgtgatgtaattacttgctgaagtagttgtcgaagcgggaagattgtgacatcgctcactattcca

SEQ ID NO: 53017 - DNA, 1303 bp, Zea Mays
cgcaaaacacagcactagaaaatcgatgacctaaattccatagagagagcgagagaaaaaaatcccaatccatccaccctcgccgcgagatcgccgggcgccgccatgtcgactccagccgccgcctactacgccgccgccgcgcgcaagcaatacttttgctaccaatgcaaccgcaccgttctcatcgcggcctccgccgccgccgccggggagctctcgtgccccgagtgccacggcgacttcctcgaggaggtcaccgtccctgcccccaccttcatcccgctgcccttcccgttcccctttgcccccaccacgatccccgccgccagcaccaccccggcccccgccccagcagccggctccggtgggtccccttccttatcgtcctcgtcctcttccgccgcgacctccccttcccagcccaacgacatctcctccatcctcaactccttcctgggactaggcgaacaacccatcagggtcggcggctctgcctcgcgcgccgccgccggcacggccacccccgagaacgagcccgagcccttcgacccggtcatgttcttccagaattacatccatagcctcgttgagggaggcgccaacatccaggtcctcctcgacgacgccagcgtcaccctcggctccggacccggcctcgggcgtatcggcggggcaagctttggggattacttcgtcggcccaggcctcgaacaactcatcgagcagctcgccgagaacgaccccaaccgctatggcacgccgccggctgccaaatcggtcctctcctcgctccccgacgtcctcgtgactcatgccatggtcgcagctgcggagggcgctgagtgcgccgtctgcaaggaggatttctcgcctggagaggtggccaagcagatgccctgcaagcacatctaccacactgactgcattgtgccgtggcttgagcttcacaactcgtgccccatctgccgatttgagctgcctactgacgatcctgattacgaggggcggaagggcactaatcctcagccggctgttggtgtggctgctgctgcatctgggagctctactgctgctgagggacagatggaggagaggcaggagaatccaagggtggttgagaggaggttcaatgtgtcgctgccgtggccattcagtggactgggagggcaaacatcgcagcaggatgggaacagtggaggcagtggtagcaactcacaaggaaatgcacaggatggtgacccacccagcaacaagaattgatcacaaatcagctggaggcagaatggtggagcttctttaa

SEQ ID NO: 53018 - DNA, 2299 bp, Zea Mays
ccaaagtttatgtactcgctctggcagatacggcgtttagacgacccagttccggccgccgcggtgctccgagcctccgacggccgctgtggccctgtggcgggcggaagcaccctcgggcactagccttctgtttctcctcttcgcggctgacctgcaaagaatccccgaaaaagagttgaggagagtgtacgagttgggtaaagcagaggaagagatggtctgggtgttggaccccgtcgacacagtgcgcgggattcagaagcgttacatcttcgctgccgggacgtacaaggtcggccgcaaagattgtgatgtcattgttcaaactgacacatctatatcccgagtccatgcggagattgcaattgaaaagatggttgcctgggatccacattctggtgcacctgccagtccatcatttgttcgtgtaatcgaccgatcaaagtatggcacatttgtcaacaaagtacatggaacccagggcagccgtctgcataaagatgaagatatgatgcttactgatggggatgctgtgacgtttggaactggtgcatatgctactcgtaagtggagcaatgaatgtacacatgttcttgttgacggatcatgttcgttgacacctgagctcctcgatgcagttatggcaaagaagcagatcatgttgggagactggtttgaggcaatggctgaaaagaacatacacacagagatcccttcttgtacacaatacattccaaacttgactctagatgggatggtgatcaaaatggtggatatcaacctcattcagaatttcctagaaggctatacttttatcctggggtcatcagataaatatcaatttggtgagaagctccatggattactggaatcaactggagcaaaatacgtgcacattgacgacttttgtgcaaacagccaggactcagcagctggagacactgatcatcaaattcttgtagttcctgcacgatatccattggaattcagcaagatacgtgtgctgtttactttgtcaaagatcagtgatattaagctatttgcagctatattgtctggccgcctggaagcaacttctattgaaccacctgctttcatcgttacatcctcgaattccacggatgccactattgtggcggattcggatgttgaaatggagacagcaacttctaatcctactggtgctgccaacaagtctcaacatcacaccgagaatatctctgacgatgaaaaacaaaccacaaatataaccaacgaagttgcaaggaagggtaacgttattcacccaaaacacccagagagcgttgaagatttgaaaccgatggaggaggatgtgaaggtcatagagaaaacagcaacgtacaggtccacgggtagagacgaggatgctcgcattctaagcaaggcgccaaaggatgaaaaattagacaccagcagggatggggcttctgatgtcatatttagtcagaatctggtcgtcagaagaagcctcccccagtcagctcctgccgcaccagcagaaatcggaggcgttaacttcaagcgcttcaggaagagggaaatggtgtctggaaacagcttcaaggacctcattccgtttgcgcgggaaccatacagagagtcggaccacgaacgtggcagcacgatgaccgatttcatgcgggaggagaagcggcagaaacaaatggaggccattgcggaggatctcttcaacaacgcaaagtccaagaaaagagcagccgctggaagttcgattcacaccctactcaccggccacagatgatgagagccaggcaggcagcaggagatcacctctatatgcgatctgcatgctcatctgttagccacggcgttagaagccgaattagtgtaggacggctgtcggatatggattgtacctgaggtcatgttagatatgaatggttctgagggaaatattagctgtgattttggcattacgcgtcgggcaagtttagcgttagtctagaatttgaccaaacaagaggattttctccggttggatgttgcgagcacgagggttttcttgggttgaatgttgcatggttagttcaccaagggctagtttgacaaccccattttacaacggaacgctacacctacgagattatgatgtttgatgtgttcagcagcctatcactatcagtgaccctcaatcctgttgttaccttgatgccaaacgatacgttcaaccgacgagacaatgtgcgcatccagttctcatggacttgggaggaccgatgatgctttgcctcagcttggcgtgtagctgcaaaac

SEQ ID NO: 53019 - DNA, 2381 bp, Zea Mays
ccaaagtttatgtactcgctctggcagatacggcgtttagacgacccagttccggccgccgcggtgctccgagcctccgacggccgctgtggccctgtggcgggcggaagcaccctcgggcactagccttctgtttctcctcttcgcggctgacctgcaaagaatccccgaaaaagagttgaggagagtgtacgagttgggtaaagcagaggaagagatggtctgggtgttggaccccgtcgacacagtgcgcgggattcagaagcgttacatcttcgctgccgggacgtacaaggtcggccgcaaagattgtgatgtcattgttcaaactgacacatctatatcccgagtccatgcggagattgcaattgaaaagatggttgcctgggatccacattctggtgcacctgccagtccatcatttgttcgtgtaatcgaccgatcaaagtatggcacatttgtcaacaaagtacatggaacccagggcagccgtctgcataaagatgaagatatgatgcttactgatggggatgctgtgacgtttggaactggtaatgcgacctttaggttgtcatttgttcccatagtggttttttttcatggcgcaaaatcgacacgaattgatccatcattacatgcagtcatgaaatctattggtgcatatgctactcgtaagtggagcaatgaatgtacacatgttcttgttgacggatcatgttcgttgacacctgagctcctcgatgcagttatggcaaagaagcagatcatgttgggagactggtttgaggcaatggctgaaaagaacatacacacagagatcccttcttgtacacaatgggatggtgatcaaaatggtggatatcaacctcattcagaatttcctagaaggctatacttttatcctggggtcatcagataaatatcaatttggtgagaagctccatggattactggaatcaactggagcaaaatacgtgcacattgacgacttttgtgcaaacagccaggactcagcagctggagacactgatcatcaaattcttgtagttcctgcacgatatccattggaattcagcaagatacgtgtgctgtttactttgtcaaagatcagtgatattaagctatttgcagctatattgtctggccgcctggaagcaacttctattgaaccacctgctttcatcgttacatcctcgaattccacggatgccactattgtggcggattcggatgttgaaatggagacagcaacttctaatcctactggtgctgccaacaagtctcaacatcacaccgagaatatctctgacgatgaaaaacaaaccacaaatataaccaacgaagttgcaaggaagggtaacgttattcacccaaaacacccagagagcgttgaagatttgaaaccgatggaggaggatgtgaaggtcatagagaaaacagcaacgtacaggtccacgggtagagacgaggatgctcgcattctaagcaaggcgccaaaggatgaaaaattagacaccagcagggatggggcttctgatgtcatatttagtcagaatctggtcgtcagaagaagcctcccccagtcagctcctgccgcaccagcagaaatcggaggcgttaacttcaagcgcttcaggaagagggaaatggtgtctggaaacagcttcaaggacctcattccgtttgcgcgggaaccatacagagagtcggaccacgaacgtggcagcacgatgaccgatttcatgcgggaggagaagcggcagaaacaaatggaggccattgcggaggatctcttcaacaacgcaaagtccaagaaaagagcagccgctggaagttcgattcacaccctactcaccggccacagatgatgagagccaggcaggcagcaggagatcacctctatatgcgatctgcatgctcatctgttagccacggcgttagaagccgaattagtgtaggacggctgtcggatatggattgtacctgaggtcatgttagatatgaatggttctgagggaaatattagctgtgattttggcattacgcgtcgggcaagtttagcgttagtctagaatttgaccaaacaagaggattttctccggttggatgttgcgagcacgagggttttcttgggttgaatgttgcatggttagttcaccaagggctagtttgacaaccccattttacaacggaacgctacacctacgagattatgatgtttgatgtgttcagcagcctatcactatcagtgaccctcaatcctgttgttaccttgatgccaaacgatacgttcaaccgacgagacaatgtgcgcatccagttctcatggacttgggaggaccgatgatgctttgcctcagcttggcgtgtagctgcaaaac

SEQ ID NO: 53020 - DNA, 2416 bp, Zea Mays
gtttattagtgcttagagaaccgaaacctagtatgccctaacgggagaacaataatttgagcaagttggacaaaactaccaaagtttatgtactcgctctggcagatacggcgtttagacgacccagttccggccgccgcggtgctccgagcctccgacggccgctgtggccctgtggcgggcggaagcaccctcgggcactagccttctgtttctcctcttcgcggctgacctgcaaagaatccccgaaaaagagttgaggagagtgtacgagttgggtaaagcagaggaagagatggtctgggtgttggaccccgtcgacacagtgcgcgggattcagaagcgttacatcttcgctgccgggacgtacaaggtcggccgcaaagattgtgatgtcattgttcaaactgacacatctatatcccgagtccatgcggagattgcaattgaaaagatggttgcctgggatccacattctggtgcacctgccagtccatcatttgttcgtgtaatcgaccgatcaaagtatggcacatttgtcaacaaagtacatggaacccagggcagccgtctgcataaagatgaagatatgatgcttactgatggggatgctgtgacgtttggaactggtaatgcgacctttaggttgtcatttgttcccatagtggttttttttcatggcgcaaaatcgacacgaattgatccatcattacatgcagtcatgaaatctattggtgcatatgctactcgtaagtggagcaatgaatgtacacatgttcttgttgacggatcatgttcgttgacacctgagctcctcgatgcagttatggcaaagaagcagatcatgttgggagactggtttgaggcaatggctgaaaagaacatacacacagagatcccttcttgtacacaatacattccaaacttgactctagatgggatggtgatcaaaatgtatcaatttggtgagaagctccatggattactggaatcaactggagcaaaatacgtgcacattgacgacttttgtgcaaacagccaggactcagcagctggagacactgatcatcaaattcttgtagttcctgcacgatatccattggaattcagcaagatacgtgtgctgtttactttgtcaaagatcagtgatattaagctatttgcagctatattgtctggccgcctggaagcaacttctattgaaccacctgctttcatcgttacatcctcgaattccacggatgccactattgtggcggattcggatgttgaaatggagacagcaacttctaatcctactggtgctgccaacaagtctcaacatcacaccgagaatatctctgacgatgaaaaacaaaccacaaatataaccaacgaagttgcaaggaagggtaacgttattcacccaaaacacccagagagcgttgaagatttgaaaccgatggaggaggatgtgaaggtcatagagaaaacagcaacgtacaggtccacgggtagagacgaggatgctcgcattctaagcaaggcgccaaaggatgaaaaattagacaccagcagggatggggcttctgatgtcatatttagtcagaatctggtcgtcagaagaagcctcccccagtcagctcctgccgcaccagcagaaatcggaggcgttaacttcaagcgcttcaggaagagggaaatggtgtctggaaacagcttcaaggacctcattccgtttgcgcgggaaccatacagagagtcggaccacgaacgtggcagcacgatgaccgatttcatgcgggaggagaagcggcagaaacaaatggaggccattgcggaggatctcttcaacaacgcaaagtccaagaaaagagcagccgctggaagttcgattcacaccctactcaccggccacagatgatgagagccaggcaggcagcaggagatcacctctatatgcgatctgcatgctcatctgttagccacggcgttagaagccgaattagtgtaggacggctgtcggatatggattgtacctgaggtcatgttagatatgaatggttctgagggaaatattagctgtgattttggcattacgcgtcgggcaagtttagcgttagtctagaatttgaccaaacaagaggattttctccggttggatgttgcgagcacgagggttttcttgggttgaatgttgcatggttagttcaccaagggctagtttgacaaccccattttacaacggaacgctacacctacgagattatgatgtttgatgtgttcagcagcctatcactatcagtgaccctcaatcctgttgttaccttgatgccaaacgatacgttcaaccgacgagacaatgtgcgcatccagttctcatggacttgggaggaccgatgatgctttgcctcagcttggcgtgtagctgcaaaac

SEQ ID NO: 53021 - DNA, 2484 bp, Zea Mays
attgaattgtatgaatacgtttattagtgcttagagaaccgaaacctagtatgccctaacgggagaacaataatttgagcaagttggacaaaactaccaaagtttatgtactcgctctggcagatacggcgtttagacgacccagttccggccgccgcggtgctccgagcctccgacggccgctgtggccctgtggcgggcggaagcaccctcgggcactagccttctgtttctcctcttcgcggctgacctgcaaagaatccccgaaaaagagttgaggagagtgtacgagttgggtaaagcagaggaagagatggtctgggtgttggaccccgtcgacacagtgcgcgggattcagaagcgttacatcttcgctgccgggacgtacaaggtcggccgcaaagattgtgatgtcattgttcaaactgacacatctatatcccgagtccatgcggagattgcaattgaaaagatggttgcctgggatccacattctggtgcacctgccagtccatcatttgttcgtgtaatcgaccgatcaaagtatggcacatttgtcaacaaagtacatggaacccagggcagccgtctgcataaagatgaagatatgatgcttactgatggggatgctgtgacgtttggaactggttgtcatttgttcccatagtggttttttttcatggcgcaaaatcgacacgaattgatccatcattacatgcagtcatgaaatctattggtgcatatgctactcgtaagtggagcaatgaatgtacacatgttcttgttgacggatcatgttcgttgacacctgagctcctcgatgcagttatggcaaagaagcagatcatgttgggagactggtttgaggcaatggctgaaaagaacatacacacagagatcccttcttgtacacaatacattccaaacttgactctagatgggatggtgatcaaaatggtggatatcaacctcattcagaatttcctagaaggctatacttttatcctggggtcatcagataaatatcaatttggtgagaagctccatggattactggaatcaactggagcaaaatacgtgcacattgacgacttttgtgcaaacagccaggactcagcagctggagacactgatcatcaaattcttgtagttcctgcacgatatccattggaattcagcaagatacgtgtgctgtttactttgtcaaagatcagtgatattaagctatttgcagctatattgtctggccgcctggaagcaacttctattgaaccacctgctttcatcgttacatcctcgaattccacggatgccactattgtggcggattcggatgttgaaatggagacagcaacttctaatcctactggtgctgccaacaagtctcaacatcacaccgagaatatctctgacgatgaaaaacaaaccacaaatataaccaacgaagttgcaaggaagggtaacgttattcacccaaaacacccagagagcgttgaagatttgaaaccgatggaggaggatgtgaaggtcatagagaaaacagcaacgtacaggtccacgggtagagacgaggatgctcgcattctaagcaaggcgccaaaggatgaaaaattagacaccagcagggatggggcttctgatgtcatatttagtcagaatctggtcgtcagaagaagcctcccccagtcagctcctgccgcaccagcagaaatcggaggcgttaacttcaagcgcttcaggaagagggaaatggtgtctggaaacagcttcaaggacctcattccgtttgcgcgggaaccatacagagagtcggaccacgaacgtggcagcacgatgaccgatttcatgcgggaggagaagcggcagaaacaaatggaggccattgcggaggatctcttcaacaacgcaaagtccaagaaaagagcagccgctggaagttcgattcacaccctactcaccggccacagatgatgagagccaggcaggcagcaggagatcacctctatatgcgatctgcatgctcatctgttagccacggcgttagaagccgaattagtgtaggacggctgtcggatatggattgtacctgaggtcatgttagatatgaatggttctgagggaaatattagctgtgattttggcattacgcgtcgggcaagtttagcgttagtctagaatttgaccaaacaagaggattttctccggttggatgttgcgagcacgagggttttcttgggttgaatgttgcatggttagttcaccaagggctagtttgacaaccccattttacaacggaacgctacacctacgagattatgatgtttgatgtgttcagcagcctatcactatcagtgaccctcaatcctgttgttaccttgatgccaaacgatacgttcaaccgacgagacaatgtgcgcatccagttctcatggacttgggaggaccgatgatgctttgcctcagcttggcgtgtagctgcaaaac

SEQ ID NO: 53022 - DNA, 979 bp, Zea Mays
gttgatacggagtacttctcatatttttgttcttcataagatgtgatgcattctatatatcgttccatgtgtagatcaagttaagataacaccaagttgtcacaactggaggcacattgaatgaggaattttggcctcaatttaagttttgagcaatttcttacgagaaagcagtgcatcatttgatcaaaagtttggttggcaagagaggctgtcaagtttgcaggatagagcaaggatcttctttgccgttctgttctggatgtcattgtttttctggggaagtgcttgggatggaagtaacaactccggaggcaagaagcggcaacgatttcgaaagaagtcaaagtgaagatgctttaagattggcatttttttcatagggatatagccttctatgttcaaggagacaaggacttgtgaacattcaatggtgcatagtgaaggtgtaggcatagaaagttgtcgtgtcgtgttacatagttgtatttcagcagccggtactgttgggggccttcgtcctccgaaggtcctcaaaaacatgatttgacaatgttttccgagtggattatgtgaacaggtattttcggatccagaattatgaatatggagcacggccaggacgaagcctgaaccagacgaaggtcgagtgtagccgaagctgtgcacagggaagcttcggcgcgatggcagaagggggaaccgacttaaagatgaaaagacttcgggggcctcgacagatttccataagccgttaacaaatgtaatggacatggatgtaattttacgtgggctgcgtcccgcgtctataaatagatgaacagtactcccgtactggacacgctgacttggcatttgcttttggcatcacgcttgtactttacaccttctctcaggaccgaaggtacatttgtaatttggaatcatttctgtttttccatgttaataaaatagaaatgattctatggtgatgcttata

SEQ ID NO: 53023 - DNA, 1338 bp, Zea Mays
atggtacttcccgtgcgccacgtttctagcgtccccttcttccttcttccccgagccgcgtcaaaggaaccaaacctgtagccgacattaagaggctgaacggcctctcaactgatctccagatgtttgcacacaagacactgcggattccactcccagggaggcaccctccgtcgtcttaccagcagaatggttcatatgagagtgacgacagggaatgtactccacgtcgcattcatgatgatatcttggaatcaatattgaaaacaccaaattccaaagtttcgccagctatgagtcttctgcagggatactatggccttgaaccacctccaaagagagatcaaacaagtgagggcactgagatggcagttcacagtaaaggcaaatctgcttttttggatgttgagccgtggctggagccaccaaattccgaccccttccctcttcagaataggaaaaacagaagcttgatgataggttcttttcttgatggtggtactgatgagaacggtgacagtgaaaggttcataagacggcgccagaaagctgatggtgagctgttaccgagggaggaaaatggtggtgactttctggcaagcgttggaaaaggcttggctctgaggccaaagtctagcaatcgaccagacatgaacaagagccagcagaatctttttgcaatggcggagcctttgtttggcaatggtttgcaaactgtaaggaaatcatccagcactccggagttccaggagccagagaccaacaccagttcatccatatggtcagcgagcaagtggagcataaatacagatgcttttgctcttcctctcccgatccctcgttttgacaacattccaaagcccattgctgcttggagaaacaagccggctcgcgactaataaactgctacgcgcatgatttttcctgaactccaggaggcccagaaagcgggaagtgttcatgaaggagctttacattaggttggcaccagcctctacagctttggaagcagagcagagcaggactgtagtattggcccctgctagctagaacattccgaagatcagacgcatggcgtctatgtttccagacggcatctagactaggtttacatgattctcgtgttatattgggcatgttgcgccaagagtagcaacgttaatattcggtcatataaattatagatgctagatgacatagaggagatatatttgaggaggatatattttttttctgtacacaatgagaaaatgtagagcatcaaagggcggttatatatgtgttgtatgtgtgattccataccctaatatagaggtggttggcttcgtttaactccag

SEQ ID NO: 53024 - DNA, 2553 bp, Zea Mays
acacgagacgaggtcgaggactctagcacgactccaactgccacgcgagctgcgagcggcgagcctcatcaatcgatcacacgcgacgcgagtacgagtacgagtatacggccacgagcagacgagctcctccgccaccagtgtcatcgcgcagcctcgcgctcgtccatggcgtccgtgtacacggcgccgcgcgccccgctcccgacggtggcgtcctcctcgtcatccgcgcggcaggtggatccgaaccctagtggaagccgcttcctcgccgggcggcgcctccgcgtcgtccgccgcctcgccggcgcggccccgtcgcggcgcgctccgtgggtctgctactccgcgcgtagccccgacgcggacgccggcgatgagcaacgccggcggggttgggacgcgatgctccacgacgccttccagggtgccgtgcgacggtggagcgagtacgtcagcaattactggcccctaccgccctctgtgaaggaggcgggtacggggaagagggttgggagttcttacgatgaggaggtgatgaatggggatgaagaggagatgaaggttggggaggaagagggaaagtggagctgggagaggtggaagcggcattttgctctcattgaggagagcgagcgtctcgttgatgagctccagttgcaactccaggcgtctgtttatagagaagactacagaagtgctcataagctgaggctagctattgctactatagtgaaaaatgacactgtgggtagagctgtctctgacttaaatatggccatagatgaggaacgctacaaggatgcagcatatatcagagatcatgctggcacaggactgctggggtggtggtctggaatttccggaaatttgtccgatccatatggtcttataattcgtataagtgctgaacatggtcgatatgtggcaagaagttatgatacaagacagctgacttctgacagctctggtctccctatatttgaaatatactttgcagaggcaaatggtggatacaacctgcaggcagtgcatctgaaaccagatgatagtgattctgaccaagtgccaaacatgttaagggagaaacttggcatggacagtataaatatatctagcagttcagtagggtctaagcatgaagaattcgatggaagtgtaaacatggatgataaagatagtgatgatagcaacattgatgctggccctggttcgaaagacttgtcaagcgatccaactgcagttcccaggattaaaatcttgaaagtggtacccatgcagaatgttgacaaagactacataatcaatatttttgatcagatttcagaggaaaatgatgatcctgaagttgaaaatgaatcttcagaagatgctggtgatgaagataacagtggagtagcagaaacagtttctgcagaagagaacggtgatgaatctggtgacgaaagtgatattgaacccttggtttcaattgattttgtcattgagaataacgatgactatgcttctcatccatctgctgaagcttttgaacgaatgccagctagattagaaaaaagagaccgcttctcgttttccttctatactgaagaatatagtaaaaaactagatgctggaaaggcccagcagacttcaaagaaaacagttcgtttgcataccgatcagcaggattatgatggttttgttgagcttgatcgtgtaaagttgagcggcagcaacaaaaaactttcgatactacaacttggcatcaaacgaaataacaaggttcagaaaaaactgcatggagttacccactttagtcgtattcagatgcctatatcttcagatcctcttaccggttgttttccgtgcaaaagttggtgaacactatcggctccctcataagggaattatccctagagaacttggagtgattgctaggtacaaggggcaaaggaaaattgcagatcctggtttccaaaaccctcaatgggttgacggggagcttttgatactagatggaaagttcatcagagatggtcctgtgatagctttcttttactggacatctaatgttcatcttttcgaattctttagacagttgaagcttcctgactagttcccttctaaaagtagttaaagcaggccattataatttcagcatagctgcgtttggagccaaccggagttgcctggcatcgagtacagattctgatgtggagaacagggcgcctggcatgaatcagtggcatctccacccaactctgatagcttgccacaagggtggaaaagagatcgcagtcgcaagaggaatatcatcctgccaacatgggtgagccgcgggcgcatcatacttactaattacgtttctcctctgctcgtccaccgccagtttctgtgtttctcatagcaagtagaactaaagcacctcaaagatgtaaagttatgtatgcagtcgcaaatagtttaggattttgagcacatattgataatttttatacatggagagtcagtatgtatgtgaaatagtacgagcaagagttttgtgcagcgtgatcaagctgtggccat

SEQ ID NO: 53025 - DNA, 2550 bp, Zea Mays
acacgagacgaggtcgaggactctagcacgactccaactgccacgcgagctgcgagcggcgagcctcatcaatcgatcacacgcgacgcgagtacgagtacgagtatacggccacgagcagacgagctcctccgccaccagtgtcatcgcgcagcctcgcgctcgtccatggcgtccgtgtacacggcgccgcgcgccccgctcccgacggtggcgtcctcctcgtcatccgcgcggcaggtggatccgaaccctagtggaagccgcttcctcgccgggcggcgcctccgcgtcgtccgccgcctcgccggcgcggccccgtcgcggcgcgctccgtgggtctgctactccgcgcgtagccccgacgcggacgccggcgatgagcaacgccggcggggttgggacgcgatgctccacgacgccttccagggtgccgtgcgacggtggagcgagtacgtcagcaattactggcccctaccgccctctgtgaaggaggcgggtacggggaagagggttgggagttcttacgatgaggaggtgatgaatggggatgaagaggagatgaaggttggggaggaagagggaaagtggagctgggagaggtggaagcggcattttgctctcattgaggagagcgagcgtctcgttgatgagctccagttgcaactccaggcgtctgtttatagagaagactacagaagtgctcataagctgaggctagctattgctactatagtgaaaaatgacactgtgggtagagctgtctctgacttaaatatggccatagatgaggaacgctacaaggatgcagcatatatcagagatcatgctggcacaggactgctggggtggtggtctggaatttccggaaatttgtccgatccatatggtcttataattcgtataagtgctgaacatggtcgatatgtggcaagaagttatgatacaagacagctgacttctgacagctctggtctccctatatttgaaatatactttgcagaggcaaatggtggatacaacctgcaggcagtgcatctgaaaccagatgatagtgattctgaccaagtgccaaacatgttaagggagaaacttggcatggacagtataaatatatctagcagttcagtagggtctaagcatgaagaattcgatggaagtgtaaacatggatgataaagatagtgatgatagcaacattgatgctggccctggttcgaaagacttgtcaagcgatccaactgcagttcccaggattaaaatcttgaaagtggtacccatgcagaatgttgacaaagactacataatcaatatttttgatcagatttcagaggaaaatgatgatcctgaagttgaaaatgaatcttcagaagatgctggtgatgaagataacagtggagtagcagaaacagtttctgcagaagagaacggtgatgaatctggtgacgaaagtgatattgaacccttggtttcaattgattttgtcattgagaataacgatgactatgcttctcatccatctgctgaagcttttgaacgaatgccagctagattagaaaaaagagaccgcttctcgttttccttctatactgaagaatatagtaaaaaactagatgctggaaaggcccagcagacttcaaagaaaacagttcgtttgcataccgatcagcaggattatgatggttttgttgagcttgatcgtgtaaagttgagcggcagcaacaaaaaactttcgatactacaacttggcatcaaacgaaataacaaggttcagaaaaaactgcatggagttacccactttagtcgtattcagatgcctatatcttcagatcctcttaccggttgttttccgtgcaaaagttggtgaacactatcggctccctcataagggaattatccctagagaacttggagtgattgctaggtacaaggggcaaaggaaaattgcagatcctggtttccaaaaccctcaatgggttgacggggagcttttgatactagatggaaagttcatcagagatggtcctgtgatagctttcttttactggacatctaatgttcatcttttcgaattctttagacagttgaagcttcctgactagttcccttctaaaagtagttaaaggccattataatttcagcatagctgcgtttggagccaaccggagttgcctggcatcgagtacagattctgatgtggagaacagggcgcctggcatgaatcagtggcatctccacccaactctgatagcttgccacaagggtggaaaagagatcgcagtcgcaagaggaatatcatcctgccaacatgggtgagccgcgggcgcatcatacttactaattacgtttctcctctgctcgtccaccgccagtttctgtgtttctcatagcaagtagaactaaagcacctcaaagatgtaaagttatgtatgcagtcgcaaatagtttaggattttgagcacatattgataatttttatacatggagagtcagtatgtatgtgaaatagtacgagcaagagttttgtgcagcgtgatcaagctgtggccat

SEQ ID NO: 53026 - DNA, 2709 bp, Zea Mays
acacgagacgaggtcgaggactctagcacgactccaactgccacgcgagctgcgagcggcgagcctcatcaatcgatcacacgcgacgcgagtacgagtacgagtatacggccacgagcagacgagctcctccgccaccagtgtcatcgcgcagcctcgcgctcgtccatggcgtccgtgtacacggcgccgcgcgccccgctcccgacggtggcgtcctcctcgtcatccgcgcggcaggtggatccgaaccctagtggaagccgcttcctcgccgggcggcgcctccgcgtcgtccgccgcctcgccggcgcggccccgtcgcggcgcgctccgtgggtctgctactccgcgcgtagccccgacgcggacgccggcgatgagcaacgccggcggggttgggacgcgatgctccacgacgccttccagggtgccgtgcgacggtggagcgagtacgtcagcaattactggcccctaccgccctctgtgaaggaggcgggtacggggaagagggttgggagttcttacgatgaggaggtgatgaatggggatgaagaggagatgaaggttggggaggaagagggaaagtggagctgggagaggtggaagcggcattttgctctcattgaggagagcgagcgtctcgttgatgagctccagttgcaactccaggcgtctgtttatagagaagactacagaagtgctcataagctgaggctagctattgctactatagtgaaaaatgacactgtgggtagagctgtctctgacttaaatatggccatagatgaggaacgctacaaggatgcagcatatatcagagatcatgctggcacaggactgctggggtggtggtctggaatttccggaaatttgtccgatccatatggtcttataattcgtataagtgctgaacatggtcgatatgtggcaagaagttatgatacaagacagctgacttctgacagctctggtctccctatatttgaaatatactttgcagaggcaaatggtggatacaacctgcaggcagtgcatctgaaaccagatgatagtgattctgaccaagtgccaaacatgttaagggagaaacttggcatggacagtataaatatatctagcagttcagtagggtctaagcatgaagaattcgatggaagtgtaaacatggatgataaagatagtgatgatagcaacattgatgctggccctggttcgaaagacttgtcaagcgatccaactgcagttcccaggattaaaatcttgaaagtggtacccatgcagaatgttgacaaagactacataatcaatatttttgatcagatttcagaggaaaatgatgatcctgaagttgaaaatgaatcttcagaagatgctggtgatgaagataacagtggagtagcagaaacagtttctgcagaagagaacggtgatgaatctggtgacgaaagtgatattgaacccttggtttcaattgattttgtcattgagaataacgatgactatgcttctcatccatctgctgaagcttttgaacgaatgccagctagattagaaaaaagagaccgcttctcgttttccttctatactgaagaatatagtaaaaaactagatgctggaaaggcccagcagacttcaaagaaaacagttcgtttgcataccgatcagcaggattatgatggttttgttgagcttgatcgtgtaaagttgagcggcagcaacaaaaaactttcgatactacaacttggcatcaaacgaaataacaaggttcagaaaaaactgcatggagttacccactttagtcgtattcagatgcctatatcttcagatcctcttaccggcttatatttgaccgcatcaggatttgactcagaaattcttagtttacaacgaaaatttggtcaatggcgggaggatggtccatctgaggagcatagtgacctattgttctatgagtatgttgaagctgtaaaattaacaggggacaacctcatgccagctggtcaggttgttttccgtgcaaaagttggtgaacactatcggctccctcataagggaattatccctagagaacttggagtggtacaaggggcaaaggaaaattgcagatcctggtttccaaaaccctcaatgggttgacggggagcttttgatactagatggaaagttcatcagagatggtcctgtgatagctttcttttactggacatctaatgttcatcttttcgaattctttagacagttgaagcttcctgactagttcccttctaaaagtagttaaaggccattataatttcagcatagctgcgtttggagccaaccggagttgcctggcatcgagtacagattctgatgtggagaacagggcgcctggcatgaatcagtggcatctccacccaactctgatagcttgccacaagggtggaaaagagatcgcagtcgcaagaggaatatcatcctgccaacatgggtgagccgcgggcgcatcatacttactaattacgtttctcctctgctcgtccaccgccagtttctgtgtttctcatagcaagtagaactaaagcacctcaaagatgtaaagttatgtatgcagtcgcaaatagtttaggattttgagcacatattgataatttttatacatggagagtcagtatgtatgtgaaatagtacgagcaagagttttgtgcagcgtgatcaagctgtggccat

SEQ ID NO: 53027 - DNA, 1209 bp, Zea Mays
taccttagtcatgtgtgggtgtggccataggaagttggacactggccccatctattaatgttccaattgtgaaactgaaaaagagaaaagtgaagaatatgtgatgaagggctttcctgcaatttacatgatagactgcacatcaaatgaatgccaccatttactaaaatctgcaggcatggaagaactttatccggcattgttactcttccctgcggagaacaaaagtgcaatagcatatgaagggggaatgtcagtgtctcacttaatcgaatttttggagtctcatgtgagcaattctcgctatctattggaatataaaggatttatgtggaagaagagaatgacaccacagcacgatgcaccacaggcaattcagtttaaagtcagtgataaaggtagcggcaatgttggttctgagttaccaagtcatccaggtgtcgttacaggatccatccttactgccactaagaagctcgggaccgcagttccatttgataatgccaaggtgctcattgtgtcagctgattctcatgaaggatttcatggcttgatcatcaacaagcgattaagctggggtgtcttcaaggatctggatagctcgatggagcctattaagcatgcaccacttttctatggtgggcctgttgtggtgcagggttatcatcttgtaagcttgtcaagagtatcctcggaggggtacatgcaagtcataccaggcgtctattatggcaacatagttgccacaagccgggtagtcacacggatcaagttgggcgagcaatctgtcaatggcctgtggttcttcctaggctactcggggtggggatacaaccaactttttgatgagctaactgaaggagcatggcttgtgagtgtgaagccgattgagcatttggactggccgaagagttgaaagggttctgtggacctcacgcctcagctgtttctttaggaaaattcagttcatcttgcacatatctgccactctgcccacactgcaccgtgacattgtactgagcttttttttggaacatagcagcactgtgttttcataccattcacaccgtactatggtcacatattttttatacatagtacttttcttatagtgaagaacgttttctgtgttcttccttttgatttcattttttgttcgagattttgggcctgtttggttggcacggctccggctccttaaaaaataac

SEQ ID NO: 53028 - DNA, 3760 bp, Zea Mays
aaatgacaacgcaaaacgtgacaattcgcagtgccccagatccccttttgcattggatctggtctgcagggtatggtgagtccagatcactgatggctgacatagaacgtttggttggttccaatgaggagcttagtcgcctcaagctgatggttgtatacaagaattctgaaaagttgctgacagatgctattggtgctgctgaaggaataactgtggtatactaccaacgttccatgcaattcaaatatcaagggaagcttcgtgcacatgatattctgtctgcagtgcgctatatcatgtcacttgaccatgaggagtccccttttgaggttttgcatacacaagaagatgtcgagaccttcatcgaatctaccgataaatccatactcctttatgaatcatgtggatggttcaccagattggctcatggcgggggcaaccaaagttatgaggcagcgtcatcaaataacaacacagaaaacgttgacatttctgggaagataatgaccagagaaccagatgggccactagagcttgttatagagaatgaagaacaaacctttggagttgggggtcagcttactggttctccttggaaagttggttttgccttggcaaacgaaagtgtctctgaacaaattggaaacacaaatgatggatatagaaagtgtacaatgcaaaagttccatcaatttgaaagtttctatggaaagcttactgctatagcaagagaatatttgcttccccctgaaatagctaaatttggccttataaccgaaagatcattgttgccttcactggatgttgttaatgaaggcaaccaggatacatggtttgtcatcactcatcatatgggatgcaaaacttgttcagttattgcgaaagatggcgatgatctgagaagtatagtgcaatcccaccataatcttggcattaaggaggttagtgctgatgaaagtagtagagaggctatcttccccagaaacaggccctctgtagttctatttattgatagattatcccactcctcaaaagtcagagatgaaagcaaattagtcctaaagttactaaggcagtatgtgcaaaataattacccatttcatgtcagtaatggggttccaagtagcagtacttccaaagcacgctcaaaagctgtcccttctttgaggaatacaggtatctcagatgcctattctcaaacagcaaggttgagtgcttgggcttctaagcttatggcacttggggacaaaatgtcagttatggtggttaatgatggagatagtatttcttacaaaagttctagccaaggtagtggtgctaatcctgtatatgatgttctcactaagttgctagacaaagcaagaccagggcataagtcaaagaaaacaagaataagtttagtttcacgagatgttggcctaaagatgttgtcagatcattctgaaatcaaagtggttaagtctctatcagttgaagagagtgaatacaaaagaactgatgatgcatctgccactacagctaattccaatgatgatattactgaagcttttgtggatgaaaacacagcaaaagagactgaatatatcaatgatggacaagtaccaagtatacttgagaaatcttcggcaacttaccctgatgaacatgatactgctcgtgaatttaatgatacagaaattgaggacaaaagcataagtgaagcttcagatatgagtgttgatcttaaggaagatgcccccaataatgcagatagtagtagtgaggttggaggtatgctgcataaacacataatggagaaaacagttacagaagcttttcaaattttggaacatgatgaaagaaacttgtacactgaccaagaggaatcagtatcatcaaacgagcaagttgatggatcttcattcctgagtaaaaaaatcagtaaaaccgaagatgcaatttatgaaaacacattcggtctatctgaaggattagaagaaagtgatagaagatgtccccatcatgcaacatgtagctcttcctgtgttcctgtaagagatgacacagactttactgatcaagtaacttcaagtatatctgattaccgttttgctggtgctttctacttctctgatggtggttacagactcctgagaactttaactggtggatcaagaattccgtccctggtaataattgatccagttgaacaaaaacattatatatttcctgaggaaagcgagtatagctatgcttctttacaaaattatcttgacagttttaggaatcgaagtcttccttcatattaccgtggtacctcatcagctataagttcaaaggagtttccaagaccaccttttgttaatcatgatttccatgaggcaaattcgatccctcagttgacagcatttagtttttgtccgttagtatttggacccagaggttgtgattcaaaaagtgaagtatcattttcaaacactgaaaatattgtatctggttggaacaaggatgtaatggtgcttttcagcaactcttggtgtgggttttgtcagcgagcagagctggtggtccgtgagttacaccgatcatttaagagcttttcaagctattcagattctgtatctagaaatgctcaagatgtccacaatgaagagaaaagtgaagaatatgtgatgaagggctttcctgcaatttacatgatagactgcacatcaaatgaatgccaccatttactaaaatctgcaggcatggaagaactttatccggcattgttactcttccctgcggagaacaaaagtgcaatagcatatgaagggggaatgtcagtgtctcacttaatcgaatttttggagtctcatgtgagcaattctcgctatctattggaatataaaggatttatgtggaagaagagaatgacaccacagcacgatgcaccacaggcaattcagtttaaagtcagtgataaaggtagcggcaatgttggttctgagttaccaagtcatccaggtgtcgttacaggatccatccttactgccactaagaagctcgggaccgcagttccatttgataatgccaaggtgctcattgtgtcagctgattctcatgaaggatttcatggcttgatcatcaacaagcgattaagctggggtgtcttcaaggatctggatagctcgatggagcctattaagcatgcaccacttttctatggtgggcctgttgtggtgcagggttatcatcttgtaagcttgtcaagagtatcctcggaggggtacatgcaagtcataccaggcgtctattatggcaacatagttgccacaagccgggtagtcacacggatcaagttgggcgagcaatctgtcaatggcctgtggttcttcctaggctactcggggtggggatacaaccaactttttgatgagctaactgaaggagcatggcttgtgagtgtgaagccgattgagcatttggactggccgaagagttgaaagggttctgtggacctcacgcctcagctgtttctttaggaaaattcagttcatcttgcacatatctgccactctgcccacactgcaccgtgacattgtactgagcttttttttggaacatagcagcactgtgttttcataccattcacaccgtactatggtcacatattttttatacatagtacttttcttatagtgaagaacgttttctgtgttcttccttttgatttcattttttgttcgagattttgggcctgtttggttggcacggctccggctccttaaaaaataac

SEQ ID NO: 53029 - DNA, 3985 bp, Zea Mays
atgagcttcatagtcgtttatctggttcaactaaacacatttcttgtctcccagtgcaactcaccgtatcgataagattaacagtctatcggaaatgacaacgcaaaacgtgacaattcgcagtgccccagatccccttttgcattggatctggggtatggtgagtccagatcactgatggctgacatagaacgtttggttggttccaatgaggagcttagtcgcctcaagctgatggttgtatacaagaattctgaaaagttgctgacagatgctattggtgctgctgaaggaataactgtggtatactaccaacgttccatgcaattcaaatatcaagggaagcttcgtgcacatgatattctgtctgcagtgcgctatatcatgtcacttgaccatgaggagtccccttttgaggttttgcatacacaagaagatgtcgagaccttcatcgaatctaccgataaatccatactcctttatgaatcatgtggatggttcaccagattggctcatggcgggggcaaccaaagttatgaggcagcgtcatcaaataacaacacagaaaacgttgacatttctgggaagataatgaccagagaaccagatgggccactagagcttgtaagtgtagtgaagaaggttgcatttatatctgattaattagatactgctatgtttctttgagaagaattatctgaactatgaagattcagcaaatatcagaagaacaatccctgaaaatgtacttatttgagatgacaaacaggttatagagaatgaagaacaaacctttggagttgggggtcagcttactggttctccttggaaagttggttttgccttggcaaacgaaagtgtctctgaacaaattggaaacacaaatgatggatatagaaagtgtacaatgcaaaagttccatcaatttgaaagtttctatggaaagcttactgctatagcaagagaatatttgcttccccctgaaatagctaaatttggccttataaccgaaagatcattgttgccttcactggatgttgttaatgaaggcaaccaggatacatggtttgtcatcactcatcatatgggatgcaaaacttgttcagttattgcgaaagatggcgatgatctgagaagtatagtgcaatcccaccataatcttggcattaaggaggttagtgctgatgaaagtagtagagaggctatcttccccagaaacaggccctctgtagttctatttattgatagattatcccactcctcaaaagtcagagatgaaagcaaattagtcctaaagttactaaggcagtatgtgcaaaataattacccatttcatgtcagtaatggggttccaagtagcagtacttccaaagcacgctcaaaagctgtcccttctttgaggaatacaggtatctcagatgcctattctcaaacagcaaggttgagtgcttgggcttctaagcttatggcacttggggacaaaatgtcagttatggtggttaatgatggagatagtatttcttacaaaagttctagccaaggtagtggtgctaatcctgtatatgatgttctcactaagttgctagacaaagcaagaccagggcataagtcaaagaaaacaagaataagtttagtttcacgagatgttggcctaaagatgttgtcagatcattctgaaatcaaagtggttaagtctctatcagttgaagagagtgaatacaaaagaactgatgatgcatctgccactacagctaattccaatgatgatattactgaagcttttgtggatgaaaacacagcaaaagagactgaatatatcaatgatggacaagtaccaagtatacttgagaaatcttcggcaacttaccctgatgaacatgatactgctcgtgaatttaatgatacagaaattgaggacaaaagcataagtgaagcttcagatatgagtgttgatcttaaggaagatgcccccaataatgcagatagtagtagtgaggttggaggtatgctgcataaacacataatggagaaaacagttacagaagcttttcaaattttggaacatgatgaaagaaacttgtacactgaccaagaggaatcagtatcatcaaacgagcaagttgatggatcttcattcctgagtaaaaaaatcagtaaaaccgaagatgcaatttatgaaaacacattcggtctatctgaaggattagaagaaagtgatagaagatgtccccatcatgcaacatgtagctcttcctgtgttcctgtaagagatgacacagactttactgatcaagtaacttcaagtatatctgattaccgttttgctggtgctttctacttctctgatggtggttacagactcctgagaactttaactggtggatcaagaattccgtccctggtaataattgatccagttgaacaaaaacattatatatttcctgaggaaagcgagtatagctatgcttctttacaaaattatcttgacagttttaggaatcgaagtcttccttcatattaccgtggtacctcatcagctataagttcaaaggagtttccaagaccaccttttgttaatcatgatttccatgaggcaaattcgatccctcagttgacagcatttagtttttgtccgttagtatttggacccagaggttgtgattcaaaaagtgaagtatcattttcaaacactgaaaatattgtatctggttggaacaaggatgtaatggtgcttttcagcaactcttggtgtgggttttgtcagcgagcagagctggtggtccgtgagttacaccgatcatttaagagcttttcaagctattcagattctgtatctagaaatgctcaagatgtccacaatgaagagaaaagtgaagaatatgtgatgaagggctttcctgcaatttacatgatagactgcacatcaaatgaatgccaccatttactaaaatctgcaggaagaactttatccggcattgttactcttccctgcggagaacaaaagtgcaatagcatatgaagggggaatgtcagtgtctcacttaatcgaatttttggagtctcatgtgagcaattctcgctatctattggaatataaaggatttatgtggaagaagagaatgacaccacagcacgatgcaccacaggcaattcagtttaaagtcagtgataaaggtagcggcaatgttggttctgagttaccaagtcatccaggtgtcgttacaggatccatccttactgccactaagaagctcgggaccgcagttccatttgataatgccaaggtgctcattgtgtcagctgattctcatgaaggatttcatggcttgatcatcaacaagcgattaagctggggtgtcttcaaggatctggatagctcgatggagcctattaagcatgcaccacttttctatggtgggcctgttgtggtgcagggttatcatcttgtaagcttgtcaagagtatcctcggaggggtacatgcaagtcataccaggcgtctattatggcaacatagttgccacaagccgggtagtcacacggatcaagttgggcgagcaatctgtcaatggcctgtggttcttcctaggctactcggggtggggatacaaccaactttttgatgagctaactgaaggagcatggcttgtgagtgtgaagccgattgagcatttggactggccgaagagttgaaagggttctgtggacctcacgcctcagctgtttctttaggaaaattcagttcatcttgcacatatctgccactctgcccacactgcaccgtgacattgtactgagcttttttttggaacatagcagcactgtgttttcataccattcacaccgtactatggtcacatattttttatacatagtacttttcttatagtgaagaacgttttctgtgttcttccttttgatttcattttttgttcgagattttgggcctgtttggttggcacggctccggctccttaaaaaataac

SEQ ID NO: 53030 - DNA, 3971 bp, Zea Mays
ctgaactcgagctcgagtcctcgcgcgaagtcgctggtgctgctgctataccccggccgccgccatgcgcctcctcctcaccgcggcatggccgtgcgctatcctcctcatccttgccagtgcgctacagtcggcaacggtggcgagttccggtgccgctgctgcccgtctggagtggcaggtcctgaccagggccaacttctcgtcccagatccggctccgcccccacgtcctcctcctcgtcacgatgccctggtatggtgagtccagatcactgatggctgacatagaacgtttggttggttccaatgaggagcttagtcgcctcaagctgatggttgtatacaagaattctgaaaagttgctgacagatgctattggtgctgctgaaggaataactgtggtatactaccaacgttccatgcaattcaaatatcaagggaagcttcgtgcacatgatattctgtctgcagtgcgctatatcatgtcacttgaccatgaggagtccccttttgaggttttgcatacacaagaagatgtcgagaccttcatcgaatctaccgataaatccatactcctttatgaatcatgtggatggttcaccagattggctcatggcgggggcaaccaaagttatgaggcagcgtcatcaaataacaacacagaaaacgattctatattctttgatgtgccacagttgacatttctgggaagataatgaccagagaaccagatgggccactagagcttgttatagagaatgaagaacaaacctttggagttgggggtcagcttactggttctccttggaaagttggttttgccttggcaaacgaaagtgtctctgaacaaattggaaacacaaatgatggatatagaaagtgtacaatgcaaaagttccatcaatttgaaagtttctatggaaagcttactgctatagcaagagaatatttgcttccccctgaaatagctaaatttggccttataaccgaaagatcattgttgccttcactggatgttgttaatgaaggcaaccaggatacatggtttgtcatcactcatcatatgggatgcaaaacttgttcagttattgcgaaagatggcgatgatctgagaagtatagtgcaatcccaccataatcttggcattaaggaggttagtgctgatgaaagtagtagagaggctatcttccccagaaacaggccctctgtagttctatttattgatagattatcccactcctcaaaagtcagagatgaaagcaaattagtcctaaagttactaaggcagtatgtgcaaaataattacccatttcatgtcagtaatggggttccaagtagcagtacttccaaagcacgctcaaaagctgtcccttctttgaggaatacaggtatctcagatgcctattctcaaacagcaaggttgagtgcttgggcttctaagcttatggcacttggggacaaaatgtcagttatggtggttaatgatggagatagtatttcttacaaaagttctagccaaggtagtggtgctaatcctgtatatgatgttctcactaagttgctagacaaagcaagaccagggcataagtcaaagaaaacaagaataagtttagtttcacgagatgttggcctaaagatgttgtcagatcattctgaaatcaaagtggttaagtctctatcagttgaagagagtgaatacaaaagaactgatgatgcatctgccactacagctaattccaatgatgatattactgaagcttttgtggatgaaaacacagcaaaagagactgaatatatcaatgatggacaagtaccaagtatacttgagaaatcttcggcaacttaccctgatgaacatgatactgctcgtgaatttaatgatacagaaattgaggacaaaagcataagtgaagcttcagatatgagtgttgatcttaaggaagatgcccccaataatgcagatagtagtagtgaggttggaggtatgctgcataaacacataatggagaaaacagttacagaagcttttcaaattttggaacatgatgaaagaaacttgtacactgaccaagaggaatcagtatcatcaaacgagcaagttgatggatcttcattcctgagtaaaaaaatcagtaaaaccgaagatgcaatttatgaaaacacattcggtctatctgaaggattagaagaaagtgatagaagatgtccccatcatgcaacatgtagctcttcctgtgttcctgtaagagatgacacagactttactgatcaagtaacttcaagtatatctgattaccgttttgctggtgctttctacttctctgatggtggttacagactcctgagaactttaactggtggatcaagaattccgtccctggtaataattgatccagttgaacaaaaacattatatatttcctgaggaaagcgagtatagctatgcttctttacaaaattatcttgacagttttaggaatcgaagtcttccttcatattaccgtggtacctcatcagctataagttcaaaggagtttccaagaccaccttttgttaatcatgatttccatgaggcaaattcgatccctcagttgacagcatttagtttttgtccgttagtatttggacccagaggttgtgattcaaaaagtgaagtatcattttcaaacactgaaaatattgtatctggttggaacaaggatgtaatggtgcttttcagcaactcttggtgtgggttttgtcagcgagcagagctggtggtccgtgagttacaccgatcatttaagagcttttcaagctattcagattctgtatctagaaatgctcaagatgtccacaatgaagagaaaagtgaagaatatgtgatgaagggctttcctgcaatttacatgatagactgcacatcaaatgaatgccaccatttactaaaatctgcaggcatggaagaactttatccggcattgttactcttccctgcggagaacaaaagtgcaatagcatatgaagggggaatgtcagtgtctcacttaatcgaatttttggagtctcatgtgagcaattctcgctatctattggaatataaaggatttatgtggaagaagagaatgacaccacagcacgatgcaccacaggcaattcagtttaaagtcagtgataaaggtagcggcaatgttggttctgagttaccaagtcatccaggtgtcgttacaggatccatccttactgccactaagaagctcgggaccgcagttccatttgataatgccaaggtgctcattgtgtcagctgattctcatgaaggatttcatggcttgatcatcaacaagcgattaagctggggtgtcttcaaggatctggatagctcgatggagcctattaagcatgcaccacttttctatggtgggcctgttgtggtgcagggttatcatcttgtaagcttgtcaagagtatcctcggaggggtacatgcaagtcataccaggcgtctattatggcaacatagttgccacaagccgggtagtcacacggatcaagttgggcgagcaatctgtcaatggcctgtggttcttcctaggctactcggggtggggatacaaccaactttttgatgagctaactgaaggagcatggcttgtgagtgtgaagccgattgagcatttggactggccgaagagttgaaagggttctgtggacctcacgcctcagctgtttctttaggaaaattcagttcatcttgcacatatctgccactctgcccacactgcaccgtgacattgtactgagcttttttttggaacatagcagcactgtgttttcataccattcacaccgtactatggtcacatattttttatacatagtacttttcttatagtgaagaacgttttctgtgttcttccttttgatttcattttttgttcgagattttgggcctgtttggttggcacggctccggctccttaaaaaataac

SEQ ID NO: 53031 - DNA, 4088 bp, Zea Mays
ggggacggctgaactcgagctcgagtcctcgcgcgaagtcgctggtgctgctgctataccccggccgccgccatgcgcctcctcctcaccgcggcatggccgtgcgctatcctcctcatccttgccagtgcgctacagtcggcaacggtggcgagttccggtgccgctgctgcccgtctggagtggcaggtcctgaccagggccaacttctcgtcccagatccggctccgcccccacgtcctcctcctcgtcacgatgccctggtatggtgagtccagatcactgatggctgacatagaacgtttggttggttccaatgaggagcttagtcgcctcaagctgatggttgtatacaagaattctgaaaagttgctgacagatgctattggtgctgctgaaggaataactgtggtatactaccaacgttccatgcaattcaaatatcaagggaagcttcgtgcacatgatattctgtctgcagtgcgctatatcatgtcacttgaccatgaggagtccccttttgaggttttgcatacacaagaagatgtcgagaccttcatcgaatctaccgataaatccatactcctttatgaatcatgtggatggttcaccagattggctcatggcgggggcaaccaaagttatgaggcagcgtcatcaaataacaacacagaaaacgttgacatttctgggaagataatgaccagagaaccagatgggccactagagcttgtaagtgtagtgaagaaggttgcatttatatctgattaattagatactgctatgtttctttgagaagaattatctgaactatgaagattcagcaaatatcagaagaacaatccctgaaaatgtacttatttgagatgacaaacaggttatagagaatgaagaacaaacctttggagttgggggtcagcttactggttctccttggaaagttggttttgccttggcaaacgaaagtgtctctgaacaaattggaaacacaaatgatggatatagaaagtgtacaatgcaaaagttccatcaatttgaaagtttctatggaaagcttactgctatagcaagagaatatttgcttccccctgaaatagctaaatttggccttataaccgaaagatcattgttgccttcactggatgttgttaatgaaggcaaccaggatacatggtttgtcatcactcatcatatgggatgcaaaacttgttcagttattgcgaaagatggcgatgatctgagaagtatagtgcaatcccaccataatcttggcattaaggagtgctgatgaaagtagtagagaggctatcttccccagaaacaggccctctgtagttctatttattgatagattatcccactcctcaaaagtcagagatgaaagcaaattagtcctaaagttactaaggcagtatgtgcaaaataattacccatttcatgtcagtaatggggttccaagtagcagtacttccaaagcacgctcaaaagctgtcccttctttgaggaatacaggtatctcagatgcctattctcaaacagcaaggttgagtgcttgggcttctaagcttatggcacttggggacaaaatgtcagttatggtggttaatgatggagatagtatttcttacaaaagttctagccaaggtagtggtgctaatcctgtatatgatgttctcactaagttgctagacaaagcaagaccagggcataagtcaaagaaaacaagaataagtttagtttcacgagatgttggcctaaagatgttgtcagatcattctgaaatcaaagtggttaagtctctatcagttgaagagagtgaatacaaaagaactgatgatgcatctgccactacagctaattccaatgatgatattactgaagcttttgtggatgaaaacacagcaaaagagactgaatatatcaatgatggacaagtaccaagtatacttgagaaatcttcggcaacttaccctgatgaacatgatactgctcgtgaatttaatgatacagaaattgaggacaaaagcataagtgaagcttcagatatgagtgttgatcttaaggaagatgcccccaataatgcagatagtagtagtgaggttggaggtatgctgcataaacacataatggagaaaacagttacagaagcttttcaaattttggaacatgatgaaagaaacttgtacactgaccaagaggaatcagtatcatcaaacgagcaagttgatggatcttcattcctgagtaaaaaaatcagtaaaaccgaagatgcaatttatgaaaacacattcggtctatctgaaggattagaagaaagtgatagaagatgtccccatcatgcaacatgtagctcttcctgtgttcctgtaagagatgacacagactttactgatcaagtaacttcaagtatatctgattaccgttttgctggtgctttctacttctctgatggtggttacagactcctgagaactttaactggtggatcaagaattccgtccctggtaataattgatccagttgaacaaaaacattatatatttcctgaggaaagcgagtatagctatgcttctttacaaaattatcttgacagttttaggaatcgaagtcttccttcatattaccgtggtacctcatcagctataagttcaaaggagtttccaagaccaccttttgttaatcatgatttccatgaggcaaattcgatccctcagttgacagcatttagtttttgtccgttagtatttggacccagaggttgtgattcaaaaagtgaagtatcattttcaaacactgaaaatattgtatctggttggaacaaggatgtaatggtgcttttcagcaactcttggtgtgggttttgtcagcgagcagagctggtggtccgtgagttacaccgatcatttaagagcttttcaagctattcagattctgtatctagaaatgctcaagatgtccacaatgaagagaaaagtgaagaatatgtgatgaagggctttcctgcaatttacatgatagactgcacatcaaatgaatgccaccatttactaaaatctgcaggaagaactttatccggcattgttactcttccctgcggagaacaaaagtgcaatagcatatgaagggggaatgtcagtgtctcacttaatcgaatttttggagtctcatgtgagcaattctcgctatctattggaatataaaggatttatgtggaagaagagaatgacaccacagcacgatgcaccacaggcaattcagtttaaagtcagtgataaaggtagcggcaatgttggttctgagttaccaagtcatccaggtgtcgttacaggatccatccttactgccactaagaagctcgggaccgcagttccatttgataatgccaaggtgctcattgtgtcagctgattctcatgaaggatttcatggcttgatcatcaacaagcgattaagctggggtgtcttcaaggatctggatagctcgatggagcctattaagcatgcaccacttttctatggtgggcctgttgtggtgcagggttatcatcttgtaagcttgtcaagagtatcctcggaggggtacatgcaagtcataccaggcgtctattatggcaacatagttgccacaagccgggtagtcacacggatcaagttgggcgagcaatctgtcaatggcctgtggttcttcctaggctactcggggtggggatacaaccaactttttgatgagctaactgaaggagcatggcttgtgagtgtgaagccgattgagcatttggactggccgaagagttgaaagggttctgtggacctcacgcctcagctgtttctttaggaaaattcagttcatcttgcacatatctgccactctgcccacactgcaccgtgacattgtactgagcttttttttggaacatagcagcactgtgttttcataccattcacaccgtactatggtcacatattttttatacatagtacttttcttatagtgaagaacgttttctgtgttcttccttttgatttcattttttgttcgagattttgggcctgtttggttggcacggctccggctccttaaaaaataac

SEQ ID NO: 53032 - DNA, 3982 bp, Zea Mays
ctcgagtctcgattctcgaaccaggtccccggacggggacggctgaactcgagctcgagtcctcgcgcgaagtcgctggtgctgctgctataccccggccgccgccatgcgcctcctcctcaccgcggcatggccgtgcgctatcctcctcatccttgccagtgcgctacagtcggcaacggtggcgagttccggtgccgctgctgcccgtctggagtggcaggtcctgaccagggccaacttctcgtcccagatccggctccgcccccacgtcctcctcctcgtcacgatgccctggtatggtgagtccagatcactgatggctgacatagaacgtttggttggttccaatgaggagcttagtcgcctcaagctgatggttgtatacaagaattctgaaaagttgctgacagatgctattggtgctgctgaaggaataactgtggtatactaccaacgttccatgcaattcaaatatcaagggaagcttcgtgcacatgatattctgtctgcagtgcgctatatcatgtcacttgaccatgaggagtccccttttgaggttttgcatacacaagaagatgtcgagaccttcatcgaatctaccgataaatccatactcctttatgaatcatgtggatggttcaccagattggctcatggcgggggcaaccaaagttatgaggcagcgtcatcaaataacaacacagaaaacgttgacatttctgggaagataatgaccagagaaccagatgggccactagagcttgttatagagaatgaagaacaaacctttggagttgggggtcagcttactggttctccttggaaagttggttttgccttggcaaacgaaagtgtctctgaacaaattggaaacacaaatgatggatatagaaagtgtacaatgcaaaagttccatcaatttgaaagtttctatggaaagcttactgctatagcaagagaatatttgcttccccctgaaatagctaaatttggccttataaccgaaagatcattgttgccttcactggatgttgttaatgaaggcaaccaggatacatggtttgtcatcactcatcatatgggatgcaaaacttgttcagttattgcgaaagatggcgatgatctgagaagtatagtgcaatcccaccataatcttggcattaaggaggttagtgctgatgaaagtagtagagaggctatcttccccagaaacaggccctctgtagttctatttattgatagattatcccactcctcaaaagtcagagatgaaagcaaattagtcctaaagttactaaggcagtatgtgcaaaataattacccatttcatgtcagtaatggggttccaagtagcagtacttccaaagcacgctcaaaagctgtcccttctttgaggaatacaggtatctcagatgcctattctcaaacagcaaggttgagtgcttgggcttctaagcttatggcacttggggacaaaatgtcagttatggtggttaatgatggagatagtatttcttacaaaagttctagccaaggtagtggtgctaatcctgtatatgatgttctcactaagttgctagacaaagcaagaccagggcataagtcaaagaaaacaagaataagtttagtttcacgagatgttggcctaaagatgttgtcagatcattctgaaatcaaagtggttaagtctctatcagttgaagagagtgaatacaaaagaactgatgatgcatctgccactacagctaattccaatgatgatattactgaagcttttgtggatgaaaacacagcaaaagagactgaatatatcaatgatggacaagtaccaagtatacttgagaaatcttcggcaacttaccctgatgaacatgatactgctcgtgaatttaatgatacagaaattgaggacaaaagcataagtgaagcttcagatatgagtgttgatcttaaggaagatgcccccaataatgcagatagtagtagtgaggttggaggtatgctgcataaacacataatggagaaaacagttacagaagcttttcaaattttggaacatgatgaaagaaacttgtacactgaccaagaggaatcagtatcatcaaacgagcaagttgatggatcttcattcctgagtaaaaaaatcagtaaaaccgaagatgcaatttatgaaaacacattcggtctatctgaaggattagaagaaagtgatagaagatgtccccatcatgcaacatgtagctcttcctgtgttcctgtaagagatgacacagactttactgatcaagtaacttcaagtatatctgattaccgttttgctggtgctttctacttctctgatggtggttacagactcctgagaactttaactggtggatcaagaattccgtccctggtaataattgatccagttgaacaaaaacattatatatttcctgaggaaagcgagtatagctatgcttctttacaaaattatcttgacagttttaggaatcgaagtcttccttcatattaccgtggtacctcatcagctataagttcaaaggagtttccaagaccaccttttgttaatcatgatttccatgaggcaaattcgatccctcagttgacagcatttagtttttgtccgttagtatttggacccagaggttgtgattcaaaaagtgaagtatcattttcaaacactgaaaatattgtatctggttggaacaaggatgtaatggtgcttttcagcaactcttggtgtgggttttgtcagcgagcagagctggtggtccgtgagttacaccgatcatttaagagcttttcaagctattcagattctgtatctagaaatgctcaagatgtccacaatgaagagaaaagtgaagaatatgtgatgaagggctttcctgcaatttacatgatagactgcacatcaaatgaatgccaccatttactaaaatctgcaggaagaactttatccggcattgttactcttccctgcggagaacaaaagtgcaatagcatatgaagggggaatgtcagtgtctcacttaatcgaatttttggagtctcatgtgagcaattctcgctatctattggaatataaaggatttatgtggaagaagagaatgacaccacagcacgatgcaccacaggcaattcagtttaaagtcagtgataaaggtagcggcaatgttggttctgagttaccaagtcatccaggtgtcgttacaggatccatccttactgccactaagaagctcgggaccgcagttccatttgataatgccaaggtgctcattgtgtcagctgattctcatgaaggatttcatggcttgatcatcaacaagcgattaagctggggtgtcttcaaggatctggatagctcgatggagcctattaagcatgcaccacttttctatggtgggcctgttgtggtgcagggttatcatcttgtaagcttgtcaagagtatcctcggaggggtacatgcaagtcataccaggcgtctattatggcaacatagttgccacaagccgggtagtcacacggatcaagttgggcgagcaatctgtcaatggcctgtggttcttcctaggctactcggggtggggatacaaccaactttttgatgagctaactgaaggagcatggcttgtgagtgtgaagccgattgagcatttggactggccgaagagttgaaagggttctgtggacctcacgcctcagctgtttctttaggaaaattcagttcatcttgcacatatctgccactctgcccacactgcaccgtgacattgtactgagcttttttttggaacatagcagcactgtgttttcataccattcacaccgtactatggtcacatattttttatacatagtacttttcttatagtgaagaacgttttctgtgttcttccttttgatttcattttttgttcgagattttgggcctgtttggttggcacggctccggctccttaaaaaataac

SEQ ID NO: 53033 - DNA, 3984 bp, Zea Mays
ctctcgagtctcgattctcgaaccaggtccccggacggggacggctgaactcgagctcgagtcctcgcgcgaagtcgctggtgctgctgctataccccggccgccgccatgcgcctcctcctcaccgcggcatggccgtgcgctatcctcctcatccttgccagtgcgctacagtcggcaacggtggcgagttccggtgccgctgctgcccgtctggagtggcaggtcctgaccagggccaacttctcgtcccagatccggctccgcccccacgtcctcctcctcgtcacgatgccctggtatggtgagtccagatcactgatggctgacatagaacgtttggttggttccaatgaggagcttagtcgcctcaagctgatggttgtatacaagaattctgaaaagttgctgacagatgctattggtgctgctgaaggaataactgtggtatactaccaacgttccatgcaattcaaatatcaagggaagcttcgtgcacatgatattctgtctgcagtgcgctatatcatgtcacttgaccatgaggagtccccttttgaggttttgcatacacaagaagatgtcgagaccttcatcgaatctaccgataaatccatactcctttatgaatcatgtggatggttcaccagattggctcatggcgggggcaaccaaagttatgaggcagcgtcatcaaataacaacacagaaaacgttgacatttctgggaagataatgaccagagaaccagatgggccactagagcttgttatagagaatgaagaacaaacctttggagttgggggtcagcttactggttctccttggaaagttggttttgccttggcaaacgaaagtgtctctgaacaaattggaaacacaaatgatggatatagaaagtgtacaatgcaaaagttccatcaatttgaaagtttctatggaaagcttactgctatagcaagagaatatttgcttccccctgaaatagctaaatttggccttataaccgaaagatcattgttgccttcactggatgttgttaatgaaggcaaccaggatacatggtttgtcatcactcatcatatgggatgcaaaacttgttcagttattgcgaaagatggcgatgatctgagaagtatagtgcaatcccaccataatcttggcattaaggagtgctgatgaaagtagtagagaggctatcttccccagaaacaggccctctgtagttctatttattgatagattatcccactcctcaaaagtcagagatgaaagcaaattagtcctaaagttactaaggcagtatgtgcaaaataattacccatttcatgtcagtaatggggttccaagtagcagtacttccaaagcacgctcaaaagctgtcccttctttgaggaatacaggtatctcagatgcctattctcaaacagcaaggttgagtgcttgggcttctaagcttatggcacttggggacaaaatgtcagttatggtggttaatgatggagatagtatttcttacaaaagttctagccaaggtagtggtgctaatcctgtatatgatgttctcactaagttgctagacaaagcaagaccagggcataagtcaaagaaaacaagaataagtttagtttcacgagatgttggcctaaagatgttgtcagatcattctgaaatcaaagtggttaagtctctatcagttgaagagagtgaatacaaaagaactgatgatgcatctgccactacagctaattccaatgatgatattactgaagcttttgtggatgaaaacacagcaaaagagactgaatatatcaatgatggacaagtaccaagtatacttgagaaatcttcggcaacttaccctgatgaacatgatactgctcgtgaatttaatgatacagaaattgaggacaaaagcataagtgaagcttcagatatgagtgttgatcttaaggaagatgcccccaataatgcagatagtagtagtgaggttggaggtatgctgcataaacacataatggagaaaacagttacagaagcttttcaaattttggaacatgatgaaagaaacttgtacactgaccaagaggaatcagtatcatcaaacgagcaagttgatggatcttcattcctgagtaaaaaaatcagtaaaaccgaagatgcaatttatgaaaacacattcggtctatctgaaggattagaagaaagtgatagaagatgtccccatcatgcaacatgtagctcttcctgtgttcctgtaagagatgacacagactttactgatcaagtaacttcaagtatatctgattaccgttttgctggtgctttctacttctctgatggtggttacagactcctgagaactttaactggtggatcaagaattccgtccctggtaataattgatccagttgaacaaaaacattatatatttcctgaggaaagcgagtatagctatgcttctttacaaaattatcttgacagttttaggaatcgaagtcttccttcatattaccgtggtacctcatcagctataagttcaaaggagtttccaagaccaccttttgttaatcatgatttccatgaggcaaattcgatccctcagttgacagcatttagtttttgtccgttagtatttggacccagaggttgtgattcaaaaagtgaagtatcattttcaaacactgaaaatattgtatctggttggaacaaggatgtaatggtgcttttcagcaactcttggtgtgggttttgtcagcgagcagagctggtggtccgtgagttacaccgatcatttaagagcttttcaagctattcagattctgtatctagaaatgctcaagatgtccacaatgaagagaaaagtgaagaatatgtgatgaagggctttcctgcaatttacatgatagactgcacatcaaatgaatgccaccatttactaaaatctgcaggcatggaagaactttatccggcattgttactcttccctgcggagaacaaaagtgcaatagcatatgaagggggaatgtcagtgtctcacttaatcgaatttttggagtctcatgtgagcaattctcgctatctattggaatataaaggatttatgtggaagaagagaatgacaccacagcacgatgcaccacaggcaattcagtttaaagtcagtgataaaggtagcggcaatgttggttctgagttaccaagtcatccaggtgtcgttacaggatccatccttactgccactaagaagctcgggaccgcagttccatttgataatgccaaggtgctcattgtgtcagctgattctcatgaaggatttcatggcttgatcatcaacaagcgattaagctggggtgtcttcaaggatctggatagctcgatggagcctattaagcatgcaccacttttctatggtgggcctgttgtggtgcagggttatcatcttgtaagcttgtcaagagtatcctcggaggggtacatgcaagtcataccaggcgtctattatggcaacatagttgccacaagccgggtagtcacacggatcaagttgggcgagcaatctgtcaatggcctgtggttcttcctaggctactcggggtggggatacaaccaactttttgatgagctaactgaaggagcatggcttgtgagtgtgaagccgattgagcatttggactggccgaagagttgaaagggttctgtggacctcacgcctcagctgtttctttaggaaaattcagttcatcttgcacatatctgccactctgcccacactgcaccgtgacattgtactgagcttttttttggaacatagcagcactgtgttttcataccattcacaccgtactatggtcacatattttttatacatagtacttttcttatagtgaagaacgttttctgtgttcttccttttgatttcattttttgttcgagattttgggcctgtttggttggcacggctccggctccttaaaaaataac

SEQ ID NO: 53034 - DNA, 4024 bp, Zea Mays
ctctcgagtctcgattctcgaaccaggtccccggacggggacggctgaactcgagctcgagtcctcgcgcgaagtcgctggtgctgctgctataccccggccgccgccatgcgcctcctcctcaccgcggcatggccgtgcgctatcctcctcatccttgccagtgcgctacagtcggcaacggtggcgagttccggtgccgctgctgcccgtctggagtggcaggtcctgaccagggccaacttctcgtcccagatccggctccgcccccacgtcctcctcctcgtcacgatgccctggtatggtgagtccagatcactgatggctgacatagaacgtttggttggttccaatgaggagcttagtcgcctcaagctgatggttgtatacaagaattctgaaaagttgctgacagatgctattggtgctgctgaaggaataactgtggtatactaccaacgttccatgcaattcaaatatcaagggaagcttcgtgcacatgatattctgtctgcagtgcgctatatcatgtcacttgaccatgaggagtccccttttgaggttttgcatacacaagaagatgtcgagaccttcatcgaatctaccgataaatccatactcctttatgaatcatgtggatggttcaccagattggctcatggcgggggcaaccaaagttatgaggcagcgtcatcaaataacaacacagaaaacgttgacatttctgggaagataatgaccagagaaccagatgggccactagagcttgttatagagaatgaagaacaaacctttggagttgggggtcagcttactggttctccttggaaagttggttttgccttggcaaacgaaagtgtctctgaacaaattggaaacacaaatgatggatatagaaagtgtacaatgcaaaagttccatcaatttgaaagtttctatggaaagcttactgctatagcaagagaatatttgcttccccctgaaatagctaaatttggccttataaccgaaagatcattgttgccttcactggatgttgttaatgaaggcaaccaggatacatggtttgtcatcactcatcatatgggatgcaaaacttgttcagttattgcgaaagatggcgatgatctgagaagtatagtgcaatcccaccataatcttggcattaaggagcccgtgactcttgggtttcattgttatatgcataggttagtgctgatgaaagtagtagagaggctatcttccccagaaacaggccctctgtagttctatttattgatagattatcccactcctcaaaagtcagagatgaaagcaaattagtcctaaagttactaaggcagtatgtgcaaaataattacccatttcatgtcagtaatggggttccaagtagcagtacttccaaagcacgctcaaaagctgtcccttctttgaggaatacaggtatctcagatgcctattctcaaacagcaaggttgagtgcttgggcttctaagcttatggcacttggggacaaaatgtcagttatggtggttaatgatggagatagtatttcttacaaaagttctagccaaggtagtggtgctaatcctgtatatgatgttctcactaagttgctagacaaagcaagaccagggcataagtcaaagaaaacaagaataagtttagtttcacgagatgttggcctaaagatgttgtcagatcattctgaaatcaaagtggttaagtctctatcagttgaagagagtgaatacaaaagaactgatgatgcatctgccactacagctaattccaatgatgatattactgaagcttttgtggatgaaaacacagcaaaagagactgaatatatcaatgatggacaagtaccaagtatacttgagaaatcttcggcaacttaccctgatgaacatgatactgctcgtgaatttaatgatacagaaattgaggacaaaagcataagtgaagcttcagatatgagtgttgatcttaaggaagatgcccccaataatgcagatagtagtagtgaggttggaggtatgctgcataaacacataatggagaaaacagttacagaagcttttcaaattttggaacatgatgaaagaaacttgtacactgaccaagaggaatcagtatcatcaaacgagcaagttgatggatcttcattcctgagtaaaaaaatcagtaaaaccgaagatgcaatttatgaaaacacattcggtctatctgaaggattagaagaaagtgatagaagatgtccccatcatgcaacatgtagctcttcctgtgttcctgtaagagatgacacagactttactgatcaagtaacttcaagtatatctgattaccgttttgctggtgctttctacttctctgatggtggttacagactcctgagaactttaactggtggatcaagaattccgtccctggtaataattgatccagttgaacaaaaacattatatatttcctgaggaaagcgagtatagctatgcttctttacaaaattatcttgacagttttaggaatcgaagtcttccttcatattaccgtggtacctcatcagctataagttcaaaggagtttccaagaccaccttttgttaatcatgatttccatgaggcaaattcgatccctcagttgacagcatttagtttttgtccgttagtatttggacccagaggttgtgattcaaaaagtgaagtatcattttcaaacactgaaaatattgtatctggttggaacaaggatgtaatggtgcttttcagcaactcttggtgtgggttttgtcagcgagcagagctggtggtccgtgagttacaccgatcatttaagagcttttcaagctattcagattctgtatctagaaatgctcaagatgtccacaatgaagagaaaagtgaagaatatgtgatgaagggctttcctgcaatttacatgatagactgcacatcaaatgaatgccaccatttactaaaatctgcaggcatggaagaactttatccggcattgttactcttccctgcggagaacaaaagtgcaatagcatatgaagggggaatgtcagtgtctcacttaatcgaatttttggagtctcatgtgagcaattctcgctatctattggaatataaaggatttatgtggaagaagagaatgacaccacagcacgatgcaccacaggcaattcagtttaaagtcagtgataaaggtagcggcaatgttggttctgagttaccaagtcatccaggtgtcgttacaggatccatccttactgccactaagaagctcgggaccgcagttccatttgataatgccaaggtgctcattgtgtcagctgattctcatgaaggatttcatggcttgatcatcaacaagcgattaagctggggtgtcttcaaggatctggatagctcgatggagcctattaagcatgcaccacttttctatggtgggcctgttgtggtgcagggttatcatcttgtaagcttgtcaagagtatcctcggaggggtacatgcaagtcataccaggcgtctattatggcaacatagttgccacaagccgggtagtcacacggatcaagttgggcgagcaatctgtcaatggcctgtggttcttcctaggctactcggggtggggatacaaccaactttttgatgagctaactgaaggagcatggcttgtgagtgtgaagccgattgagcatttggactggccgaagagttgaaagggttctgtggacctcacgcctcagctgtttctttaggaaaattcagttcatcttgcacatatctgccactctgcccacactgcaccgtgacattgtactgagcttttttttggaacatagcagcactgtgttttcataccattcacaccgtactatggtcacatattttttatacatagtacttttcttatagtgaagaacgttttctgtgttcttccttttgatttcattttttgttcgagattttgggcctgtttggttggcacggctccggctccttaaaaaataac

SEQ ID NO: 53035 - DNA, 3523 bp, Zea Mays
gactacgctgccttctctcccgcgagggcgaaatacacgacacttcgatttcacaaaaccctaggccccaaccacctccctaacatggcgacgctggcgtcggccgtctccgacgtgggcgtcgaagaaccctctccagcaaaggcagctgacccgaaggaaccagcggccgccgtggaggaaccagcggccgccgcggcggaattggcaggggcatccattccatctcccgtcgcggccgcagacgctggagatgcctcttccggtcccgcgcttgccaccactcctcccgcttcacctgccacgtccgcagcgcctcctcccgtttctcccgccccgctagtttctcctgccccgcccgcagagccagggccgccgcggtcgcaatttgcaggctccctatcctacatagcgccagggacaccgtctccgtcggcagctttttcttataacgtactgccgagagcgccaccagcgccccaagttggcggcgctgcagcttcactacagccatgctcttctccggctcttatggttgctcctatacccgcgtcagctcttcagccaccagccccagggcaatattttgggaacagaccttctttctcatataacgtagtttcgcatgctaatgctagattgcctactgggagcaaatcttgctggtccaatttctagatttgttccaccaggttccttgcagcctcccacccctgggcacataactcgccctagtacagcgttcccaggatctatggcaccaaatcctcctggatctattcagttgccgttttcagtgccaagaccatccaatattccttttggtgctattgcacaacagggcagctcagacattaataatttgaaatcggactccccaagggcaccagaggttacaccccaagccatgcagttatctactggcatgccatcaaaatctccttcaacaatcgcaagtgcttctggaagtccttcaatccccatccagacactaacaaattcatcggtgccacctcgccctgaggtatttggagccactagaccatctgtacctgcacaaccttctgcaactgtctctaatccaacaggtttccttgggaggcctatagttccacctgctgctcctttgccccaaacaccaccaccaattgcaacccaaggtggcacaccacagaattctcaacgaccgttttacccgtcctatccttcaggacctggtattgtcccacctcaacctttatggccacaccctcatcctccacaacctactggatttcagcagcctcccttccagtactatccagctggtcctgtaggctctcttggcaggccaataactggggcttctgctgcaactatggcctttgccaatgtgcaaccacctggcgtgtcaactggtggggataggaaagtacaagcatcaacaaatgcaggatctgaacagtccactcatgctgcagctgagccagattctacaggacatggaggtcaagtcactgagcagctggaggacaatagaaatactggagttcaggattcagatgcatggtctgctcacaaaactgaaactggtgttgtatattattacaatgctttgacaggagagtcgacttaccagaaaccaaccggttataagggggagcttgagaaggttgcaacagaaccagttccagtttcttgggataaattggctggtactaactggagcatagtaactacaagtgatggaaagaaatattattatgataacaaacaaaaggttagcagctggcaacttccgccagaggtgtgtgagatcctcaagaatgcggaatctggttccttaaaagaaggttcaacttcactgcaggatgctgcaactatagagaataagggagtaataagcattgatgcaagtactcctgccatacagacaggatgctggtgcttccagtgcgccttcagctctggctacttcatctgctacctctgaattgaatggatccaaaccagctgatgctgcacttaaggggcaactagtggcgaataatggtgagaaattaaaagataacaatggtgatgtgaatatctcagattcttcttcagattcagatgatgaggaacatggaccaagtaaagaggactgcattcgtcagtttaaggtgatgctaaaggaacgaggagttgcaccattttcgaagtgggagaaggaacttccaaaaatagtttttgacccacgctttaaggctattcctagtcactcaacaaggcgggctatatttgaccactatgttcgcacacgtgctgaagaggagcggaaagagaaaagagctgccctgaaggctgcagtagaggcgtataaagaattacttgaagaagcatccgaggacatcaaccagaaaacagactaccaagaattcaaaagaaaatggggtgctgatacaaggtttgaagccttggatcgaaaggaaagggagattctttttagtgagaaagtcaaggctgttcaagaaaaagtccaatcaatgcgcaaagctgtcatagctaatttcaaatcaatgcttcgagaaagtaaagatataacttcaactagccgatgggcaaaagttaaagaaaatttccgtagtgatccaaggtacaaagccatgaagcatgaagaaagggagactatatttaatgaatacatagtggaactaaaatctgctgaacaggaagcagagcaagctgccaaggccaaagtggatgagcaagccaagttaaaggagagggaacgtgaaacacgtaaaaggaaagaaagagaggagcaggagatggaaagagtaaaaatgaagatacgtagaaaagaggctgtgtcatcataccaagctttacttgttgaaatgattaaggatcccaaggcatcgtggactgaatccaaaccaaaacttgaaaaagatccacaaggtcgtgctcgaaatcctgacttaggccaaggtgatgcagaaaagttgtttcgtgaccatgtcaaggacctatatgagcggtgtgtacgtgatttccgggcacttctatctgaggttatcactccagaggtagcagcacggacaacagctgaggggaagacggcaatcaactcctggagtgaggcaaaaggtcatctaagatctgatctaaggtacaataagctaccgagtaaagacaaagagtctatttggcggcgctatgctgatgacttgacgaggaaactcagacaatcagacacgaaggagaaggacaaatcggatacagatgggaaacaacctaggtcctctgatccacctaggcggaggtagcttgtagtaacagtcacttgtacttcctaggtgctgctcctatatttcttactgttgatagttaagggtctgctcgcactcgtctgcaacatttgaatagtcactggctcactgccacttttgatactgagagtttctgtgttgtagggtgttttccttgcaaatgtttttcccgttctggatcagatgatatatttttgcagtatgagtctgacattgcaaaaaaaaaacaa

SEQ ID NO: 53036 - DNA, 3179 bp, Zea Mays
gactacgctgccttctctcccgcgagggcgaaatacacgacacttcgatttcacaaaaccctaggccccaaccacctccctaacatggcgacgctggcgtcggccgtctccgacgtgggcgtcgaagaaccctctccagcaaaggcagctgacccgaaggaaccagcggccgccgtggaggaaccagcggccgccgcggcggaattggcaggggcatccattccatctcccgtcgcggccgcagacgctggagatgcctcttccggtcccgcgcttgccaccactcctcccgcttcacctgccacggagcaaatcttgctggtccaatttctagatttgttccaccaggttccttgcagcctcccacccctgggcacataactcgccctagtacagcgttcccaggatctatggcaccaaatcctcctggatctattcagttgccgttttcagtgccaagaccatccaatattccttttggtgctattgcacaacagggcagctcagacattaataatttgaaatcggactccccaagggcaccagaggttacaccccaagccatgcagttatctactggcatgccatcaaaatctccttcaacaatcgcaagtgcttctggaagtccttcaatccccatccagacactaacaaattcatcggtgccacctcgccctgaggtatttggagccactagaccatctgtacctgcacaaccttctgcaactgtctctaatccaacaggtttccttgggaggcctatagttccacctgctgctcctttgccccaaacaccaccaccaattgcaacccaaggtggcacaccacagaattctcaacgaccgttttacccgtcctatccttcaggacctggtattgtcccacctcaacctttatggccacaccctcatcctccacaacctactggatttcagcagcctcccttccagtactatccagctggtcctgtaggctctcttggcaggccaataactggggcttctgctgcaactatggcctttgccaatgtgcaaccacctggcgtgtcaactggtggggataggaaagtacaagcatcaacaaatgcaggatctgaacagtccactcatgctgcagctgagccagattctacaggacatggaggtcaagtcactgagcagctggaggacaatagaaatactggagttcaggattcagatgcatggtctgctcacaaaactgaaactggtgttgtatattattacaatgctttgacaggagagtcgacttaccagaaaccaaccggttataagggggagcttgagaaggttgcaacagaaccagttccagtttcttgggataaattggctggtactaactggagcatagtaactacaagtgatggaaagaaatattattatgataacaaacaaaaggttagcagctggcaacttccgccagaggtgtgtgagatcctcaagaatgcggaatctggttccttaaaagaaggttcaacttcactgcaggatgctgcaactatagagaataagggagtaataagcattgatgcaagtactcctgccatacagacaggatgctggtgcttccagtgcgccttcagctctggctacttcatctgctacctctgaattgaatggatccaaaccagctgatgctgcacttaaggggcaactagtggcgaataatggtgagaaattaaaagataacaatggtgatgtgaatatctcagattcttcttcagattcagatgatgaggaacatggaccaagtaaagaggactgcattcgtcagtttaaggtgatgctaaaggaacgaggagttgcaccattttcgaagtgggagaaggaacttccaaaaatagtttttgacccacgctttaaggctattcctagtcactcaacaaggcgggctatatttgaccactatgttcgcacacgtgctgaagaggagcggaaagagaaaagagctgccctgaaggctgcagtagaggcgtataaagaattacttgaagaagcatccgaggacatcaaccagaaaacagactaccaagaattcaaaagaaaatggggtgctgatacaaggtttgaagccttggatcgaaaggaaagggagattctttttagtgagaaagtcaaggctgttcaagaaaaagtccaatcaatgcgcaaagctgtcatagctaatttcaaatcaatgcttcgagaaagtaaagatataacttcaactagccgatgggcaaaagttaaagaaaatttccgtagtgatccaaggtacaaagccatgaagcatgaagaaagggagactatatttaatgaatacatagtggaactaaaatctgctgaacaggaagcagagcaagctgccaaggccaaagtggatgagcaagccaagttaaaggagagggaacgtgaaacacgtaaaaggaaagaaagagaggagcaggagatggaaagagtaaaaatgaagatacgtagaaaagaggctgtgtcatcataccaagctttacttgttgaaatgattaaggatcccaaggcatcgtggactgaatccaaaccaaaacttgaaaaagatccacaaggtcgtgctcgaaatcctgacttaggccaaggtgatgcagaaaagttgtttcgtgaccatgtcaaggacctatatgagcggtgtgtacgtgatttccgggcacttctatctgaggttatcactccagaggtagcagcacggacaacagctgaggggaagacggcaatcaactcctggagtgaggcaaaaggtcatctaagatctgatctaaggtacaataagctaccgagtaaagacaaagagtctatttggcggcgctatgctgatgacttgacgaggaaactcagacaatcagacacgaaggagaaggacaaatcggatacagatgggaaacaacctaggtcctctgatccacctaggcggaggtagcttgtagtaacagtcacttgtacttcctaggtgctgctcctatatttcttactgttgatagttaagggtctgctcgcactcgtctgcaacatttgaatagtcactggctcactgccacttttgatactgagagtttctgtgttgtagggtgttttccttgcaaatgtttttcccgttctggatcagatgatatatttttgcagtatgagtctgacattgcaaaaaaaaaacaa

SEQ ID NO: 53037 - DNA, 3543 bp, Zea Mays
ccggactacgctgccttctctcccgcgagggcgaaatacacgacacttcgatttcacaaaaccctaggccccaaccacctccctaacatggcgacgctggcgtcggccgtctccgacgtgggcgtcgaagaaccctctccagcaaaggcagctgacccgaaggaaccagcggccgccgtggaggaaccagcggccgccgcggcggaattggcaggggcatccattccatctcccgtcgcggccgcagacgctggagatgcctcttccggtcccgcgcttgccaccactcctcccgcttcacctgccacgtccgcagcgcctcctcccgtttctcccgccccgctagtttctcctgccccgcccgcagagccagggccgccgcggtcgcaatttgcaggctccctatcctacatagcgccagggacaccgtctccgtcggcagctttttcttataacgtactgccgagagcgccaccagcgccccaagttggcggcgctgcagcttcactacagccatgctcttctccggctcttatggttgctcctatacccgcgtcagctcttcagccaccagccccagggcaatattttgggaacagaccttctttctcatataacgtagtttcgcatgctaatgctagattgcctactggtcagcagtttcaaccgggagcaaatcttgctggtccaatttctagatttgttccaccaggttccttgcagcctcccacccctgggcacataactcgccctagtacagcgttcccaggatctatggcaccaaatcctcctggatctattcagttgccgttttcagtgccaagaccatccaatattccttttggtgctattgcacaacagggcagctcagacattaataatttgaaatcggactccccaagggcaccagaggttacaccccaagccatgcagttatctactggcatgccatcaaaatctccttcaacaatcgcaagtgcttctggaagtccttcaatccccatccagacactaacaaattcatcggtgccacctcgccctgaggtatttggagccactagaccatctgtacctgcacaaccttctgcaactgtctctaatccaacaggtttccttgggaggcctatagttccacctgctgctcctttgccccaaacaccaccaccaattgcaacccaaggtggcacaccacagaattctcaacgaccgttttacccgtcctatccttcaggacctggtattgtcccacctcaacctttatggccacaccctcatcctccacaacctactggatttcagcagcctcccttccagtactatccagctggtcctgtaggctctcttggcaggccaataactggggcttctgctgcaactatggcctttgccaatgtgcaaccacctggcgtgtcaactggtggggataggaaagtacaagcatcaacaaatgcaggatctgaacagtccactcatgctgcagctgagccagattctacaggacatggaggtcaagtcactgagcagctggaggacaatagaaatactggagttcaggattcagatgcatggtctgctcacaaaactgaaactggtgttgtatattattacaatgctttgacaggagagtcgacttaccagaaaccaaccggttataagggggagcttgagaaggttgcaacagaaccagttccagtttcttgggataaattggctggtactaactggagcatagtaactacaagtgatggaaagaaatattattatgataacaaacaaaaggttagcagctggcaacttccgccagaggtgtgtgagatcctcaagaatgcggaatctggttccttaaaagaaggttcaacttcactgcaggatgctgcaactatagagaataagggagtaataagcattgatgcaagtactcctgccatacagacaggatgctggtgcttccagtgcgccttcagctctggctacttcatctgctacctctgaattgaatggatccaaaccagctgatgctgcacttaaggggcaactagtggcgaataatggtgagaaattaaaagataacaatggtgatgtgaatatctcagattcttcttcagattcagatgatgaggaacatggaccaagtaaagaggactgcattcgtcagtttaaggtgatgctaaaggaacgaggagttgcaccattttcgaagtgggagaaggaacttccaaaaatagtttttgacccacgctttaaggctattcctagtcactcaacaaggcgggctatatttgaccactatgttcgcacacgtgctgaagaggagcggaaagagaaaagagctgccctgaaggctgcagtagaggcgtataaagaattacttgaagaagcatccgaggacatcaaccagaaaacagactaccaagaattcaaaagaaaatggggtgctgatacaaggtttgaagccttggatcgaaaggaaagggagattctttttagtgagaaagtcaaggctgttcaagaaaaagtccaatcaatgcgcaaagctgtcatagctaatttcaaatcaatgcttcgagaaagtaaagatataacttcaactagccgatgggcaaaagttaaagaaaatttccgtagtgatccaaggtacaaagccatgaagcatgaagaaagggagactatatttaatgaatacatagtggaactaaaatctgctgaacaggaagcagagcaagctgccaaggccaaagtggatgagcaagccaagttaaaggagagggaacgtgaaacacgtaaaaggaaagaaagagaggagcaggagatggaaagagtaaaaatgaagatacgtagaaaagaggctgtgtcatcataccaagctttacttgttgaaatgattaaggatcccaaggcatcgtggactgaatccaaaccaaaacttgaaaaagatccacaaggtcgtgctcgaaatcctgacttaggccaaggtgatgcagaaaagttgtttcgtgaccatgtcaaggacctatatgagcggtgtgtacgtgatttccgggcacttctatctgaggttatcactccagaggtagcagcacggacaacagctgaggggaagacggcaatcaactcctggagtgaggcaaaaggtcatctaagatctgatctaaggtacaataagctaccgagtaaagacaaagagtctatttggcggcgctatgctgatgacttgacgaggaaactcagacaatcagacacgaaggagaaggacaaatcggatacagatgggaaacaacctaggtcctctgatccacctaggcggaggtagcttgtagtaacagtcacttgtacttcctaggtgctgctcctatatttcttactgttgatagttaagggtctgctcgcactcgtctgcaacatttgaatagtcactggctcactgccacttttgatactgagagtttctgtgttgtagggtgttttccttgcaaatgtttttcccgttctggatcagatgatatatttttgcagtatgagtctgacattgcaaaaaaaaaacaa

SEQ ID NO: 53038 - DNA, 3549 bp, Zea Mays
ccggactacgctgccttctctcccgcgagggcgaaatacacgacacttcgatttcacaaaaccctaggccccaaccacctccctaacatggcgacgctggcgtcggccgtctccgacgtgggcgtcgaagaaccctctccagcaaaggcagctgacccgaaggaaccagcggccgccgtggaggaaccagcggccgccgcggcggaattggcaggggcatccattccatctcccgtcgcggccgcagacgctggagatgcctcttccggtcccgcgcttgccaccactcctcccgcttcacctgccacgtccgcagcgcctcctcccgtttctcccgccccgctagtttctcctgccccgcccgcagagccagggccgccgcggtcgcaatttgcaggctccctatcctacatagcgccagggacaccgtctccgtcggcagctttttcttataacgtactgccgagagcgccaccagcgccccaagttggcggcgctgcagcttcactacagccatgctcttctccggctcttatggttgctcctatacccgcgtcagctcttcagccaccagccccagggcaatattttgggaacagaccttctttctcatataacgtagtttcgcatgctaatgctagattgcctactggtcagcagtttcaaccggtcactggagcaaatcttgctggtccaatttctagatttgttccaccaggttccttgcagcctcccacccctgggcacataactcgccctagtacagcgttcccaggatctatggcaccaaatcctcctggatctattcagttgccgttttcagtgccaagaccatccaatattccttttggtgctattgcacaacagggcagctcagacattaataatttgaaatcggactccccaagggcaccagaggttacaccccaagccatgcagttatctactggcatgccatcaaaatctccttcaacaatcgcaagtgcttctggaagtccttcaatccccatccagacactaacaaattcatcggtgccacctcgccctgaggtatttggagccactagaccatctgtacctgcacaaccttctgcaactgtctctaatccaacaggtttccttgggaggcctatagttccacctgctgctcctttgccccaaacaccaccaccaattgcaacccaaggtggcacaccacagaattctcaacgaccgttttacccgtcctatccttcaggacctggtattgtcccacctcaacctttatggccacaccctcatcctccacaacctactggatttcagcagcctcccttccagtactatccagctggtcctgtaggctctcttggcaggccaataactggggcttctgctgcaactatggcctttgccaatgtgcaaccacctggcgtgtcaactggtggggataggaaagtacaagcatcaacaaatgcaggatctgaacagtccactcatgctgcagctgagccagattctacaggacatggaggtcaagtcactgagcagctggaggacaatagaaatactggagttcaggattcagatgcatggtctgctcacaaaactgaaactggtgttgtatattattacaatgctttgacaggagagtcgacttaccagaaaccaaccggttataagggggagcttgagaaggttgcaacagaaccagttccagtttcttgggataaattggctggtactaactggagcatagtaactacaagtgatggaaagaaatattattatgataacaaacaaaaggttagcagctggcaacttccgccagaggtgtgtgagatcctcaagaatgcggaatctggttccttaaaagaaggttcaacttcactgcaggatgctgcaactatagagaataagggagtaataagcattgatgcaagtactcctgccatacagacaggatgctggtgcttccagtgcgccttcagctctggctacttcatctgctacctctgaattgaatggatccaaaccagctgatgctgcacttaaggggcaactagtggcgaataatggtgagaaattaaaagataacaatggtgatgtgaatatctcagattcttcttcagattcagatgatgaggaacatggaccaagtaaagaggactgcattcgtcagtttaaggtgatgctaaaggaacgaggagttgcaccattttcgaagtgggagaaggaacttccaaaaatagtttttgacccacgctttaaggctattcctagtcactcaacaaggcgggctatatttgaccactatgttcgcacacgtgctgaagaggagcggaaagagaaaagagctgccctgaaggctgcagtagaggcgtataaagaattacttgaagaagcatccgaggacatcaaccagaaaacagactaccaagaattcaaaagaaaatggggtgctgatacaaggtttgaagccttggatcgaaaggaaagggagattctttttagtgagaaagtcaaggctgttcaagaaaaagtccaatcaatgcgcaaagctgtcatagctaatttcaaatcaatgcttcgagaaagtaaagatataacttcaactagccgatgggcaaaagttaaagaaaatttccgtagtgatccaaggtacaaagccatgaagcatgaagaaagggagactatatttaatgaatacatagtggaactaaaatctgctgaacaggaagcagagcaagctgccaaggccaaagtggatgagcaagccaagttaaaggagagggaacgtgaaacacgtaaaaggaaagaaagagaggagcaggagatggaaagagtaaaaatgaagatacgtagaaaagaggctgtgtcatcataccaagctttacttgttgaaatgattaaggatcccaaggcatcgtggactgaatccaaaccaaaacttgaaaaagatccacaaggtcgtgctcgaaatcctgacttaggccaaggtgatgcagaaaagttgtttcgtgaccatgtcaaggacctatatgagcggtgtgtacgtgatttccgggcacttctatctgaggttatcactccagaggtagcagcacggacaacagctgaggggaagacggcaatcaactcctggagtgaggcaaaaggtcatctaagatctgatctaaggtacaataagctaccgagtaaagacaaagagtctatttggcggcgctatgctgatgacttgacgaggaaactcagacaatcagacacgaaggagaaggacaaatcggatacagatgggaaacaacctaggtcctctgatccacctaggcggaggtagcttgtagtaacagtcacttgtacttcctaggtgctgctcctatatttcttactgttgatagttaagggtctgctcgcactcgtctgcaacatttgaatagtcactggctcactgccacttttgatactgagagtttctgtgttgtagggtgttttccttgcaaatgtttttcccgttctggatcagatgatatatttttgcagtatgagtctgacattgcaaaaaaaaaacaa

SEQ ID NO: 53039 - DNA, 1040 bp, Zea Mays
ctggcatgtggaattgtggattgttaattttgacatacatactactatccaaactccaaaggttaaagaaaatttccgtagtgatccaaggtacaaagccatgaagcatgaagaaagggagactatatttaatgaatacatagtggaactaaaatctgctgaacaggaagcagagcaagctgccaaggccaaagtggatgagcaagccaagttaaaggagagggaacgtgaaacacgtaaaaggaaagaaagagaggagcaggagatggaaagagtaaaaatgaagatacgtagaaaagaggctgtgtcatcataccaagctttacttgttgaaatgattaaggatcccaaggcatcgtggactgaatccaaaccaaaacttgaaaaagatccacaaggtcgtgctcgaaatcctgacttaggccaaggtgatgcagaaaagttgtttcgtgaccatgtcaaggacctatatgagcggtgtgtacgtgatttccgggcacttctatctgaggttatcactccagaggtagcagcacggacaacagctgaggggaagacggcaatcaactcctggagtgaggcaaaaggtcatctaagatctgatctaaggtacaataagctaccgagtaaagacaaagagtctatttggcggcgctatgctgatgacttgacgaggaaactcagacaatcagacacgaaggagaaggacaaatcggatacagatgggaaacaacctaggtcctctgatccacctaggcggaggtagcttgtagtaacagtcacttgtacttcctaggtgctgctcctatatttcttactgttgatagttaagggtctgctcgcactcgtctgcaacatttgaatagtcactggctcactgccacttttgatactgagagtttctgtgttgtagggtgttttccttgcaaatgtttttcccgttctggatcagatgatatatttttgcagtatgagtctgacattgcagtaccgtgccaagttgcgtctcccatgctctcaggtctcagccttccatcttt

SEQ ID NO: 53040 - DNA, 1523 bp, Zea Mays
gtttttgtcgagtttcaactatagtctaccgcaacttgcttgggactaaaagactttgtcgttgttgtagcaatatgtagttctttggttaaaactttcaacattgtaatgaattctgcataactgaatgcttcttttggaaagcacaagtttgctcctatgcgttgaccttcttttcattgaggctattcctagtcactcaacaaggcgggctatatttgaccactatgttcgcacacgtgctgaagaggagcggaaagagaaaagagctgccctgaaggctgcagtagaggcgtataaagaattacttgaagaagcatccgaggacatcaaccagaaaacagactaccaagaattcaaaagaaaatggggtgctgatacaaggtttgaagccttggatcgaaaggaaagggagattctttttagtgagaaagtcaaggctgttcaagaaaaagtccaatcaatgcgcaaagctgtcatagctaatttcaaatcaatgcttcgagaaagtaaagatataacttcaactagccgatgggcaaaagttaaagaaaatttccgtagtgatccaaggtacaaagccatgaagcatgaagaaagggagactatatttaatgaatacatagtggaactaaaatctgctgaacaggaagcagagcaagctgccaaggccaaagtggatgagcaagccaagttaaaggagagggaacgtgaaacacgtaaaaggaaagaaagagaggagcaggagatggaaagagtaaaaatgaagatacgtagaaaagaggctgtgtcatcataccaagctttacttgttgaaatgattaaggatcccaaggcatcgtggactgaatccaaaccaaaacttgaaaaagatccacaaggtcgtgctcgaaatcctgacttaggccaaggtgatgcagaaaagttgtttcgtgaccatgtcaaggacctatatgagcggtgtgtacgtgatttccgggcacttctatctgaggttatcactccagaggtagcagcacggacaacagctgaggggaagacggcaatcaactcctggagtgaggcaaaaggtcatctaagatctgatctaaggtacaataagctaccgagtaaagacaaagagtctatttggcggcgctatgctgatgacttgacgaggaaactcagacaatcagacacgaaggagaaggacaaatcggatacagatgggaaacaacctaggtcctctgatccacctaggcggaggtagcttgtagtaacagtcacttgtacttcctaggtgctgctcctatatttcttactgttgatagttaagggtctgctcgcactcgtctgcaacatttgaatagtcactggctcactgccacttttgatactgagagtttctgtgttgtagggtgttttccttgcaaatgtttttcccgttctggatcagatgatatatttttgcagtatgagtctgacattgcagtaccgtgccaagttgcgtctcccatgctctcaggtctcagccttccatcttt

SEQ ID NO: 53041 - DNA, 1938 bp, Zea Mays
ggaataactttatcaacttgagaaggttgcaacagaaccagttccagtttcttgggataaattggctggtactaactggagcatagtaactacaagtgatggaaagaaatattattatgataacaaacaaaaggttagcagctggcaacttccgccagaggtgtgtgagatcctcaagaatgcggaatctggttccttaaaagaaggttcaacttcactgcaggatgctgcaactatagagaataagggagtaataagcattgatgcaagtactcctgccatacagacaggatgctggtgcttccagtgcgccttcagctctggctacttcatctgctacctctgaattgaatggatccaaaccagctgatgctgcacttaaggggcaactagtggcgaataatggtgagaaattaaaagataacaatggtgatgtgaatatctcagattcttcttcagattcagatgatgaggaacatggaccaagtaaagaggactgcattcgtcagtttaaggtgatgctaaaggaacgaggagttgcaccattttcgaagtgggagaaggaacttccaaaaatagtttttgacccacgctttaaggctattcctagtcactcaacaaggcgggctatatttgaccactatgttcgcacacgtgctgaagaggagcggaaagagaaaagagctgccctgaaggctgcagtagaggcgtataaagaattacttgaagaagcatccgaggacatcaaccagaaaacagactaccaagaattcaaaagaaaatggggtgctgatacaaggtttgaagccttggatcgaaaggaaagggagattctttttagtgagaaagtcaaggctgttcaagaaaaagtccaatcaatgcgcaaagctgtcatagctaatttcaaatcaatgcttcgagaaagtaaagatataacttcaactagccgatgggcaaaagttaaagaaaatttccgtagtgatccaaggtacaaagccatgaagcatgaagaaagggagactatatttaatgaatacatagtggaactaaaatctgctgaacaggaagcagagcaagctgccaaggccaaagtggatgagcaagccaagttaaaggagagggaacgtgaaacacgtaaaaggaaagaaagagaggagcaggagatggaaagagtaaaaatgaagatacgtagaaaagaggctgtgtcatcataccaagctttacttgttgaaatgattaaggatcccaaggcatcgtggactgaatccaaaccaaaacttgaaaaagatccacaaggtcgtgctcgaaatcctgacttaggccaaggtgatgcagaaaagttgtttcgtgaccatgtcaaggacctatatgagcggtgtgtacgtgatttccgggcacttctatctgaggttatcactccagaggtagcagcacggacaacagctgaggggaagacggcaatcaactcctggagtgaggcaaaaggtcatctaagatctgatctaaggtacaataagctaccgagtaaagacaaagagtctatttggcggcgctatgctgatgacttgacgaggaaactcagacaatcagacacgaaggagaaggacaaatcggatacagatgggaaacaacctaggtcctctgatccacctaggcggaggtagcttgtagtaacagtcacttgtacttcctaggtgctgctcctatatttcttactgttgatagttaagggtctgctcgcactcgtctgcaacatttgaatagtcactggctcactgccacttttgatactgagagtttctgtgttgtagggtgttttccttgcaaatgtttttcccgttctggatcagatgatatatttttgcagtatgagtctgacattgcagtaccgtgccaagttgcgtctcccatgctctcaggtctcagccttccatcttt

SEQ ID NO: 53042 - DNA, 1360 bp, Zea Mays
aaaggaccaactagctgttaggatttattttatcattttgttgggtttcaactctagtctatcccaacttgcttgggactaaaaggctatgttgatgttgttgttgaggtatattagtgttgaacaagcatgtataggcctatatggtttatggatgagaaagctacatgaagacagcagctatgacgtttctagtactagctacttgttagtgaactccaagtttaccactgcaagaagcaggctgctggggcgaaaatgaagcaaaactggtttttagaggttgcttagctagcaagtaggagaacttgagctgtgcactattaggtcggttcctgtagcaaccgacctgaaagtcctgtaaaagaggcagcaatcctcctgtgtagaagtgggtttgagatatagagaagataaagcctggttgtgaagatcaagctagtgtatggtgtatagtaagctaatgtgtatgtgtgatagtagagcttgattgtgaagatcaagcaatgtgtgtaagcttgtagtgtgaagtcataagatcaatataatacaaactcgtgctactaactacttatgctattgtgtcactagaaacaaagtgattttcgtttccagcattagcaaattcagagtttcattttaagctcaacaaaaatggtcttatctgagttccactgtatagagaaaaatgcttcaggcctcctttggattaaaggatatttttccaaatcctacgtttttcctgtattttgtgctaatttctgtgaaattcctatatcattcctgtgaaattcttgtgttctaaaggaactctcagatgtagttctatttctcatcgaaggaactcacatctgaaagttggcaggaccttggcagctcagcaaacacaaatactgaaccttgtggcttgacgctgattttgaagcccaagtctttcagcaacagaaggatgaagtctcttttcacctcatagtcctagccaaagtcatcacaattgcaagcttcttggaatggtgcaggagctgaatctgttaattttatgtggatatttctaatagctgaggcgatgcttgctgctgcacaagcccaaccgagtctccaacctaatcagtccagacagtgaggatgtgatgatggtcctctcttgcatccctggaagagaagccagtgagatatgcttgttcgcatcgtaagtaatatactcataaacctggaaggtatttacacacattgagacaagatgtagacagatttttatgaaaaattgattgggaaatatgtacaaaaaaaaagctcatgaaatttcactgtgtgggtaatggggataagaacaatccttattgctcatcagagatgtacc

SEQ ID NO: 53043 - DNA, 677 bp, Zea Mays
cgaaaccgtgcctgcattgtacgatgaatgtcgtttcttcccgatccactgtgatcgccatggccagtcatcgttgccccgtcctctggctattgtcgcccctagctccgtcgtcaacgtcgacccgcccatcaacaacaaccccgtttggctccagagttccctcccccgtcggcaaccaggaccttggcagctcagcaaacacaaatactgaaccttgtggcttgacgctgattttgaagcccaagtctttcagcaacagaaggatgaagtctcttttcacctcatagtcctagccaaagtcatcacaattgcaagcttcttggaatggtgcaggagctgaatctgttaattttatgtggatatttctaatagctgaggcgatgcttgctgctgcacaagcccaaccgagtctccaacctaatcagtccagacagtgaggatgtgatgatggtcctctcttgcatccctggaagagaagccagtgagatatgcttgttcgcatcgtaagtaatatactcataaacctggaaggtatttacacacattgagacaagatgtagacagatttttatgaaaaattgattgggaaatatgtacaaaaaaaaagctcatgaaatttcactgtgtgggtaatggggataagaacaatccttattgctcatcagagatgtacc

SEQ ID NO: 53044 - DNA, 765 bp, Zea Mays
gttcttcaagctgatggtggttctacaattaatgaatgatgtgaaccgaagtgttcaagatgcagctatctcttgtattgaggggcttccagtgcgcttttttccctcgatctcgtgtgatctgagtgtgagaaggcttatagtgtgcttgaggttcttcgacctctctataattcccctaagatactggaacaaaagtttagtaagatcttcactaatcactacatagtgcagcactgggctgttaatattttttgtaccatgtgtcataagcatgagaggttgcctgtagagtaccgatgctttattgcagtcttcctcctcgtctgccccaatgtcggcaagtcagccctcttcaacaggatcattgcgtctctgcgagctaatcagttctgtgagcgtctccctagccccaatggcgagtcaattgttgattgccatcagatctcaaagatgccaaatcttgcattcaccatagcaaacaagattttcaccttaacaccagagcagtacatagtgaagttggagcaagcaggacaaactatctgcatcagtgggtttatggcatttgacgtaccgcctcctcgtggtcctctctgctacgctgaacatatctgtactactcttaagtgtgcaatgagggcgtccaccgagggaatcaccgtgcccccgctcgccccctccacgcccgtgcatgtctgcgtccgcccccttcgtctccccgcaatggacgcgtccctacctcatgtctacaacgacaactag

SEQ ID NO: 53045 - DNA, 481 bp, Zea Mays
tggttctacaattaatgaatgatgtgaaccgaagtgttcaagatgcagctatctcttgtattgaggttagttaattccatatttgatattgtctgtgtatgcctacttcagccaacattgtgttttttctagacccatggtgactggtatgatctctatttctattggacttgttcaatttcccaatagttacatcccatatttacaagctggagagattgaaacattttttataacatcttatctattaaaactccatgtcgtttgctccaccaggggcttccagtgcgcttttttccctcgatctcgtgtgatctgagtgtgagaaggcttatagtgtgcttgaggttcttcgacctctctataattcccctaagatactggaacaaaagattctagatgatggtacgacaaattattttaggagtgctttgacataatttaaagcttggaagggagctttctatgatttattttcctg

SEQ ID NO: 53046 - DNA, 2437 bp, Zea Mays
gccccaacgacggtggttcttttcgcctcatctcctaccccgtgtgctcaccggcgttggctatgcaccatcgcatgggtcgcttcctgctcttgccggctctaaccttggtagttgcgtccgcgtgggtcccgatcaccttcgccgacccgcaggccacgctgctcaaccaggggtgcagccagtacaacgccacgcccgcgtccgccttcatcgccgccctcaactccacgttcgccagcctccgcgctaacctctccgctgcaagcagcgtcggtttcgccaccgcggcggaaccgcgcgctgccgccccggcgttcgcgatggcgcagtgccgcccgtacgtcgcgggccgtgactgtgtcgcctgcttcgacgcggccgccgcgggactccgcgccacctgcgtcgcgggccgcgcggccaacggcgggcgcgccatcctcgacggctgcatgctccggtacgagagcgcggccttcttcgaccagtctacgctcccgggcaacacgcagctctgcaacggctccgccgtccaagccggcggcttcgcggacgcagcgcgggcgctggtcgccgacttcgcggcggccgtgcctcgcgtccctgggctagccgccgcggccgcgagcggcggcgtgtacgcggcggcgcagtgcgtggagacggtcggggaagccggttgcgcgcagtgcctcaacgtggcggtggggaacatcgatgggtgcccacccaactccgacggccgtgccgtggacgccggctgcttcatgagatactctgataggtctttcttcccagcgaactcgacgactgtggacctcgcgatatacttgcggggctacactgctccagagtatgcgattcatggccaactatcagaaaaggttgacacatacagctttggtgttgtcgtcttggaaatattaagtggtcggaagagcaatgatacaaggcttgagcctgaaacacagtacctgcttgaatgggtatccttcattgatcattgttctgaaacctccctcttcttggtgcatgcattaccctccattgctgccatatctcatatttttcatgcatgattttataagtctgtaatttatgcttatggttttattttactttcttaataactgagtgagatgaacactccttcactggattttcactatatgcttctgaaggtttaacaaacaattgacaaagttccagcacacagcatagccttctagtgttttcttattagttttcatcaggatctggcttggataatgtgaccagatcaaatgtaattaatattttgttctctatgaatacttatggtgcctaggtccctttttgatcaccccctatgtttgcacaggcctggaagctatatgaaagtgacaacttaatggccttgctggatgagtcacttgatcctgaagaatatagaccggacgaggtaaaaaggataatggagatagcccttctctgcactcaatcagctgttgctgcaaggccaatgatgtcagaagtggttgtgttgttgttgacaagagatgatccagaggtccagcccacaaggcccacttttatcgatgcaacaagcagagtgcgaggcgaaacatcctcctccagttcgtcttctgcctcgaaggccaccatatcagtttctcagttttcggccagccaccgccgctgcccctccatcccacctctggcctcgccgctgccagagcagagcggcggcgattcccgcgcgctcctgctaggacggcggcggcgaggagttctcccctcactctgcctctcctcgcggacatgcgacgtggctgccgtgttgggagtcagtgccgcgtctccctgggcgagcgttgtggctcgtgctgcgaggccggcgcgcgcttcgcctggtggctcgaggcggcggatggaacggggtcacctctcatctgatcttcgttttctcgctggggtggtgtctgcttgggcgttggctgttcggttggagagtggcgtcctgtggcccgggggagtgtgccagcagggctgcacggctagccgggttggcagcggcggggcccttgtctcgtttggtggcttggcaatgcgaggtgacgcggaccggctgacatcgccgctccagcaccgcgtggggcttggcgaggccgcctggccgtctgtggttgtcagcgccgacaccgagattctgatatttgccatcagcaagaaacagacaacgggggagcaggcaacaaagctggtggcgagccgaggaaggagccgctacatggacgccgcgggtgaaacgccggaacgtgagagtttctgggccggaatgggccgtgcactctggatccaagcagcaactgtccgcggcgtactcgtgccaccaccgcagctatggagtacaccgacgccagtaaccgtcaggtgctcgaggaaatgcgcctga

SEQ ID NO: 53047 - DNA, 1643 bp, Zea Mays
cagttccaggttacgcctccacagtccacactccctagttccaattccaatccaatccccattactccagctatcagtacggcagtaccaccccacctgaccgccccaacgacggtggttcttttcgcctcatctcctaccccgtgtgctcaccggcgttggctatgcaccatcgcatgggtcgcttcctgctcttgccggctctaaccttggtagttgcgtccgcgtgggtcccgatcaccttcgccgacccgcaggccacgctgctcaaccaggggtgcagccagtacaacgccacgcccgcgtccgccttcatcgccgccctcaactccacgttcgccagcctccgcgctaacctctccgctgcaagcagcgtcggtttcgccaccgcggcggaaccgcgcgctgccgccccggcgttcgcgatggcgcagtgccgcccgtacgtcgcgggccgtgactgtgtcgcctgcttcgacgcggccgccgcgggactccgcgccacctgcgtcgcgggccgcgcggccaacggcgggcgcgccatcctcgacggctgcatgctccggtacgagagcgcggccttcttcgaccagtctacgctcccgggcaacacgcagctctgcaacggctccgccgtccaagccggcggcttcgcggacgcagcgcgggcgctggtcgccgacttcgcggcggccgtgcctcgcgtccctgggctagccgccgcggccgcgagcggcggcgtgtacgcggcggcgcagtgcgtggagacggtcggggaagccggttgcgcgcagtgcctcaacgtggcggtggggaacatcgatgggtgcccacccaactccgacggccgtgccgtggacgccggctgcttcatgagatactctgataggtctttcttcccagcgaactcgacgactgtggacctcgcgatatacttgcggtccggggctacactgctccagagtatgcgattcatggccaactatcagaaaaggttgacacatacagctttggtgttgtcgtcttggaaatattaagtggtcggaagagcaatgatacaaggcttgagcctgaaacacagtacctgcttgaatgggcctggaagctatatgaaagtgacaacttaatggccttgctggatgagtcacttgatcctgaagaatatagaccggacgaggtaaaaaggataatggagatagcccttctctgcactcaatcagctgttgctgcaaggccaatgatgtcagaagtggttgtgttgttgttgacaagagatgatccagaggtccagcccacaaggcccacttttatcgatgcaacaagcagagtgcgaggcgaaacatcctcctccagttcgtcttctgcctcgaaggccaccatatcagtttctcagttttcggccaggtaaaaagcatcgttatatgacttctcttcttttttctgtagtaacaatatttgtaatcagtataggtacatatgatatatctatattagcagggagtgactgattccttgtcagcatatatgacagctagcagtgtaaatcatttgaaatttcccttttgttcttgtactatgtaagttgtaattatccatatgcttgtgaggttcacgtgcatgttttataatgtgcttactgcttt

SEQ ID NO: 53048 - DNA, 1639 bp, Zea Mays
ccagttccaggttacgcctccacagtccacactccctagttccaattccaatccaatccccattactccagctatcagtacggcagtaccaccccacctgaccgccccaacgacggtggttcttttcgcctcatctcctaccccgtgtgctcaccggcgttggctatgcaccatcgcatgggtcgcttcctgctcttgccggctctaaccttggtagttgcgtccgcgtgggtcccgatcaccttcgccgacccgcaggccacgctgctcaaccaggggtgcagccagtacaacgccacgcccgcgtccgccttcatcgccgccctcaactccacgttcgccagcctccgcgctaacctctccgctgcaagcagcgtcggtttcgccaccgcggcggaaccgcgcgctgccgccccggcgttcgcgatggcgcagtgccgcccgtacgtcgcgggccgtgactgtgtcgcctgcttcgacgcggccgccgcgggactccgcgccacctgcgtcgcgggccgcgcggccaacggcgggcgcgccatcctcgacggctgcatgctccggtacgagagcgcggccttcttcgaccagtctacgctcccgggcaacacgcagctctgcaacggctccgccgtccaagccggcggcttcgcggacgcagcgcgggcgctggtcgccgacttcgcggcggccgtgcctcgcgtccctgggctagccgccgcggccgcgagcggcggcgtgtacgcggcggcgcagtgcgtggagacggtcggggaagccggttgcgcgcagtgcctcaacgtggcggtggggaacatcgatgggtgcccacccaactccgacggccgtgccgtggacgccggctgcttcatgagatactctgataggtctttcttcccagcgaactcgacgactgtggacctcgcgatatacttgcggggctacactgctccagagtatgcgattcatggccaactatcagaaaaggttgacacatacagctttggtgttgtcgtcttggaaatattaagtggtcggaagagcaatgatacaaggcttgagcctgaaacacagtacctgcttgaatgggcctggaagctatatgaaagtgacaacttaatggccttgctggatgagtcacttgatcctgaagaatatagaccggacgaggtaaaaaggataatggagatagcccttctctgcactcaatcagctgttgctgcaaggccaatgatgtcagaagtggttgtgttgttgttgacaagagatgatccagaggtccagcccacaaggcccacttttatcgatgcaacaagcagagtgcgaggcgaaacatcctcctccagttcgtcttctgcctcgaaggccaccatatcagtttctcagttttcggccaggtaaaaagcatcgttatatgacttctcttcttttttctgtagtaacaatatttgtaatcagtataggtacatatgatatatctatattagcagggagtgactgattccttgtcagcatatatgacagctagcagtgtaaatcatttgaaatttcccttttgttcttgtactatgtaagttgtaattatccatatgcttgtgaggttcacgtgcatgttttataatgtgcttactgcttt

SEQ ID NO: 53049 - DNA, 409 bp, Zea Mays
gccagctttctttcttatgatgaatctgtcgtcagtgtcataatctttcctgttgcacagcctggtgaaattgccggtcgtagaagttcaactgaactggctcatgtatggaacaaggcggtggacgagactcttgggaaacttgttgtgtaccttagctctcgtggatggtgatccaagcaccatgtcgaacatggcaactgaggaggcacgggtggaggaagactcttttttgaagccactgatgtgctcatatttctctgtcaatgttctggcccctgtgaaaggcaggattcgtctaactattttgcatatatctattgaaaataaagccttcgtccaaaaagattgcaagtataggttgcgtgcagatcaaaccagtttaactgatggaggttatagtattaac

SEQ ID NO: 53050 - DNA, 2753 bp, Zea Mays
ccacaacaaggtagaggcgtccgaggcctcgccataattccaacccactgtgtgtgccgctgtagcagcgcagcgcagcgcgcgcgccaccaccgtcaacctcctgatctccccgcctcgccgccgtcgattcttcgccgtcttcctggggctcgggggcagccggagcaagcttgggggggtggtgtcctcggaccgacgacagagtcgttgcccgcgaagatgccggccctggtgtacattcctactccgctttgcccggtgccagagcgtttctcccggagtagcggttgcgccgcctcatgatctgccaattggaacccctgggcgtgcgcagaggaggttgctctgcagctggacagtgatcgcgtttggtgggtgtggcggcggtggaggaagacgacacgacgaagacgaggaggtcaggaggccatgaaggaggcgggcgaggagaggtgccttgacccgcagctgtggcacgcgtgcgccggcggcatggtgcagatgccccccgtgcgctcccgtgtctactacttcccgcagggccacgcggaacacgcgcacggcggcggcggcgccacggacctcgccggggcgcgggcgcgacctctcccgccgctcgtgctctgcaccgtcgccggggtgcgcttcctggccgatccggagaccgacgaggtcttcgccaagatccgcctcgtgccggccgcgcccggcgaggtggagttcggagagccccgcgagttcggcatcgaccccgaggacgcccgggagaagctgtcctccttcgccaagacgctcacgcagtccgacgccaacaacggcggcggcttctccgtgccgcgctactgcgccgagaccatcttccccaagctcgactaccgggccgacccgccggtgcagacggtgctcgccaaggacgtgcacggggaggtctggaagttccgccacattttccggggcacgccgcgccggcatttgctcaccacgggatggagcgcgttcgtcaaccagaagaagctcgtcgccggggactccatcgtcttcctgcgcaccgagcatggcgagctgtgcgtcgggatacgccgtgccaagcgggtgtcctgtggtggcatggagtgcatctctggctggaacgccccggtgtacggggccttgtcggcgttcttgaaggacgaggaaggtaagatcactaagggtcctggtgggtacatgagaggcagggggaaggtggagatcacggacgttgttgaggccgcaagcttagccgcgagcgggcagccatttgaggtggtgtactacccgagagctagcactccagagtttgttgtgaaggctgcatcggtacagaacgcgatgaggaaccagtggtgccctgggatgaggttcaagatggcatttgagacagaggattcgtcaaggatcagctggtttatggggacgatagcttctgctcaggttgctgacacaatcagatggccaaattcaccgtggaggcttcttcagacttgctgcagaatgtgaaatgtgtcaatccatggcttgtggagattgtatcaagcattccaccgattcacctagggacattttctccacctagaaagaagttgcgggtggcccaacatccagactttccatttgagggtcagctgttgaatccaattttccatggcaacccacttggtccaagcaacagcccacttcgctgtttctcggacatcgctcctgcaggcatacagggagccaggcatgctcaatttggtttacccctaacagactaccagcttaaccagctgcacctcggtttcaaccggcttggtgctatgactccgacgccccgtatatccaagggttttgtgatcagcagcgcaccagccagtgagagtgtctcttgcttgctgacaatcggcacaccacaggccacagagaaatctgatgacataaagagaccccacataatgctgttcggaaagcctatccttactgagcagcagatggattctggaggatcgagggaaggcctatcccaagaccgcaaggcttctgagcttgggctagaagacgggcactgcaaggtgtttatggaatcagaggatgttggccgcaccattgacctatctgtctttggttcgtacgaagagctgtacggccagttagcggacatgtttggaattgagaaggcggaaataatgaggcacctttgctaccgtgatgctgctggtgctgtcaggcatactggtgaagagccgttcaatgacttcatgaaagtagcacggaggctcaccattatagagggcacggaggggagaccgcagaaacctctcgtggaatacatggtcgagcgggcttgattgcatggtggttcggacaaggcaatctgaaacttgtgcaagactgagcttagagcgaagtaactgctgtgtgttttcatttgtgtttgtctgccgccgaagcagaatcgcgatgcttgtctggtcgtgtggaaaaccttggtgtacgcttcgtgacttggtcgttagaactctgtcgtggtcagttgtgttttgcttggtcgaagttgatgaataacctctttgacgaattagcttggaataaagttcgagttgttgtgttatggtaagtgccatggcaacatggcaattcagttgtcactgtcgatttagttaaaatgcgtgtatctgttattacagtttgacaacacttattcatttcatcagcatacttgtggccggttatctatcgccagtttgggaaca

SEQ ID NO: 53051 - DNA, 2725 bp, Zea Mays
ccacaacaaggtagaggcgtccgaggcctcgccataattccaacccactgtgtgtgccgctgtagcagcgcagcgcagcgcgcgcgccaccaccgtcaacctcctgatctccccgcctcgccgccgtcgattcttcgccgtcttcctggggctcgggggcagccggagcaagcttgggggggtggtgtcctcggaccgacgacagagtcgttgcccgcgaagatgccggccctggtgtacattcctactccgctttgcccggtgccagagcgtttctcccggagtagcggttgcgccgcctcatgatctgccaattggaacccctgggcgtgcgcagaggaggttgctctgcagctggacagtgatcgcgtttggtgggtgtggcggcggtggaggaagacgacacgacgaagacgaggaggtcaggaggccatgaaggaggcgggcgaggagaggtgccttgacccgcagctgtggcacgcgtgcgccggcggcatggtgcagatgccccccgtgcgctcccgtgtctactacttcccgcagggccacgcggaacacgcgcacggcggcggcggcgccacggacctcgccggggcgcgggcgcgacctctcccgccgctcgtgctctgcaccgtcgccggggtgcgcttcctggccgatccggagaccgacgaggtcttcgccaagatccgcctcgtgccggccgcgcccggcgaggtggagttcggagagccccgcgagttcggcatcgaccccgaggacgcccgggagaagctgtcctccttcgccaagacgctcacgcagtccgacgccaacaacggcggcggcttctccgtgccgcgctactgcgccgagaccatcttccccaagctcgactaccgggccgacccgccggtgcagacggtgctcgccaaggacgtgcacggggaggtctggaagttccgccacattttccggggcacgccgcgccggcatttgctcaccacgggatggagcgcgttcgtcaaccagaagaagctcgtcgccggggactccatcgtcttcctgcgcaccgagcatggcgagctgtgcgtcgggatacgccgtgccaagcgggtgtcctgtggtggcatggagtgcatctctggctggaacgccccggtgtacggggccttgtcggcgttcttgaaggacgaggaaggtggagatcacggacgttgttgaggccgcaagcttagccgcgagcgggcagccatttgaggtggtgtactacccgagagctagcactccagagtttgttgtgaaggctgcatcggtacagaacgcgatgaggaaccagtggtgccctgggatgaggttcaagatggcatttgagacagaggattcgtcaaggatcagctggtttatggggacgatagcttctgctcaggttgctgacacaatcagatggccaaattcaccgtggaggcttcttcaggtgtcatgggatgaaccagacttgctgcagaatgtgaaatgtgtcaatccatggcttgtggagattgtatcaagcattccaccgattcacctagggacattttctccacctagaaagaagttgcgggtggcccaacatccagactttccatttgagggtcagctgttgaatccaattttccatggcaacccacttggtccaagcaacagcccacttcgctgtttctcggacatcgctcctgcaggcatacagggagccaggcatgctcaatttggtttacccctaacagactaccagcttaaccagctgcacctcggtttcaaccggcttggtgctatgactccgacgccccgtatatccaagggttttgtgatcagcagcgcaccagccagtgagagtgtctcttgcttgctgacaatcggcacaccacaggccacagagaaatctgatgacataaagagaccccacataatgctgttcggaaagcctatccttactgagcagcagatggattctggaggatcgagggaaggcctatcccaagaccgcaaggcttctgagcttgggctagaagacgggcactgcaaggtgtttatggaatcagaggatgttggccgcaccattgacctatctgtctttggttcgtacgaagagctgtacggccagttagcggacatgtttggaattgagaaggcggaaataatgaggcacctttgctaccgtgatgctgctggtgctgtcaggcatactggtgaagagccgttcaatgacttcatgaaagtagcacggaggctcaccattatagagggcacggaggggagaccgcagaaacctctcgtggaatacatggtcgagcgggcttgattgcatggtggttcggacaaggcaatctgaaacttgtgcaagactgagcttagagcgaagtaactgctgtgtgttttcatttgtgtttgtctgccgccgaagcagaatcgcgatgcttgtctggtcgtgtggaaaaccttggtgtacgcttcgtgacttggtcgttagaactctgtcgtggtcagttgtgttttgcttggtcgaagttgatgaataacctctttgacgaattagcttggaataaagttcgagttgttgtgttatggtaagtgccatggcaacatggcaattcagttgtcactgtcgatttagttaaaatgcgtgtatctgttattacagtttgacaacacttattcatttcatcagcatacttgtggccggttatctatcgccagtttgggaaca

SEQ ID NO: 53052 - DNA, 2875 bp, Zea Mays
gtcatcaccacaacaaggtagaggcgtccgaggcctcgccataattccaacccactgtgtgtgccgctgtagcagcgcagcgcagcgcgcgcgccaccaccgtcaacctcctgatctccccgcctcgccgccgtcgattcttcgccgtcttcctggggctcgggggcagccggagcaagcttgggggggtggtgtcctcggaccgacgacagagtcgttgcccgcgaagatgccggccctggtgtacattcctactccgctttgcccggtgccagagcgtttctcccggagtagcggttgcgccgcctcatgatctgccaattggaacccctgggcgtgcgcagaggaggttgctctgcagctggacagtgatcgcgtttggtgggtgtggcggcggtggaggaagacgacacgacgaagacgaggaggtcaggaggccatgaaggaggcgggcgaggagaggtgccttgacccgcagctgtggcacgcgtgcgccggcggcatggtgcagatgccccccgtgcgctcccgtgtctactacttcccgcagggccacgcggaacacgcgcacggcggcggcggcgccacggacctcgccggggcgcgggcgcgacctctcccgccgctcgtgctctgcaccgtcgccggggtgcgcttcctggccgatccggagaccgacgaggtcttcgccaagatccgcctcgtgccggccgcgcccggcgaggtggagttcggagagccccgcgagttcggcatcgaccccgaggacgcccgggagaagctgtcctccttcgccaagacgctcacgcagtccgacgccaacaacggcggcggcttctccgtgccgcgctactgcgccgagaccatcttccccaagctcgactaccgggccgacccgccggtgcagacggtgctcgccaaggacgtgcacggggaggtctggaagttccgccacattttccggggcacgccgcgccggcatttgctcaccacgggatggagcgcgttcgtcaaccagaagaagctcgtcgccggggactccatcgtcttcctgcgcaccgagcatggcgagctgtgcgtcgggatacgccgtgccaagcgggtgtcctgtggtggcatggagtgcatctctggctggaacgccccggtgtacggggccttgtcggcgttcttgaaggacgaggaaggtaagatcactaagggtcctggtgggtacatgagaggcagggggaaggtggagatcacggacgttgttgaggccgcaagcttagccgcgagcgggcagccatttgaggtggtgtactacccgagagctagcactccagagtttgttgtgaaggctgcatcggtacagaacgcgatgaggaaccagtggtgccctgggatgaggttcaagatggcatttgagacagaggattcgtcaaggatcagctggtttatggggacgatagcttctgctcaggttgctgacacaatcagatggccaaattcaccgtggaggcttcttcaggtcgagtttttttggttcacactagaaggtgcacctgaaagatgaccaacacacagcgcatggtgctctaccgtttgttgctcacataaaccatctgtgtcatgggatgaaccagacttgctgcagaatgtgaaatgtgtcaatccatggcttgtggagattgtatcaagcattccaccgattcacctagggacattttctccacctagaaagaagttgcgggtggcccaacatccagactttccatttgagggtcagctgttgaatccaattttccatggcaacccacttggtccaagcaacagcccacttcgctgtttctcggacatcgctcctgcaggcatacagggagccaggcatgctcaatttggtttacccctaacagactaccagcttaaccagctgcacctcggtttcaaccggcttggtgctatgactccgacgccccgtatatccaagggttttgtgatcagcagcgcaccagccagtgagagtgtctcttgcttgctgacaatcggcacaccacaggccacagagaaatctgatgacataaagagaccccacataatgctgttcggaaagcctatccttactgagcagcagatggattctggaggatcgagggaaggcctatcccaagaccgcaaggcttctgagcttgggctagaagacgggcactgcaaggtgtttatggaatcagaggatgttggccgcaccattgacctatctgtctttggttcgtacgaagagctgtacggccagttagcggacatgtttggaattgagaaggcggaaataatgaggcacctttgctaccgtgatgctgctggtgctgtcaggcatactggtgaagagccgttcaatgacttcatgaaagtagcacggaggctcaccattatagagggcacggaggggagaccgcagaaacctctcgtggaatacatggtcgagcgggcttgattgcatggtggttcggacaaggcaatctgaaacttgtgcaagactgagcttagagcgaagtaactgctgtgtgttttcatttgtgtttgtctgccgccgaagcagaatcgcgatgcttgtctggtcgtgtggaaaaccttggtgtacgcttcgtgacttggtcgttagaactctgtcgtggtcagttgtgttttgcttggtcgaagttgatgaataacctctttgacgaattagcttggaataaagttcgagttgttgtgttatggtaagtgccatggcaacatggcaattcagttgtcactgtcgatttagttaaaatgcgtgtatctgttattacagtttgacaacacttattcatttcatcagcatacttgtggccggttatctatcgccagtttgggaaca

SEQ ID NO: 53053 - DNA, 2894 bp, Zea Mays
ctctcccgaacccgatggtggtgggagtaggtactcgctgtcccgtgtgccgcgcagctgttcgctgttcgcgcgggcgcggcggatccggtggtggggtcgcgctcccacactggggcctgactgtggtgctgtgctactgcagctgcagcggggagagcggcccactcatcagtcatcaccacaacaaggtagaggcgtccgaggcctcgccataattccaacccactgtgtgtgccgctgtagcagcgcagcgcagcgcgcgcgccaccaccgtcaacctcctgatctccccgcctcgccgccgtcgattcttcgccgtcttcctggggctcgggggcagccggagcaagcttgggggggtggtgtcctcggaccgacgacagagtcgttgcccgcgaagatgccggccctggtgtacattcctactccgctttgcccggtgccagagcgtttctcccggagtagcggttgcgccgcctcatgatctgccaattggaacccctgggcgtgcgcagaggagctggacagtgatcgcgtttggtgggtgtggcggcggtggaggaagacgacacgacgaagacgaggaggtcaggaggccatgaaggaggcgggcgaggagaggtgccttgacccgcagctgtggcacgcgtgcgccggcggcatggtgcagatgccccccgtgcgctcccgtgtctactacttcccgcagggccacgcggaacacgcgcacggcggcggcggcgccacggacctcgccggggcgcgggcgcgacctctcccgccgctcgtgctctgcaccgtcgccggggtgcgcttcctggccgatccggagaccgacgaggtcttcgccaagatccgcctcgtgccggccgcgcccggcgaggtggagttcggagagccccgcgagttcggcatcgaccccgaggacgcccgggagaagctgtcctccttcgccaagacgctcacgcagtccgacgccaacaacggcggcggcttctccgtgccgcgctactgcgccgagaccatcttccccaagctcgactaccgggccgacccgccggtgcagacggtgctcgccaaggacgtgcacggggaggtctggaagttccgccacattttccggggcacgccgcgccggcatttgctcaccacgggatggagcgcgttcgtcaaccagaagaagctcgtcgccggggactccatcgtcttcctgcgcaccgagcatggcgagctgtgcgtcgggatacgccgtgccaagcgggtgtcctgtggtggcatggagtgcatctctggctggaacgccccggtgtacggggccttgtcggcgttcttgaaggacgaggaaggtggagatcacggacgttgttgaggccgcaagcttagccgcgagcgggcagccatttgaggtggtgtactacccgagagctagcactccagagtttgttgtgaaggctgcatcggtacagaacgcgatgaggaaccagtggtgccctgggatgaggttcaagatggcatttgagacagaggattcgtcaaggatcagctggtttatggggacgatagcttctgctcaggttgctgacacaatcagatggccaaattcaccgtggaggcttcttcaggtgtcatgggatgaaccagacttgctgcagaatgtgaaatgtgtcaatccatggcttgtggagattgtatcaagcattccaccgattcacctagggacattttctccacctagaaagaagttgcgggtggcccaacatccagactttccatttgagggtcagctgttgaatccaattttccatggcaacccacttggtccaagcaacagcccacttcgctgtttctcggacatcgctcctgcaggcatacagggagccaggcatgctcaatttggtttacccctaacagactaccagcttaaccagctgcacctcggtttcaaccggcttggtgctatgactccgacgccccgtatatccaagggttttgtgatcagcagcgcaccagccagtgagagtgtctcttgcttgctgacaatcggcacaccacaggccacagagaaatctgatgacataaagagaccccacataatgctgttcggaaagcctatccttactgagcagcagatggattctggaggatcgagggaaggcctatcccaagaccgcaaggcttctgagcttgggctagaagacgggcactgcaaggtgtttatggaatcagaggatgttggccgcaccattgacctatctgtctttggttcgtacgaagagctgtacggccagttagcggacatgtttggaattgagaaggcggaaataatgaggcacctttgctaccgtgatgctgctggtgctgtcaggcatactggtgaagagccgttcaatgacttcatgaaagtagcacggaggctcaccattatagagggcacggaggggagaccgcagaaacctctcgtggaatacatggtcgagcgggcttgattgcatggtggttcggacaaggcaatctgaaacttgtgcaagactgagcttagagcgaagtaactgctgtgtgttttcatttgtgtttgtctgccgccgaagcagaatcgcgatgcttgtctggtcgtgtggaaaaccttggtgtacgcttcgtgacttggtcgttagaactctgtcgtggtcagttgtgttttgcttggtcgaagttgatgaataacctctttgacgaattagcttggaataaagttcgagttgttgtgttatggtaagtgccatggcaacatggcaattcagttgtcactgtcgatttagttaaaatgcgtgtatctgttattacagtttgacaacacttattcatttcatcagcatacttgtggccggttatctatcgccagtttgggaaca

SEQ ID NO: 53054 - DNA, 1460 bp, Zea Mays
agctacaagctagaacaaggccatccattccaccacccttgtagtagtgcgcgctgttcgcttgcactagctagccagcagcgtgcgcaccacctctcgccgcggcagcgacgacgacgggaggcttgttgagagctagctagctagctcagcgagttcgagagcctgtgtgctagagagacagacagagagagagaaaacatactcctcctctgcacacaggggagctagaagctagcgttaattatagcacagctagccgcaaccgtcgcaggatatatatatagacgacagcaccgatcgagagtagtacgtgaggccggcatgacgatgaggcagtcgaggttcaagaggatctgcgtgttctgcggcagcagccaggggaagaagcggagctaccatgacgccgccattgagctcggcaacgagctggtggcccggagcgtcgacctggtgtacggcggcggcagcatcgggctcatgggcctcgtctcccaggccgtctacgacggcggccggcacgtcatcggataagcggcgagacggtcggggaggtgcgggcggtggccgacatgcaccagaggaaggcggagatggcgcggcagtccgacgcattcatcgccctgcctggagggtatgggacgctggaggagctgctggaggtcatcacgtgggcgcagctaggcatccaccacaagccggtcgggctgctgaacgtggacggctactacaactcgctgctgaccttcatcgacaaggccgtggaggagggcttcatcaaccccagcgcccgccgcatcatcgtcctcgcgcccaccgcgcaggagctcatggacaagctcgaggagtacgagccttaccacgacatggtggcgtccacgctcaactgggagatgggcaacctgcaggggtactgacgatcgacaccaccactgcgcatgcaagagcccgccagagagctagctaggcagtgcagctagcgcgcggcgcctgaatctgatgaagcacagccggggaacggggcattcgatcggtggattattaagcaacgagcgagcttaactagatagccgtcgtcagctacattgggattttccttttctttttattaactcgacgcaggtctcggtttggagtgccgggcgaaggaaaaaaaaaagggtttggttggcgtacgtagcaggagtatgtcgtagctgctagctagcttgttctgtatatgatgcctcgtgttaattagtttgcttccaccggggatgacgacgatgatggcttgcagtgttgcttgtagcgcagtaagaaaaaaaaaacttggccggtttccccggcctccctccctgctgtgtacgttctggttagtagtgttagcagccggtacctgcctatgtatgctaccttcaagatgctcaattcgattggatatatatatgcagcagatcaacccagcaagtgtgtaatac

SEQ ID NO: 53055 - DNA, 1722 bp, Zea Mays
agctacaagctagaacaaggccatccattccaccacccttgtagtagtgcgcgctgttcgcttgcactagctagccagcagcgtgcgcaccacctctcgccgcggcagcgacgacgacgggaggcttgttgagagctagctagctagctcagcgagttcgagagcctgtgtgctagagagacagacagagagagagaaaacatactcctcctctgcacacaggggagctagaagctagcgttaattatagcacagctagccgcaaccgtcgcaggatatatatatagacgacagcaccgatcgagagtagtacgtgaggccggcatgacgatgaggcagtcgaggttcaagaggatctgcgtgttctgcggcagcagccaggggaagaagcggagctaccatgacgccgccattgagctcggcaacgagctggtggcccggagcgtcgacctggtgtacggcggcggcagcatcgggctcatgggcctcgtctcccaggccgtctacgacggcggccggcacgtcatcggggtcattcccaagacgctcatgacaccagaggtatgtctgcacgtacagtacagcacgcctagcactcctcggcttgttttttagcattccgagtgcgtgtagtaggggaggggcgcgtggtggttatgaatgggggcatgggagtttgggctagctctggctgctggagtcccggccgggggacatggcacttgacgctttgagaactactcctacccggagcgcagggaggtaaacaaattgcatgttttccttgggcagataagcggcgagacggtcggggaggtgcgggcggtggccgacatgcaccagaggaaggcggagatggcgcggcagtccgacgcattcatcgccctgcctggagggtatgggacgctggaggagctgctggaggtcatcacgtgggcgcagctaggcatccaccacaagccggtcgggctgctgaacgtggacggctactacaactcgctgctgaccttcatcgacaaggccgtggaggagggcttcatcaaccccagcgcccgccgcatcatcgtcctcgcgcccaccgcgcaggagctcatggacaagctcgaggagtacgagccttaccacgacatggtggcgtccacgctcaactgggagatgggcaacctgcaggggtactgacgatcgacaccaccactgcgcatgcaagagcccgccagagagctagctaggcagtgcagctagcgcgcggcgcctgaatctgatgaagcacagccggggaacggggcattcgatcggtggattattaagcaacgagcgagcttaactagatagccgtcgtcagctacattgggattttccttttctttttattaactcgacgcaggtctcggtttggagtgccgggcgaaggaaaaaaaaaagggtttggttggcgtacgtagcaggagtatgtcgtagctgctagctagcttgttctgtatatgatgcctcgtgttaattagtttgcttccaccggggatgacgacgatgatggcttgcagtgttgcttgtagcgcagtaagaaaaaaaaaacttggccggtttccccggcctccctccctgctgtgtacgttctggttagtagtgttagcagccggtacctgcctatgtatgctaccttcaagatgctcaattcgattggatatatatatgcagcagatcaacccagcaagtgtgtaatac

SEQ ID NO: 53056 - DNA, 1393 bp, Zea Mays
agctacaagctagaacaaggccatccattccaccacccttgtagtagtgcgcgctgttcgcttgcactagctagccagcagcgtgcgcaccacctctcgccgcggcagcgacgacgacgggaggcttgttgagagctagctagctagctcagcgagttcgagagcctgtgtgctagagagacagacagagagagagaaaacatactcctcctctgcacacaggggagctagaagctagcgttaattatagcacagctagccgcaaccgtcgcaggatatatatatagacgacagcaccgatcgagagtagtacgtgaggccggcatgacgatgaggcagtcgaggttcaagaggatctgcgtgttctgcggcagcagccaggggaagaagcggagctaccatgacgccgccattgagctcggcaacgagctgggtcattcccaagacgctcatgacaccagagataagcggcgagacggtcggggaggtgcgggcggtggccgacatgcaccagaggaaggcggagatggcgcggcagtccgacgcattcatcgccctgcctggagggtatgggacgctggaggagctgctggaggtcatcacgtgggcgcagctaggcatccaccacaagccggtcgggctgctgaacgtggacggctactacaactcgctgctgaccttcatcgacaaggccgtggaggagggcttcatcaaccccagcgcccgccgcatcatcgtcctcgcgcccaccgcgcaggagctcatggacaagctcgaggagtacgagccttaccacgacatggtggcgtccacgctcaactgggagatgggcaacctgcaggggtactgacgatcgacaccaccactgcgcatgcaagagcccgccagagagctagctaggcagtgcagctagcgcgcggcgcctgaatctgatgaagcacagccggggaacggggcattcgatcggtggattattaagcaacgagcgagcttaactagatagccgtcgtcagctacattgggattttccttttctttttattaactcgacgcaggtctcggtttggagtgccgggcgaaggaaaaaaaaaagggtttggttggcgtacgtagcaggagtatgtcgtagctgctagctagcttgttctgtatatgatgcctcgtgttaattagtttgcttccaccggggatgacgacgatgatggcttgcagtgttgcttgtagcgcagtaagaaaaaaaaaacttggccggtttccccggcctccctccctgctgtgtacgttctggttagtagtgttagcagccggtacctgcctatgtatgctaccttcaagatgctcaattcgattggatatatatatgcagcagatcaacccagcaagtgtgtaatac

SEQ ID NO: 53057 - DNA, 948 bp, Zea Mays
gatcactagtactactaaatgcaacaattcaatgtgaatcactagatatcactttcaatctctttatggatgaatcactaccattagaagtgagccaaagatatttttgggtttactaggttgtatatcaagttaggaagccataatgctcacccaaaacctagacatgctctatttataaggtcatatataaggagcacataaaaaagtgcctttttagcgggtgacatatttggatctctatatataatatgtttaggtgctcgctgttagcacattggaccccgaaaggcgagtgccttgacatggatgttcccccgtttaatcttcagttccagatccatagccgtcatatatatcaagagccatgtgccgtatgtgcctggctctggctgtatcacgccatgtggcagcctatagctcggtacactactgcaaaagtgtcggcaacgcgttgttgcatgactggagcatcagcagttgatcacacgcggaaagcggcttctccttgtgtttgcttgttgctctgcacaaacggccgtttaatgtcaaatcagcactaacacatggtatggtaggatcacagctagcagagtgcagactgcagagacggacggggctgaaccttcttcttcttctctgtggacgttcagcgagcctagcggcagatgatgcagaggacgacggcgacgatgatgatgagtatgagcagcggcagcgagatgatgagcacgaactccatctgacgacctccctgcgcgcggatggagctcttgctggatcggagcagcgaggtggggaagagaggaggcgacagagcgcagtgcagtaatggggactgcgatggagctggcggaagagctgggcgagaagatgccagagccgataaagcgaacgcgaaggcgatggccgatgaccgaccggtggggtggtgtgcggctgcggcag

SEQ ID NO: 53058 - DNA, 1304 bp, Zea Mays
cagactttgccggcacggtgaaggctcaacagccttccgcttgtgagcttggtgcagccctactcgagagtgctctacctgggggagccaaggtggccctcgccttcgtgatgactaccggagaagaaagagggcctttctctccttgtgtcatatgagactcctcacactcgcctgtgcctaccagcgccttgagagtgacttttcccttaaacgatctcgaaaccagaacacggttgatcgtttgaatattgttcgctgacaatgataggattcgtggggcacgcagcatgccttggccacaatgagcctccctcgtgcttggctttacatgcttcgccggaagcatcgcgtcaagcgacctttccgacttcaaccatgggacctccatgttgctcatgcggtgtgaggctgagggcgctgagggcctccgatgcggtgttggggccttcaaacaaagttggtcgggtgggcaccaccctgaccatgttgctttcccggccgatgtcgaggcagggtccgccgtcggccctcgttcccttgggcagagatcggttctccatcggtgagcatggtatgggtgacttagatattttctcatttcaaatgcttttaaagtcgagaaagttgatccaactcttttcactaagacttataatggtgacttgtgtatatgctaaatatatgtcgatgatatactatttggttctactaatcaagttttatgaggagtttagcaaggcgatgatgcagaaattcgagatgtcgatgatgggtgagctgacctacttcctcgactttcaagtaaatagcttaaataaggcatcttcatctcccaaacgaagtatacataaggcatccttaagaagttcgggatgaaggatgcaaagcccatcaagacgccgatgggaatgaatggacacttggatctcaacgcgggagctagcagagtgcagactgcagagacggacggggctgaaccttcttcttcttctctgtggacgttcagcgagcctagcggcagatgatgcagaggacgacggcgacgatgatgatgagtatgagcagcggcagcgagatgatgagcacgaactccatctgacgacctccctgcgcgcggatggagctcttgctggatcggagcagcgaggtggggaagagaggaggcgacagagcgcagtgcagtaatggggactgcgatggagctggcggaagagctgggcgagaagatgccagagccgataaagcgaacgcgaaggcgatggccgatgaccgaccggtggggtggtgtgcggctgcggcag

SEQ ID NO: 53059 - DNA, 803 bp, Zea Mays
cagaaacgcaggcagcccagcccacgccgcgaggaagcctgaggccgagagaggactgagcaagcgtcccgcgagaaactggtgttccggaccaccacgcggatgggctcgggcgacccggcggccgaccccctttcttccttcctccgccaccccggcgcgttctccttctcccgtcgcgtcgccatggcgcgcgacgccaccgccacatccgtgccagcgctccgcccctggatcgttgacctcctcccgctcctcgtcgtcctcctcatcgccgcccacgtcctcgccctcgctcgccacggacgggtccaggcagcccgcgcggagcaagaagcactaaggggacggcgcccgcggccggatgcttgaaaccagtttgttatttcagtcctgcatccttggcttgttgatctccaaccttccaacgtcagatgatggcgtggaaagttcctgaaagaactaggacagggaaccgatcttatccaatggtttgttcagatgttggtgtcaaaagtgacgatagctgaatagctgatatgtggaaggaggcccttttgagcataaatagttttcggttgctggataggtttgacatctctcgacctctccgtgtaaagaacagtagctagacagatgtgccgtttcatatgttgtggcctggtgggcttttgtaattcatgagcagcattttattactgggcaattaagttaacgaggcatactataatgttatgagagagagctatcgaatatcgtctaagagaaataataaggatctatataaactaatttggttttat

SEQ ID NO: 53060 - DNA, 861 bp, Zea Mays
cagaaacgcaggcagcccagcccacgccgcgaggaagcctgaggccgagagaggactgagcaagcgtcccgcgagaaactggtgttccggaccaccacgcggatgggctcgggcgacccggcggccgaccccctttcttccttcctccgccaccccggcgcgttctccttctcccgtcgcgtcgccatggcgcgcgacgccaccgccacatccgtgccagcgctccgcccctggatcgttgacctcctcccgctcctcgtcgtcctcctcatcgccgcccacgtcctcgccctcggttactggatctacaggctcgccacggacgggtccaggcagcccgcgcggagcaagaagcactaaggggacggcgcccgcggccggatgtttggtaccttgcttgttgagcacttgttgaataaaaaaggcttgaaaccagtttgttatttcagtcctgcatccttggcttgttgatctccaaccttccaacgtcagatgatggcgtggaaagttcctgaaagaactaggacagggaaccgatcttatccaatggtttgttcagatgttggtgtcaaaagtgacgatagctgaatagctgatatgtggaaggaggcccttttgagcataaatagttttcggttgctggataggtttgacatctctcgacctctccgtgtaaagaacagtagctagacagatgtgccgtttcatatgttgtggcctggtgggcttttgtaattcatgagcagcattttattactgggcaattaagttaacgaggcatactataatgttatgagagagagctatcgaatatcgtctaagagaaataataaggatctatataaactaatttggttttat

SEQ ID NO: 53061 - DNA, 851 bp, Zea Mays
ctcgtgcacgcgcagagtaatcggctcagaaacgcaggcagcccagcccacgccgcgaggaagcctgaggccgagagaggactgagcaagcgtcccgcgagaaactggtgttccggaccaccacgcggatgggctcgggcgacccggcggccgaccccctttcttccttcctccgccaccccggcgcgttctccttctcccgtcgcgtcgccatggcgcgcgacgccaccgccacatccgtgccagcgctccgcccctggatcgttgacctcctcccgctcctcgtcgtcctcctcatcgccgcccacgtcctcgccctcggttactggatctacaggctcgccacggacgggtccaggcagcccgcgcggagcaagaagcactaaggggacggcgcccgcggccggatgtaaggcttgaaaccagtttgttatttcagtcctgcatccttggcttgttgatctccaaccttccaacgtcagatgatggcgtggaaagttcctgaaagaactaggacagggaaccgatcttatccaatggtttgttcagatgttggtgtcaaaagtgacgatagctgaatagctgatatgtggaaggaggcccttttgagcataaatagttttcggttgctggataggtttgacatctctcgacctctccgtgtaaagaacagtagctagacagatgtgccgtttcatatgttgtggcctggtgggcttttgtaattcatgagcagcattttattactgggcaattaagttaacgaggcatactataatgttatgagagagagctatcgaatatcgtctaagagaaataataaggatctatataaactaatttggttttat

SEQ ID NO: 53062 - DNA, 2307 bp, Zea Mays
ctccactagcttttctaattaatcagccaagggcgtccataaacccttgtggtagcactattttcccgggtggttctccatgttccaattaacataatgatcttatcatgaacagtaataataaaaagacaataaaagtgtgatcatgaataatgtatcttcatacccaaaaccacataaagcactagcaagtactacccaaaaatttcagtggtaaacaaggtataaagatagacaaactagggtaacctattgggtcccatcaaaattaacctatgcatatcattatgattaatcagaacatgagtaggtaaaaagaagtgatcaagggcacaacttgcctgggacttgagattctaggtaccaggatgatcttcagatgactcgtaacctcgcactagtcgtagcaatacaaaaaaatagtgtatagacaaaattaacatcacaccaaacataagaacaaactgtataataataagctgcgcgatgctacgagatcgtgggtttgagaacgactaaaatcggagttacgattaaggagttacgatttacggaagatatatgtggttgaatattagattatattataaattgattagcatacatcatatgagaaaatatcttataaataattaattcaacccttaatctaagtcattatttgattaaagatcatctagtcaaattataaccataagatcagaatactatattaatattaaagaagtcaatccaatagacatagattaatccaattaacataggataaataaatatctaattataaaagtatgagacatggtataatcaatattgttactgcgtagtaaatatttatacaaagctaacgcaattgaaacgagtccatttgaaattaaaacggaggagttatgaatttccgaagttttaagtgttggaataaaagaaactaagtgcataatttttagtctaagtttcataacaaagcaaagttactagatgataaataatattaaaaacaaaattattgtaactggaatggatcaatttggagctaaaaatgaatcaaatatgaattgtacaagtttctggatttatttttgtattaaaatcaattttctaaatttaaataactgatttctctgagctatggactgggcgccaatttccagggagttcagggtttaactcataaaatcttccaggcacagttcaaatactaccacggactgcaggtttattcttaaataatctagggtctcttttacaatttcacgctaccgaaggggtatcaataagtctcatccgcccgatcactaaccgacgctccagattagatcttgtttataacgaatcagtatgcgacaggggctgtttgatcaaacactaacggcacagatcgagccccgcccgcgatggaccggtatggacctccaaccgccagattggggattaacgacatggatttaatacaatgcttacacactaggatcgtccgatcacggatcagtggctcggatcaaaggacccaggcactaatccaagccgctcgtaacatatcgcacggttggcgcgtgtcttccaccattagagcaccctgccttgacggcggcggcctgcccgtcacggaggtgccctggtcgggactccaagccacacccaggtgagccaaccccgaccgaaacgatgctaatgcggagcgatgaacaagtcgggaccacgggaggagtcatacctcgatactggatagtggcttcgacctcgccttagcagccacacggtggctctcttcgtctccaagctttatctagcgcagcgatggtgtcccagcctggagcagagcgcgcggcaacgactgggcttgcagcagcgacagccaggttgtcgaggcccacagaaggcaccggcttttcggaagcaacagatgacagcggtaccacggccacaggtaacagcggcaccggacgttgcaccccgcacgacttcgccatgcactctgctccctctccgatagtcgccgaggttggaccggcagcaaatctcttggcgccagaggaggaccaaacgatatgtgtggatcgacgctggcagcttcttggcttcgtccgtgatgaagacgtttgggggaggaccgcatgggtaggcagatatgcgcagggggtcatggccttgcttttatccacgacgtgggtggaggattggattaagcacttcgtgaggttgttacgatggatgcgagcaatacggagggagaagggggctcaattgcgtgggtcccacacagttgcatgctgcggccagcaggaaaaaaaacggagagcgtttttt

SEQ ID NO: 53063 - DNA, 342 bp, Zea Mays
tataaacttcggcaaagcaaagtttgacttaggttaaaacaaaaaagaacaccttacattttggtgtttgtatgtgtgtgtttttgggcagagagggtaaggtagcaacatcattattatcttaatagacctttgaacagcccatggtcaagtaaggaaccatgtgatggcttaaaaaaatggtcaacatgtgatatccaactaaagtgctaaaaaccaatgataagttgtgggcttgtggcaaaagctaagatgatgttgtcttcaggtggcgaaggtaaaaggcataaacacacatgatcataatcaaatagaactgccatttaacatgcttacaagctt

SEQ ID NO: 53064 - DNA, 1770 bp, Zea Mays
gtttttttttcttttttcctcgaactacaaacccttgcaaaaagagttataacttataagcctctgttgctcggcctctgattgtgagagaaactggagtgaattttcagcagtaagtgtctctactttgttgtttgttcaatgttcatatgcagtaactgaaatatgcagtaagtgtttgatgacttcttgaatttgcatgtgtagatccacaccaagaagaggaaccggctagagcatcaaaggttatgcaagttggtctatgtgagctacaacaggaagatgaacaacagatttacaaagataagagagcaaggttcaaagggaaagaaaagcaacccactagtgcttgaagagcttttgtgggaaaatgagtgggttcaggagtctgaagaaggtgaggagctttggagtgcagtagatgaagttttaggtgcaactcaagctacccagggcagaaacttgcctagggcagcagctacacgtggtgggaggacctactccgagacctatgttaggagtaggaagcgccaaaaagttacagtagctcaggacttgcagcaaggagatggcagtggcagtgacagtcacaacgaaaatgatcatcaagagccaactcaaaatgaccaagatgctgcagaaaaagcaattgatgatgaagaagaatctggagctgctggtgatcaattcaagctggatgatgatctcatataggtgttgccttcttggaccttggccatagtctactactctactggtctagtaagttgtagacttgcagtttcatagtcttatataaataataaacttgttgctgttgtgctgttatggactatttaagtatttatactgctgcaagcctctatactataaaattatatatccatatatagtgttatatatgactatatatatatatatcatatatgtcctggaatacacaggacgaccaggaggacgattagggtcgatcaggggcgactaatcgccctgatcgacgcctaatcacccagtggcttcgatcaggcgatctgaaaactatgctgtgcgccattgggttaattaacacatttgtttccctaattgttctttgctcatagtaaagaaacattacttaacaaaattcgcattcctaactgataattaagaaactatgaaacaaagcagaagttgagtgatgccaaaatttaccatcaaaagctacagtgcatgttagatgatctggcacactagcaggggaaagtaagctagaagctgcaatacttctcttaatgaataaattcagcaaatcatgaagcctgcaacccaaaaggttccgaaccagtggctacggtatggcctagcattacaggtatgaacgaaatcaaagaaaagctagcattagtgatccaaggacgaagcggggataacgggcctgtttggttcagctttttctgatgagcttttttgagaaactagttgtggggagaatctggctgtggagagaatgagtattgtggagactacatgcggaggaagataaaaaagtctatatgtttaggatgtagaaagtgacggtttcctactatcgcaagttcgcaacgactcggtcgattctgtgttcacgttgattttgaacggttttgactaaattgattattatagaagcgggctgaaaagttgtgcgcttggcagtctgcagcagcttctagtggccagaagctgaaacaaaaacaaaaaccacttctgcatgtatcaatgtttttgcaatggcaatgttgctagaccttg

SEQ ID NO: 53065 - DNA, 6649 bp, Zea Mays
tccctccttggcgtcaacgtccaccacctcaacccctcgccggacctcactccaaacccggcgaacacctccacgaacccccctcttcctgcatcagggcccacagcaaacatcgttttggcttcctagtcttggcgggctaagttccagagatggagtgacgacagtcctaccccctcgttttctggaggctcatgtgtcgtgccttactcttataaaggtgtgctctccaatgatgggagagtagcctcttctccgttgtgtgttgctgcttcttctcagttgaggggtgcccaccagttgcaagcggtgaagaagatagtctgtgtgcgcccggtgctgcaaagttaggcgccagcgcttcctacccgttctgaagacaggtggcgggaagtggtgcgtaggagatctagacacgcggcacttggtcctcgtcaatggtcccctgaagatctccaaggaaggtgctacaattgtctttctccctcccactttgttgttgcatgtagacgacctacccgctgctttaggtgcaaggggtttggccattgtgcttctatgtgttcacttcaggcgagtacaaaggcgacgggactgcaccatgagcgtcgaagtattcgcgttccggtgtggtagcggctatcgaagatgcaaggctccggcccgcgtggtggtacattgcaagagttcaagcgtagagaatcggtgtggaagcgagtcactctgttgcagtcgaccacgggggctgatcacctttcacccataccgttggcgccgaacttcgaagaggttgctccacccgttcgtggcaacaggagaaagaggcatcgtgcgaaaagaaggcgggcagtgttcgaagatgcacaggcaatgaggcagcagtccccagctacagtttctactgaagaattagatgctccgacggcactggagaagatcagtacagagaaggatcagcctgtcaagcccatgaagtccccttcttctggttccaggcctgaggttcttggggctgaagtcatcaaagaggtagctcgaagttttgacgtcgaggagcgtgcaatgtccattcatctggccaggctagaggacttcattctattcctaccggacgaagacacggcttcaagggttttcaatggcggaaggattttcagaggtccgcagttcgatctcgcttttaaaaggtcgacgtgttgtgcaaatgcttttgcggcaacgctcctagccttggttgatgttgagatcagaggcatcccgactcatgcatggtcaagagatattgtagatcagcagttacgctattcatgtgttattactgagctgcacccagcgacaatattgaagactgatctctcgtcctttatgttgagaacatggtgtgtagatccggtgaaccttcaacgtgacatgaacctagtcattacagagccgaggctagtgggtagggagaggtgttgcctatcctacatgtttagcctagcggtcactcctgtcgatgcctcgataacatcccttgtttcctcccctccgttgaacgatggcaatacccctgatggcaacgacgatccacctcccccagactcactacagcaatgtccaagaagcaatgaaggcagacggtgcccgatccattctcgattgggcccacagcattcatctcaacgagcagagaaaggcgagacgtgggaggctggggaatccccctagggcgctatggacaaagcaacaaaagatcagccattggatccgcacccaatgagtgtcggcccggtgctcaatggcggttatgaagacctgttggcaaaaatgcccagtcccgagaaatcggctctagggtcggctccaaatccgcgcgtgcacaagtgtatcacgcggggtggtcccgaggtggtagcgcaaggagatatcgatcaaaatgggagagcggtgcagggtcccaaggaattgagcgtgctgggatttcattctacgattgggctcgaggaggccagcacgggtgatgggccgctgggacaggtcgcattagcctcgcctcagcacactgctaggctgatagaataagtcatgtggtctctgttttgtggtgaaaaggacagcagcacagcagtacaggactgcagcacaacagcaccttttgactgctgcagcacagcagcagtgcagttgagtgcagttggagacagtcaccttttgactgctgcagcacagcagcagtgcggttgagtgcagttggagacagtcagtcaccttttgactgctgcagcacaacagcaccttttgactgctgcagcagcaggacagtagcagtagatggcagttgcagtttttgactgcacactttagcactttagtatctaaaggacagcatctgtgtgctgcagtgtgtagtgtgtagtgcagtgtactgcagcccctagggctataaatatgtgtccccaacccctctaagggtatggcattgtgtagtgtttgaggaaataaacagaaaattgccccaactcatagtgtcatcctcttgatgagagttagagtccctctacttacataggctgctggagtctgatgggtcagtctcgccccaatgccaatttgggcaacccgagtctacaggaaccatttccctccctattgagtcttttggccttttgggtcgctgggacagggtgggctgatctcgcctcagcattctggggttgggtcgctgggaccagccaacttagtctcacccccttgttgtaccaatgtaaaccccagcagtaacagagccccgaacagcagaatgcttcctaaccatgacagcacagcgttgaaagtatacagcaggagaagacgacaggacttaaggtgccaagatgaggcgccaggggatgaaccacctagcaagcagcagcttttcttcaggcttgtgtccaggaccatcggcagcttactgcctcctcccaagattatgaagaaaaaaaaacttcctgctccacctccgcaggagctccacagaagtaggcgggtggccaaattgggcgctgagcacattcagcagatccccaagactaagaaaatggtgatgagagttcttcagtttgatctggacagagatcatatcaatcaacaggaactagaagattatgctaagctcttcagtcgacctctctcctgtccccaggttcaagctcttgcctcacttttcagatggtcagttccagataacgtgggtgtggtggccactctagtttactgatagggtggtttgtgggtgtttctcattctgtttatctaatggatccctctttaattctgttctggaatgttcgtggcttaaactccacctcgagacaggattttgtaaagagtctgatggagtcggttcatgctgatattatcagtttgcaagagactaagatgccaagttgcagcaaccgttttattctttccttgttgggttctgacttcgacaacaattttgtggttctctcatccgttggtcctagtggtggggtgttgccggcctggaggtcaagttgggaaccattgttgcctcacgtgtggataatttcagtgtttctgtcaagttttgcccggctagtggtgatgggtggtggcttacatgtgtctatggacctcaaagtaatgataggaagctcttgttccttcaagaattgaacctaattagatctgcgtgttctggaccatggcttgttggtggggacttcaacctaatctaaacagatgaggacaaaaataattctaatctcaactgagccatgatgggaagattcaggaaatgcatacatgacctgggaataaaagatattgaccttcagggaaggaagttcacctgggcaaaggctcatgacgtcttggtgcggctggacaggatgttctgttccttagattgggagcagaagttcccagatttcttgcttcagtgctctgcatcggaagactcagatcattgccctcttctccttggattgaaggacaatcattggggtaagaggcgatttcattttgagcccttttggccgaaatttgaaggctttcatgatgcggtttccagtgcatggaactctgtccagaacatctcttgccctctcaaaaccctctccctcaagttgaaggctacagctaaggggctgcagtgttgggagtgacaagaaagtgggcaatttcaagatgcagcttgagttggatagagaggtgatgttgcagctggaaacggctagggagagcagatatctcaatgatcttgaatgctagctgctgcagaggttgaaaaacattctttggcgcttgcctccctgctcaggacagtggctagaaccagatctcggcttctttggctcaagaatggtgatgctaacaccaagttttttcattcatgctgaaggtttcgtaagaggaagaatttcattgctgcaataaaggatggggatcagctgatcacctctcatgatgggaaggccgaagtcttcctggattttaattcgaatctaattggaagtggggagcaaagaaaccaagctatcaacctggaagccatagacatacagcagcatgatctttaggctcttgagctcttgattacagaagttgaagtattgagcactatcaagcaacttccatcagacaaggcccctgggcccgatggcttcactgggcgtttctataagtgctgctagcctattataaaaaaatgacattatggctgctgtttcaacaatttgggagagatttcagaaacttcaggtttcttaacatagccttcattgtcctgctgccaaagcataatgatgctcttgttgccaaggacttcaggccaattagtttgatccacagcttcgccccaaattggttactaaggttcttgccaataggttgaggggctgatttccaaagctcaaagtgctttcatcaaaggtcgattcatacaagacaattttatgctcgtccagcagacggcaagattttttcatgctcaaaaacaacctagaattcttctcaagttagacatctccaaggccttcgactcggtctcttggccttttcttcttgaggtggagcggttgggttttggtcctgtgtggagggatgtgattagtggtcttcttatgaccacttccactcagatcatgctcaatggtgtgcctgggatcttcatttctcataagaggggtttgcgtcagggcgaccccttgtcaccgctgcttttcatttttgttatggatgtcctcaatgcgcttatggtcaaagctgaggataatgggttgctgcagcccctgtctactattttcatcaaacaccagatctcactttatgctgacgatgtggcgctctttcttagaccagtgtacagcgacctgaatactactgtgcagattttggatctttttgggcaggcttcgggattgaagactaacatgactaagagtagtgttgatcctatccagtgctcccctgctgatctagatgtggtccagcaacttctaccctgaagattggaagcttttcctatcaaatacttgggtttacctctctccctgaagaagttaaccaaagcccagcttcaacctctcatcgataaactggcagacctcttaccggcttggaaggctgatttgatgacccgtgctggcagagctacgcaagtgcaattgtgctcactgctactgttatttatcatacgatggcgttggatttgcctaggtgggctattaaggccattgataaaatccgtcgcggattcctctggagagtgcgcaaagaagctaatggtgggcactgtatggtggcctggggcaaggtaacgcgtcccaaagaattgggggggccttggtatctctgatattcaatgtttgaatagagcattacgtgttagatggatctgactgcaaaagacagacacatccaaaccgtgggctgatttgcctatccagtcaaaccagtttttggagtgtttattctcagtagcaatggcttctgagatgggggatgggcggtccactctcttttggcatgatagatggatattgggacagaggattcaagacttggcacctcatgtatttagtatggttcctaacagaattgtgaaatggtgacatgggagatcattgctgatttcctcactcttacagatgctatcactaatttcgctcttcagcctggggttccagataagcacctttggagattctctagcaatggtctctactctgccaaatctgcctatgaactgatgttcagtggttctacctccttggctgccttcaagagaatctggaggacttgggcgccgcctaagtgccgttttttcctctagttggttacacataataggtgttggacggctgaccgacttgctatgtgggcttgggcgcttggctgccctttccccgggactggatgaaatgtgttttgaagattggtggagcagatcggccgagcttgttcctaaagacctcaaagatggttttaattccttggtgtatctggaggcaccgcaatgattgtgtctttaatggtgctcagcctagtgttgcgagagtgcttgcttcggctggtgatgagttcaatatgtggtgttttgcaggggccgaaggcttgaccttgctttcggaccttgcggttagtaagggtgtgcctcttctag

SEQ ID NO: 53066 - DNA, 1097 bp, Zea Mays
ctcgattccattattcattttgggtcagaagaaaaggatcttttctttttgaaggttcggctgctgcgggagccaacaagctcgtgaggagaagatgacagaggatgggtacccggtgaagctgcacgtctacgatcttagccaaggcatggcgcggcagctcccggcaacgatcgtcgggagggaggccatcgaggctatttggcacaccggcgtggtcgtatacgggcgggagtactacttcggcggtggcatccaggaaggccagcccggccggacgccctacggcacgcccgtccgtgtggaggacctgggcgtgacccacgtccccagggaggtgttcgaggagttcctccgggagatcggcccgcgctactacaccctggccacctacaagctcctcaaccacaactgcaacagcttcagcaacgaggccgcgcagttcctcgctggcagcgccatccccagctacatcctcgagctgccgaaccaggggctggaggcgagcttgggagctggggctgtgccgcagccgccgcaattcaggccggttcttgcccctcttggcgccgccaccgtggctctgccgctgacggatgacgtggagccaggatcggctgctgctgatgaaccggaggctgccaagatagcgggcgccagtgacggcacgcccgttccactgtcagtgcagcccgcagcagcaccggcagccgccgccgctcaggcgagcgcggtgcctacggtttcatctatgttggtgcctccagacccccatgcggaggccaagagccgggtgcaggaggagataaagcgcgagtttgcggacatcatggcggccggcactgcgcgtgccggcgaggcggccgcgctggcaacgcgcagggttatggagcggcacggcgcagggtcaaaggagcaaagtctgacgattgattaggtggaactagcaagaccggtttcgacaatgatcctcctctctcatgatcaataattatgttgtacaaaatgatacatatatgcatgatcatactaagtatttggtggaaaaatgacctaagctagcaaaaatatggaagcgagcctcaagaattctaaat

SEQ ID NO: 53067 - DNA, 1257 bp, Zea Mays
ccccaaatggggttacgggttcttgctttcctcgattccattattcattttgggtcagaagaaaaggatcttttctttttgaaggttcggctgctgcgggagccaacaagctcgtgaggagaagatgacagaggtaggcgacagcttcacagcttctggccctcatgctccttgctgagagactactgatgagagtgagtgatgaatgacctgcatgcatcgctgtacgcaggatgggtacccggtgaagctgcacgtctacgatcttagccaaggcatggcgcggcagctcccggcaacgatcgtcgggagggaggccatcgaggctatttggcacaccggcgtggtcgtatacgggcgggagtactacttcggcggtggcatccaggaaggccagcccggccggacgccctacggcacgcccgtccgtgtggaggacctgggcgtgacccacgtccccagggaggtgttcgaggagttcctccgggagatcggcccgcgctactacaccctggccacctacaagctcctcaaccacaactgcaacagcttcagcaacgaggccgcgcagttcctcgctggcagcgccatccccagctacatcctcgagctgccgaaccaggtgatgaacagccccgtcggcgcgctgatacgggctggaggcgagcttgggagctggggctgtgccgcagccgccgcaattcaggccggttcttgcccctcttggcgccgccaccgtggctctgccgctgacggatgacgtggagccaggatcggctgctgctgatgaaccggaggctgccaagatagcgggcgccagtgacggcacgcccgttccactgtcagtgcagcccgcagcagcaccggcagccgccgccgctcaggcgagcgcggtgcctacggtttcatctatgttggtgcctccagacccccatgcggaggccaagagccgggtgcaggaggagataaagcgcgagtttgcggacatcatggcggccggcactgcgcgtgccggcgaggcggccgcgctggcaacgcgcagggttatggagcggcacggcgcagggtcaaaggagcaaagtctgacgattgattaggtggaactagcaagaccggtttcgacaatgatcctcctctctcatgatcaataattatgttgtacaaaatgatacatatatgcatgatcatactaagtatttggtggaaaaatgacctaagctagcaaaaatatggaagcgagcctcaagaattctaaat

SEQ ID NO: 53068 - DNA, 1562 bp, Zea Mays
gaagaagaaaaatgagcgtgtgactctgcgtgcgtctctgcgtagtgcgtatgggcgtgaccatctcgttcagaacttgagaagcgaaggcaagtgacgacggaagcggttggtttctgcactggacaaccgaacaaacccaagacgaaaagccattcctgttttgcttctcccgccgtctcctcgactggcctctgcactccacgcaagagcaagagatacttccacgcgaggacgcaaccgatgcgattcgttccccttccgtgcactccgccctggtatctgcactgcatatcctctccagtaaaagaacccttttgccaaccgattctggcctgacggaccaaactctcctcgcctttgttttgcccacttcgttcgtctctggctcggcggttgctcgcttcgcttggctcgtttggtgggaactctctgcgcgcttggtcggcggccatggccaagcggcggagtacattcggtttggctaggttcggctgctgcgggagccaacaagctcgtgaggagaagatgacagaggatgggtacccggtgaagctgcacgtctacgatcttagccaaggcatggcgcggcagctcccggcaacgatcgtcgggagggaggccatcgaggctatttggcacaccggcgtggtcgtatacgggcgggagtactacttcggcggtggcatccaggaaggccagcccggccggacgccctacggcacgcccgtccgtgtggaggacctgggcgtgacccacgtccccagggaggtgttcgaggagttcctccgggagatcggcccgcgctactacaccctggccacctacaagctcctcaaccacaactgcaacagcttcagcaacgaggccgcgcagttcctcgctggcagcgccatccccagctacatcctcgagctgccgaaccaggtgatgaacagccccgtcggcgcgctgatacgggctggaggcgagcttgggagctggggctgtgccgcagccgccgcaattcaggccggttcttgcccctcttggcgccgccaccgtggctctgccgctgacggatgacgtggagccaggatcggctgctgctgatgaaccggaggctgccaagatagcgggcgccagtgacggcacgcccgttccactgtcagtgcagcccgcagcagcaccggcagccgccgccgctcaggcgagcgcggtgcctacggtttcatctatgttggtgcctccagacccccatgcggaggccaagagccgggtgcaggaggagataaagcgcgagtttgcggacatcatggcggccggcactgcgcgtgccggcgaggcggccgcgctggcaacgcgcagggttatggagcggcacggcgcagggtcaaaggagcaaagtctgacgattgattaggtggaactagcaagaccggtttcgacaatgatcctcctctctcatgatcaataattatgttgtacaaaatgatacatatatgcatgatcatactaagtatttggtggaaaaatgacctaagctagcaaaaatatggaagcgagcctcaagaattctaaat

SEQ ID NO: 53069 - DNA, 1392 bp, Zea Mays
gaagaagaaaaatgagcgtgtgactctgcgtgcgtctctgcgtagtgcgtatgggcgtgaccatctcgttcagaacttgagaagcgaaggcaagtgacgacggaagcggttggtttctgcactggacaaccgaacaaacccaagacgaaaagccattcctgttttgcttctcccgccgtctcctcgactggcctctgcactccacgcaagagcaagagatacttccacgcgaggacgcaaccgatgcgattcgttccccttccgtgcactccgccctgcggcggagtacattcggtttggctaggttcggctgctgcgggagccaacaagctcgtgaggagaagatgacagaggatgggtacccggtgaagctgcacgtctacgatcttagccaaggcatggcgcggcagctcccggcaacgatcgtcgggagggaggccatcgaggctatttggcacaccggcgtggtcgtatacgggcgggagtactacttcggcggtggcatccaggaaggccagcccggccggacgccctacggcacgcccgtccgtgtggaggacctgggcgtgacccacgtccccagggaggtgttcgaggagttcctccgggagatcggcccgcgctactacaccctggccacctacaagctcctcaaccacaactgcaacagcttcagcaacgaggccgcgcagttcctcgctggcagcgccatccccagctacatcctcgagctgccgaaccaggtgatgaacagccccgtcggcgcgctgatactgccgatgatccaggggctggaggcgagcttgggagctggggctgtgccgcagccgccgcaattcaggccggttcttgcccctcttggcgccgccaccgtggctctgccgctgacggatgacgtggagccaggatcggctgctgctgatgaaccggaggctgccaagatagcgggcgccagtgacggcacgcccgttccactgtcagtgcagcccgcagcagcaccggcagccgccgccgctcaggcgagcgcggtgcctacggtttcatctatgttggtgcctccagacccccatgcggaggccaagagccgggtgcaggaggagataaagcgcgagtttgcggacatcatggcggccggcactgcgcgtgccggcgaggcggccgcgctggcaacgcgcagggttatggagcggcacggcgcagggtcaaaggagcaaagtctgacgattgattaggtggaactagcaagaccggtttcgacaatgatcctcctctctcatgatcaataattatgttgtacaaaatgatacatatatgcatgatcatactaagtatttggtggaaaaatgacctaagctagcaaaaatatggaagcgagcctcaagaattctaaat

SEQ ID NO: 53070 - DNA, 1545 bp, Zea Mays
gaagaagaaaaatgagcgtgtgactctgcgtgcgtctctgcgtagtgcgtatgggcgtgaccatctcgttcagaacttgagaagcgaaggcaagtgacgacggaagcggttggtttctgcactggacaaccgaacaaacccaagacgaaaagccattcctgttttgcttctcccgccgtctcctcgactggcctctgcactccacgcaagagcaagagatacttccacgcgaggacgcaaccgatgcgattcgttccccttccgtgcactccgccctggtatctgcactgcatatcctctccagtaaaagaacccttttgccaaccgattctggcctgacggaccaaactctcctcgcctttgttttgcccacttcgttcgtctctggctcggcggttgctcgcttcgcttggctcgtttggtgggaactctctgcgcgcttggtcggcggccatggccaagcggcggagtacattcggtttggctaggttcggctgctgcgggagccaacaagctcgtgaggagaagatgacagaggatgggtacccggtgaagctgcacgtctacgatcttagccaaggcatggcgcggcagctcccggcaacgatcgtcgggagggaggccatcgaggctatttggcacaccggcgtggtcgtatacgggcgggagtactacttcggcggtggcatccaggaaggccagcccggccggacgccctacggcacgcccgtccgtgtggaggacctgggcgtgacccacgtccccagggaggtgttcgaggagttcctccgggagatcggcccgcgctactacaccctggccacctacaagctcctcaaccacaactgcaacagcttcagcaacgaggccgcgcagttcctcgctggcagcgccatccccagctacatcctcgagctgccgaaccagtgccgatgatccaggggctggaggcgagcttgggagctggggctgtgccgcagccgccgcaattcaggccggttcttgcccctcttggcgccgccaccgtggctctgccgctgacggatgacgtggagccaggatcggctgctgctgatgaaccggaggctgccaagatagcgggcgccagtgacggcacgcccgttccactgtcagtgcagcccgcagcagcaccggcagccgccgccgctcaggcgagcgcggtgcctacggtttcatctatgttggtgcctccagacccccatgcggaggccaagagccgggtgcaggaggagataaagcgcgagtttgcggacatcatggcggccggcactgcgcgtgccggcgaggcggccgcgctggcaacgcgcagggttatggagcggcacggcgcagggtcaaaggagcaaagtctgacgattgattaggtggaactagcaagaccggtttcgacaatgatcctcctctctcatgatcaataattatgttgtacaaaatgatacatatatgcatgatcatactaagtatttggtggaaaaatgacctaagctagcaaaaatatggaagcgagcctcaagaattctaaat

SEQ ID NO: 53071 - DNA, 1531 bp, Zea Mays
gaagaagaaaaatgagcgtgtgactctgcgtgcgtctctgcgtagtgcgtatgggcgtgaccatctcgttcagaacttgagaagcgaaggcaagtgacgacggaagcggttggtttctgcactggacaaccgaacaaacccaagacgaaaagccattcctgttttgcttctcccgccgtctcctcgactggcctctgcactccacgcaagagcaagagatacttccacgcgaggacgcaaccgatgcgattcgttccccttccgtgcactccgccctggtatctgcactgcatatcctctccagtaaaagaacccttttgccaaccgattctggcctgacggaccaaactctcctcgcctttgttttgcccacttcgttcgtctctggctcggcggttgctcgcttcgcttggctcgtttggtgggaactctctgcgcgcttggtcggcggccatggccaagcggcggagtacattcggtttggctaggttcggctgctgcgggagccaacaagctcgtgaggagaagatgacagaggatgggtacccggtgaagctgcacgtctacgatcttagccaaggcatggcgcggcagctcccggcaacgatcgtcgggagggaggccatcgaggctatttggcacaccggcgtggtcgtatacgggcgggagtactacttcggcggtggcatccaggaaggccagcccggccggacgccctacggcacgcccgtccgtgtggaggacctgggcgtgacccacgtccccagggaggtgttcgaggagttcctccgggagatcggcccgcgctactacaccctggccacctacaagctcctcaaccacaactgcaacagcttcagcaacgaggccgcgcagttcctcgctggcagcgccatccccagctacatcctcgagctgccgaaccaggggctggaggcgagcttgggagctggggctgtgccgcagccgccgcaattcaggccggttcttgcccctcttggcgccgccaccgtggctctgccgctgacggatgacgtggagccaggatcggctgctgctgatgaaccggaggctgccaagatagcgggcgccagtgacggcacgcccgttccactgtcagtgcagcccgcagcagcaccggcagccgccgccgctcaggcgagcgcggtgcctacggtttcatctatgttggtgcctccagacccccatgcggaggccaagagccgggtgcaggaggagataaagcgcgagtttgcggacatcatggcggccggcactgcgcgtgccggcgaggcggccgcgctggcaacgcgcagggttatggagcggcacggcgcagggtcaaaggagcaaagtctgacgattgattaggtggaactagcaagaccggtttcgacaatgatcctcctctctcatgatcaataattatgttgtacaaaatgatacatatatgcatgatcatactaagtatttggtggaaaaatgacctaagctagcaaaaatatggaagcgagcctcaagaattctaaat

SEQ ID NO: 53072 - DNA, 1366 bp, Zea Mays
gaagaagaaaaatgagcgtgtgactctgcgtgcgtctctgcgtagtgcgtatgggcgtgaccatctcgttcagaacttgagaagcgaaggcaagtgacgacggaagcggttggtttctgcactggacaaccgaacaaacccaagacgaaaagccattcctgttttgcttctcccgccgtctcctcgactggcctctgcactccacgcaagagcaagagatacttccacgcgaggacgcaaccgatgcgattcgttccccttccgtgcactccgccctggttcggctgctgcgggagccaacaagctcgtgaggagaagatgacagaggatgggtacccggtgaagctgcacgtctacgatcttagccaaggcatggcgcggcagctcccggcaacgatcgtcgggagggaggccatcgaggctatttggcacaccggcgtggtcgtatacgggcgggagtactacttcggcggtggcatccaggaaggccagcccggccggacgccctacggcacgcccgtccgtgtggaggacctgggcgtgacccacgtccccagggaggtgttcgaggagttcctccgggagatcggcccgcgctactacaccctggccacctacaagctcctcaaccacaactgcaacagcttcagcaacgaggccgcgcagttcctcgctggcagcgccatccccagctacatcctcgagctgccgaaccaggtgatgaacagccccgtcggcgcgctgatactgccgatgatccaggggctggaggcgagcttgggagctggggctgtgccgcagccgccgcaattcaggccggttcttgcccctcttggcgccgccaccgtggctctgccgctgacggatgacgtggagccaggatcggctgctgctgatgaaccggaggctgccaagatagcgggcgccagtgacggcacgcccgttccactgtcagtgcagcccgcagcagcaccggcagccgccgccgctcaggcgagcgcggtgcctacggtttcatctatgttggtgcctccagacccccatgcggaggccaagagccgggtgcaggaggagataaagcgcgagtttgcggacatcatggcggccggcactgcgcgtgccggcgaggcggccgcgctggcaacgcgcagggttatggagcggcacggcgcagggtcaaaggagcaaagtctgacgattgattaggtggaactagcaagaccggtttcgacaatgatcctcctctctcatgatcaataattatgttgtacaaaatgatacatatatgcatgatcatactaagtatttggtggaaaaatgacctaagctagcaaaaatatggaagcgagcctcaagaattctaaat

SEQ ID NO: 53073 - DNA, 807 bp, Zea Mays
ggcctgtcacctctttgggaggaaatggcatgtcctggaataccagggagacgacgccctgcagcttgattaactctgagatgatcagcactcccggatccacaacaagatccagccactcttcccaccgcagggtgaaagctcctcctgtgcacgccatcccaagttcaacggagatgaacgagtacttcgctgctgaacagcgacgccaacaacaggctttcattgacaagtacaactttgatcctgtaaatgactgccctctcccaggcaggtttgaatgggtgaagctagactgatagattcagaggacatgagagcagcagcatggaactcacctccgctccctccaccgccgcagcgtcgtggcagaggcgcataccgtcgtgttagctttgtttctgttgtaaaaacttagcgttagcttgtagccttaattgtcgcgtgtcacagtacagaactgatgctgagttacagcaccctgatatgatctggtccctcaactccaatgtaacccttaacagctcattctgtaaggaacctatcatcctgttaccagttgccgaattaatgaagtagagctagataatgatgttctgtcacagttattaatacttatactctgtgatgttgcacctgaagctgatgtaatttttgtgtgtgattcatgcactcctcttggtacctgcaaagctggctgccatggtttgacctttggagccttgtgctgtgcccttcctgcagtggcatcttctctctcagggctcaggatgctgctgcatgtgtcattattgctggatgctggcc

SEQ ID NO: 53074 - DNA, 857 bp, Zea Mays
caccctccctcacagcctcatttctcgcttgggtctctcaccactggcctgtcacctctttgggaggaaatggcatgtcctggcaaggaataccagggagacgacgccctgcagcttgattaactctgagatgatcagcactcccggatccacaacaagatccagccactcttcccaccgcagggtgaaagctcctcctgtgcacgccatcccaagttcaacggagatgaacgagtacttcgctgctgaacagcgacgccaacaacaggctttcattgacaagtacaactttgatcctgtaaatgactgccctctcccaggcaggtttgaatgggtgaagctagactgatagattcagaggacatgagagcagcagcatggaactcacctccgctccctccaccgccgcagcgtcgtggcagaggcgcataccgtcgtgttagctttgtttctgttgtaaaaacttagcgttagcttgtagccttaattgtcgcgtgtcacagtacagaactgatgctgagttacagcaccctgatatgatctggtccctcaactccaatgtaacccttaacagctcattctgtaaggaacctatcatcctgttaccagttgccgaattaatgaagtagagctagataatgatgttctgtcacagttattaatacttatactctgtgatgttgcacctgaagctgatgtaatttttgtgtgtgattcatgcactcctcttggtacctgcaaagctggctgccatggtttgacctttggagccttgtgctgtgcccttcctgcagtggcatcttctctctcagggctcaggatgctgctgcatgtgtcattattgctggatgctggcc

SEQ ID NO: 53075 - DNA, 1266 bp, Zea Mays
acccgtcccgacctcttctctcctaattattcccgggcttcctcctgtgtacaccgctcccgccccgcctaccatttaacccccgcttcccctggcctctgccgccccgccgcacagaatcgcttggtgcacccggcgactcggcgagggcctccctgaaaccctagcttgcccagccccgccgggccatgggcaaatacatgcgcaaggtaaaggtttccagcgaggttgccatcatggatgtcgccgctgctccgctcggggtccgcacccgcgcgcgcgccctcgcgctgcagcgccttgagaagcagcaggtgcagcaggaggagggctgcggcggtgagtacctggagctaaggagccggaggctcgagaagctgccgccgcaggtggcgtccgtgaggaggtgcggcgggaggaaggtggcggccacggcccccgccgctatggaggaggcggaagcatcgtacggggagaacatgctcgagtcggaggccatggggagggagacgacgccctgcagcttgattaactctgagatgatcagcactcccggatccacaacaagatccagccactcttcccaccgcagggtgaaagctcctcctgtgcacgccatcccaagttcaacggagatgaacgagtacttcgctgctgaacagcgacgccaacaacaggctttcattgacaagtacaactttgatcctgtaaatgactgccctctcccaggcaggtttgaatgggtgaagctagactgatagattcagaggacatgagagcagcagcatggaactcacctccgctccctccaccgccgcagcgtcgtggcagaggcgcataccgtcgtgttagctttgtttctgttgtaaaaacttagcgttagcttgtagccttaattgtcgcgtgtcacagtacagaactgatgctgagttacagcaccctgatatgatctggtccctcaactccaatgtaacccttaacagctcattctgtaaggaacctatcatcctgttaccagttgccgaattaatgaagtagagctagataatgatgttctgtcacagttattaatacttatactctgtgatgttgcacctgaagctgatgtaatttttgtgtgtgattcatgcactcctcttggtacctgcaaagctggctgccatggtttgacctttggagccttgtgctgtgcccttcctgcagtggcatcttctctctcagggctcaggatgctgctgcatgtgtcattattgctggatgctggcc

SEQ ID NO: 53076 - DNA, 1061 bp, Zea Mays
cgcgcgactgccttcagcgtagctggtggctacccccttcgttgcttcttccctcttccctgccagcctgatggcggcgcggggtctgcaagagccaccgagccgagaacgtggagcgacgagcgagtcagcctgcacagccaggacaccgggatggagtgccgtgcgtggaggaagaaggatgtgtcgtgtcgcgcggtgcttgctgcgccgatgcggggagggagtcgggagcgccttccccatcgggcattggccactcgaccggtccatggtgcgcgtgccggcgatcaacgtgcgccatgtgcgaactgcagaggctgaggcaccggccgccgagccgctacctggctgctgcaccagggagtgtcgtgaggaccgaggttgtgggcaacgacgaaaaataaagaagctaatgggtacagacacaagacatttttatattgggactcgatcaacttggtgtttgggaaagatcatgcaaccggtgaagcggcaaagaccccagctgatggtgcgagagatatgagtaaggaagagggaaccggtaaagagcttacttcatcaacaacctcaggaagcttgaagaggcaacgttccagtgattccttcacctcaatgatggcggagaaattagacaagttcactgaagctattagggatgaagcaccaaaaggcccgacatcaaaagaaatttttagcacattggaggagatagatgggttagatgaagacacatttttagacttgtttgatatcttaacaggtgatgcgcgcaagtacgagtccttattggcacttccattgattctgaggaagagatggctgttgaagcaacttaaaaagtgaaccgatttgtggttgggtgaattgaactggtgttgggtgtgttgatgttgttgtcttagtttatgttgggtgaattgaacatcacattgagtagcaagtaatgtgttccaatgatatgtggacatttgagacaaatatgcatcattattactattctcgtgatgcattctgcttgataaattgtagggtgaaaacttgtgtattttgttgtg

SEQ ID NO: 53077 - DNA, 786 bp, Zea Mays
tgtgcagcgcccggaggagcagcgacgggaggatggccacgtaccccaggtcggccgccctccaccccttggtcgccgctaggtagccgccgtgcgccacccacggcgccagcagcaggtactgcgtgcatgcacacacacacacacacacacgagcgtacgtcatcagccaccatgacaacgattggcacacagcacacactgctcgaccgagacctcgaccttgatctgtaggctagcgaattgactccatgaattctcaggaagtaaaaacaaaagacaaaagaactgtaggagagtcgatcagccatgcacacgcgacctatcaaattaatgaacttttggtggcttccttccatgctcatgggtcggccggaacatgagatgcacaggagcataagactcatgcacagatggtctcacggctgccggtgcatgcatgtatgtatagcaagtccatgcgtgcatgcatgttccgacactgcgcgctcatggccatataccgtgcgcccaagattgccatggcatggcacgccgccggtgagcagaagacgacttgctaattttccttcaccttctcccccgctctgtgccatggacgtacgcacgcaggttattgagacggggccccggggccgggaggcgggagctaccttgaagttgccgagcttcttccacggccactcggtgaagaggccggggttcgtcgccattgttgcgagctacacccgcaactgcttgcttgtgatttttttgtgaactctggtgaactaccaactgatctcg

SEQ ID NO: 53078 - DNA, 1599 bp, Zea Mays
catacgccacgagctcagcaaatggatggatgacggctgcacaaaaaaacagtaacatttgatctccaaagggggttaaaagaacacagatagatgtgcataagagggttgtctgagaactcctggggaaggaaatggtctgtgattaagtatctggcttggagaaggatcatgaaccaggtatattccctcagaaatctgtcgatctgtaagtctgacaatgtttttttatttgccatgtggatcgctctagttccctgtttgtatgcttagtgcagaagacgtatctccctgtttttacattgctttgaggtgtagatggatgctgtacttagtaagtacgatcatgtctgaattacagcctttctgtaacaaatggtgatgagaagaagaatatacatgccaatattcattattatctattaaactgtgagttttcgattacatgattttccatggctgaggcatgcttagttcatgtactttttctctgctttgcatctttgaacgagcgccataatagtagtttccaaaactactctgccattaattctgatttacctactttcttcccatcgtaacctccctgggttaccattaattctgatttacctactgtactgcactacgccggttttgagtgtaatgtaataaagaagaccaccatataaccacgtggtacggatttatagagtggggtttatctgtccggacggagatagtgattcggcggttacaagtacgtgtacgtggtggccggcagtgcacgcgatctgcttttaattcccttctgttgtgtggaagctgtaggcatgctgcatgcagcaactgagcagcttggctttccaatggtccccggatttgctcgtccttactaatcggccagtactggccgactcagctggtcagtaaaaatccttcgaaaggtctttgtctttgttgcatgcaggcactagactggaacgtgacaaccgaactctggatgtcgatcgatgtcgggaccatgccaaagccatgttagtctcgcatagagtatttggtattattcatgatagcaaataaatgtcatcagattcattataggatatatttgatgctgtatatttatttggtgctttaaatattgatgctcttttacataaaaatctggtcgtattttaggggctgtttcgttgccacctactaaactttagtgtaccctaaaataccaaatggggtgactaaaatagatctttcaaatacgatttctacggactaaaggagatgtttgaatgtattaaagctaatagttagctgctaaaattagctaaagacattcaaactggctaaataataattcagctattagctaatttgtatattgcattcaaacactccttaaagtttaatgagggtgactaaaaagaacccgacaaacctcttagacggtggactaaggacttgaagtgttcaccctttttcaggatggaggtagttcgaagtctgtaattcaaaatataatggtttaaacctatttgtttcactcagaatgcaaatgagataaattgactccgtcgtggtacgtgtacgatagctaagcttgaggtcgaggacaccttg

SEQ ID NO: 53079 - DNA, 923 bp, Zea Mays
cgaccacaaatccttcacatgtgctcagattctcgcatctattatatctgaggcatcagcctggatacgtgcaggagccaaccagctggctaatctcctagcatcactttagttttgtgtgtttcagcttggtttttcttctagtctcctttcagattagtcttgtgtgtttgtgttttttcggcttggtcatgcttttgtggagtgtctttgtattttaatcctcgccacttgggctcctctttttttaatataacgggcagatctcctgccggttcgtttcaaaaaatgagtttgtgactgatgaatattcctttagacttgagataactacgagaccatgctatgctatttctatataatccattagcatgtaagcaccatttggaacaagtgcctattgccacctttctgataatttttttgttaggtttttgcctatttcagtggatacaacttgagcattttgtccagttacactaataattttcttttcatacttccagattaataatccatattcatgcaacttctttcatctaaatgaaggatcatctttttgtgctgtctacttctaataaacgaataaatgacatacctggttaaggagtccgagggtaacaactttagctcctttcttgtcagcttcacatattgccttctcaacgaggctattgattgcttccttctcccaactcaatccatactacagaacaaagaaagtttgtgattctgttagattatttctaaaacaagatgattttgttggcactggaggtcctactcattgttatgaaaaaatatcaagaagacatcgcacatttagttaactatggttcttacatggaaactgtatcttgggatgacccatgattgcattttgagtttcttcatgacgttcctctcaacagtaaatgaagaac

SEQ ID NO: 53080 - DNA, 2263 bp, Zea Mays
gaagcttgccgacggttagagtgcactgctctacagatttttgcgcaacatggatggaagtttacaaatcaaattgcttcgtagttttgtctatggattgtgtgtctttttctagttatgaaaccgtggtcttttatggtgtatttcaggaggtttgtccctccatatgtggctagtcgtgtgattactccatataaaaacttcctgtgtgttggctaatcctttgagtgaggtgaagctggactggtatccattataaataaaactaatttgtgcatatgaaatgaattggttttaggtctcttttttccctaggtacttctcacaaaacccccttcctaaatccatttccttctcgctttacgtttccttcctggtcttgtgctatgggatcacccatgctctcgtgcagatttgtgctggcgtgtacttcattcttgtctagcagtcggaccgttgctctcagtcgccaccgtgttcctgccggccatttcaccgctagtagtcctaatgcacgatgtgtgctccagattccacgatgaccgcgagtccgtggtcgtcgtcgtcaaccacgtcgcacttgttacttaatcacacaagtgggagtggccgccgatcgaactgaaaactaacaacaaaagatccccgcaccgctaggctcaaacccagagctagctagcctagccatggcagagcacgcaagaggctcccaaatccttctcatttacctctgcctcctcctactatcctcctcggcgcacctggtgacgagcatggaccttgacagctacgacgactacgacaacttctccgatgagttggtggcaccggcagactacgacgacgagagcttctccgacgaggcggtagcggcaccagcacggcgccgcctgtacgacatcagcctcaacgcctcctcctccaacaggcgctgcagttcatggacctgtcgaacaactccttctcgggcaagatccccgaagctccaccgtcccacaactgttcgctagcatcactccacctcgccggcaacagcttcaccggagagttcccgaccgtcgtcgggggttgccaggagctggccaccgtagacatcggcaacaacaggttctacggcgacatccctcgctggatcgggaccttcgttccggcgctgaagatccttaggctcagctcgaacaacttcagcggccagatccctccggagctgtcgcagctctcgcagctccagctgctggacctggcccacaacggactgacggggctgatcccgagagagctgggagacctggcttccatgaagcaccccaagatcaactccagcacaggatcgctggacgggtccatctaccaggatcggatcgacatcatctggaaggggcaggatttcacgttccagaggatactggagctgatgacgggcatcgatctgtcgggcaactccctctcgcattgcatccctgacgagctcaccaatctccaaggcctccggtttctgaacctgtcgagaaaccgtctgtcgtgtggaattcctagcagcatcggaagcttgaacgttctcgagtcacttgacctctcgatgaacgaactgtcaggagccattcctccagggctgagcaatatgctgtccctcaacaatctgaatctctcgagcaacaacttgtcgggcacgatacccactgggagccagctccagaccctcactgacccatcgatctacagcaacaatcccgggctctgtggacctcctctcaacccttgccaagacacgtcacgtgttcatgaaggagatgtcggaggataccgggacggggacccatggctgtactactgtgtgatcgctggagtcgtttctgggttctggctgtggtacgggatgctcttctccgttgcgaggttgaggtgctctgttttcttctttgctgatcgcgtacagtacagagttatgcagaagatgcggcctttcaatcattttgtttcgaaagagaagagcgatccatcgtctgtgcctatgttttctacaagtgatacaagctgaagaatggactactgatatcttctctttttttcccctctgccctagtgcagcaggagatttgctgtctttctttgtacgctttaagatgtactgtaatgctgagaggaggccagaaggattatagtcaactgttgtatagcaatttcagtaaaaaaaacattatatttttaaggagatctactgtctttctttgtgtgcctttctgatatgaatatgatatgttta

SEQ ID NO: 53081 - DNA, 958 bp, Zea Mays
gggcaatctgtgcctgtttgccacagtgcatggggaggattcactcgctaggcggggatagcggcgtgctcgaaaaggggaggatgccagagcatgggatctcttggtcgccgctggaaagatccagtgactttggcccccatcatgtatgatcagatttttcgtccaagcaagttgtctgggaatgctgattttcatctattcaaggctggagtagagccaaaatgggaagacccagagtgtgcaaatggtggcaaatggactgtcccatgcaacagaaaggcaacctttgagaccatgtggcttgaaacgttgatggctcttattggggagcagtttgatgaaacagaggacatttgtggaattgttgctagtgtccgtgcaagaggagataagctggcattatggactaggactgccagcaatgaagctgtccaggtaaacattggcaagaagtggaaggatgtcatcgactacaacgacaagatcacgtacactttccatgacgactctaagagagacaagcccagcagaggtgggcggtacaccgtgtaagctggacgtcaagaaggccgttgctttggattggaagtggagagcggaggtggggattttcttctgggatcgtcgccgactttcgtttgattcagcttttacacgaggcagttttcgccgctattacaatgttattttcctctcagacagcttatgtggtacaagaaagagacgttggagacattgacggtttctgtatggcactagatttctatcttaatatggcccccccggttcagtagcaaccccaacgagtcatttgctttttggagatccctgcaatgcatggccatgttttagatcttatatatattgtactgtatataaaacgtttgtgatctgtggagccattggcaccttgcatgcaaatgtgccctgtcggtaaggtattggcattttgtgt

SEQ ID NO: 53082 - DNA, 861 bp, Zea Mays
gttcatgtggcggcgggagctgtccatacagtagattgggttctagcatgtatgatcagatttttcgtccaagcaagttgtctgggaatgctgattttcatctattcaaggctggagtagagccaaaatgggaagacccagagtgtgcaaatggtggcaaatggactgtcccatgcaacagaaaggcaacctttgagaccatgtggcttgaaacgttgatggctcttattggggagcagtttgatgaaacagaggacatttgtggaattgttgctagtgtccgtgcaagaggagataagctggcattatggactaggactgccagcaatgaagctgtccaggtaaacattggcaagaagtggaaggatgtcatcgactacaacgacaagatcacgtacactttccatgacgactctaagagagacaagcccagcagaggtgggcggtacaccgtgtaagctggacgtcaagaaggccgttgctttggattggaagtggagagcggaggtggggattttcttctgggatcgtcgccgactttcgtttgattcagcttttacacgaggcagttttcgccgctattacaatgttattttcctctcagacagcttatgtggtacaagaaagagacgttggagacattgacggtttctgtatggcactagatttctatcttaatatggcccccccggttcagtagcaaccccaacgagtcatttgctttttggagatccctgcaatgcatggccatgttttagatcttatatatattgtactgtatataaaacgtttgtgatctgtggagccattggcaccttgcatgcaaatgtgccctgtcggtaaggtattggcattttgtgt

SEQ ID NO: 53083 - DNA, 1234 bp, Zea Mays
aacacgcctttttttcttcgtctcctcattcctcaaagagccggaagccttctccgttctctccgtttttccccttcgcgtatcttcgtccgccgcaacccttcacgtatcgtctctctctcacacggtcacaccctgacctcccccctccccctcccagaaaagacccctcgaaaaacggcggcgctgcgacatggcggaggtcgaggctccagctactgcggtcgaggctccagctgctgcggtcgcgacgacgacccctgaggtggcggcgcccgaggccggagccgctacggaggcgaagggtccgcacaagcttcaccggcagtggaccttctggtacgacatccagacgaagaccaagtccggggctgcgtggggcacctccctcaaaaaggcctacaccttcgacaccgttgaggagttctggagatttttcgtccaagcaagttgtctgggaatgctgattttcatctattcaaggctggagtagagccaaaatgggaagacccagagtgtgcaaatggtggcaaatggactgtcccatgcaacagaaaggcaacctttgagaccatgtggcttgaaacgttgatggctcttattggggagcagtttgatgaaacagaggacatttgtggaattgttgctagtgtccgtgcaagaggagataagctggcattatggactaggactgccagcaatgaagctgtccaggtaaacattggcaagaagtggaaggatgtcatcgactacaacgacaagatcacgtacactttccatgacgactctaagagagacaagcccagcagaggtgggcggtacaccgtgtaagctggacgtcaagaaggccgttgctttggattggaagtggagagcggaggtggggattttcttctgggatcgtcgccgactttcgtttgattcagcttttacacgaggcagttttcgccgctattacaatgttattttcctctcagacagcttatgtggtacaagaaagagacgttggagacattgacggtttctgtatggcactagatttctatcttaatatggcccccccggttcagtagcaaccccaacgagtcatttgctttttggagatccctgcaatgcatggccatgttttagatcttatatatattgtactgtatataaaacgtttgtgatctgtggagccattggcaccttgcatgcaaatgtgccctgtcggtaaggtattggcattttgtgt

SEQ ID NO: 53084 - DNA, 1150 bp, Zea Mays
aacacgcctttttttcttcgtctcctcattcctcaaagagccggaagccttctccgttctctccgtttttccccttcgcgtatcttcgtccgccgcaacccttcacgtatcgtctctctctcacacggtcacaccctgacctcccccctccccctcccagaaaagacccctcgaaaaacggcggcgctgcgacatggcggaggtcgaggctccagctactgcggtcgaggctccagctgctgcggtcgcgacgacgacccctgaggtggcggcgcccgaggccggagccgctacggaggcgaagggtccgcacaagcttcaccggcagtggaccttctggtacgacatccagacgaagaccaagtccggggctgcgtggggcacctccctcaaaaaggcctacaccttcgacaccgttgaggagttctggagcatgtatgatcagatttttcgtccaagcaagttgtctgggaatgctgattttcatctattcaaggctggagtagagccaaaatgggaagacccagagtgtgcaaatggtggcaaatggactgtcccatgcaacagaaaggcaacctttgagaccatgtggcttgaaacgttgatggctcttattggggagcagtttgatgaaacagaggacatttgtggaattgttgctagtgtccgtgcaagaggagataagctggcattatggactaggactgccagcaatgaagctgtccaggtaaacattggcaagaagtggaaggatgtcatcgactacaacgacaagatcacgtacactttccatgacgactctaagagagacaagcccagcagaggtgggcggtacaccgtgtaagctggacgtcaagaaggccgttgctttggattggaagtggagagcggagacagcttatgtggtacaagaaagagacgttggagacattgacggtttctgtatggcactagatttctatcttaatatggcccccccggttcagtagcaaccccaacgagtcatttgctttttggagatccctgcaatgcatggccatgttttagatcttatatatattgtactgtatataaaacgtttgtgatctgtggagccattggcaccttgcatgcaaatgtgccctgtcggtaaggtattggcattttgtgt

SEQ ID NO: 53085 - DNA, 2732 bp, Zea Mays
gtcggaacgattcctaatcggattgcttctctaatttatataaactttgattagccggaacgatttcgggtgcaatccgacgtaaacgaacaaggcctcacttgaacccaagttattcatgttgtaggccaaatttccaatgagtgacaagtttggtaaaaggctatagctacaaagaaagggaaatacagtgagagggagttagaagtgaagctgtgttagcaggttcctgcaactatactgcatcatgaggctcacatatctcaaataccacgacacaatcatctaatagtgcatcaaggactaaatatcagagttgtcaaaaactgaatcgcaaatggctgtgttaagagcaacaattaaatcagcattgcagcaggcgcagagtggatgtacacttgaaccggatgtcgacatcgttcttggtgagctcggtggcgttgatctactccatggaaatgttggcgaggtccttgatgctgtcatccatgaacaaccacatgtgctccttctccagcttcaccttctcttgcgggtttagtccgatcgggtacttttacttgagagcctagttccctctctcctgtgcctcgaccctcggctttagccgctccactgggacctcctgtctcgctagcagggacgatggtataaaggacctcgtcctataagaaatattagtgatatttatatttttaaataaatttattgaaaatagatccaaagatatattgaataatactaattatgtattgtatatttaatcaaagttgaatgtttggaagataaaattttagtgctgcaaatacgaattgcattcaaataggtgtaatataataacttctcgtggttaacgttgaggatttacatgccacatcattcagagtttccgataagaggaacatgacagaaaagttctaactataagaagttgaaattaaggttgcaagaagaagaaaaagaaagaaacattacaaccaggaagcacgaacacgaattaatttttgatttttcattgaaacatgaaaacaattgcatgtatatatgggtgcaattggctgtcagtccatagatatatttttttgagtctatatatacatgattaattatatcatgttattaaacaactaaaccacaaaattagaagtgtgtttaaaaatgacagcgtgcaagtacaaatgcagctgagagctcagatcagcgtggcacctgatatattactaagcaattcttgcaattaacaaaggagtgctgcatcgagttgaatatattggtaactgagctgttgccactatatatctcaatcatcccaactcaaatcagtagagaacgtacactcctgtacgaaaacaagactattttccacattgttctgatcccttttccaattagagattaaggtcaagataaacttgaatatcagttacttattctcccaattagagattaaggtcaatattctataaccactacgacactgacacacacatgcgcccaagtaggaagccgagcaccatccaaatgaaactcggcaccaatcaagtcattaatcagtaacaacggtgattccaaacagtggagatgcaacaatcaattgtcacaccaatccatgtctccagtgtgtgggttatgaactttcttgtgtatggtacaaatgatgtaatctcttcatttagaattggaagatggttgttttgagacctgagatgtgataaacaggcgatgtagagcatctgcataattagatgcagaagatagctcctttaactttaatactatatctgaactttcggtatggagataattctttgcatctaagctagaaccaatcaaatttccagtgcgagcattctcctaaatttgttgacatctgacctcaactacacataccaacataattttacaatttgcatgataaactaccaaatttgaagaaaaaactaagtgtgcaactggaatataccaatgaaagagtaatcatgaattcaagagtgcacaatacactcctcgcctaggatcaagcgaggtacaacaatcagtggcggggccgaggatcctagaggagagtaccggaagaggcaagagaacccaattggctaatcgcaatgagacaacaacaaaagagatttcaccttgcgaggcatgtgtagaagagctgtttggagagctcctgacacttcacaatggtgagggctgaacgacgtggggagccctggaggctcatgcggagcgccatctggagatcctcgtcctcctctcgaccccattgttggagcaactcccgtatttgtaggtatgtggttgtctcgtcacggcagtgaggcaatgggatggaggagatcgaggcgttagataagcgtaggtcgaaggatggatccttcaacggcgcatggtgatgcacgattgccgtgggtcgggaagacgcccgacaggtggatcctcgcttgagcggccatgaggtgccatggggcgggtgggcgagcgagcggatctcgcgatcaggagatgacgccaggtggggtggagagaggaaggggatggggacaggggcacccctcgcccgctaggcaaggcaggccctagcggtcgtccttgtcgtagtcgtggtggagacgtggcgacggtgacgaggggaaccagagtggatctaccgcgtagagatccaacgacggcggtgtgtcatcgtgcctaggggtgggcatgggcgacgcgctccacggcgtctacacgcg

SEQ ID NO: 53086 - DNA, 1276 bp, Zea Mays
cttgtgtgggttcttaaaaaaggatgacatctcgagccccatagcggcgcacatcctagacttctacgacgacgacgacggtggctgcggcggcggcggtggcgatctcttcgtgggagtgaacgcggcctcggatatgttcacggtgccatcggaggatgtctcgacgtcatccgtaacgacgcctcctgcaccctgcggcggccatggcgacaacgcgtcgtcgttggacgccgctgcctcggccttctctcccatgccgttcctcgactccaccctctcggctctgctcgaagaagaagacgcaccggttctagacacggaactcctcgccatcgacgactaccggttcgcggcgacggcggtagccggagatgagccacggcccgagcagcagcggttcgcacaggtgccgatggtgcttccggtggcagaacacccgagtagtctgcagacgcagatgagcagcacagcgttcgagctgctgcacgcagcgtcgtcgtcgtcggggtacaccgacaacgactgcttcgcggcggcaatggacgaaggaggaggagggtacgtgggcctagacgaggccctttgccagcagcagcagcatcagctcctgcaacctggcgcgttgctctccgctggcatgatggagactgcagcgcagggttgctacttcgtcaacggcggtccgacagcacagggagtcctgttcggtgccagtggcagcggcgtggtgatgcccatgacggcggggttggaggagatcggcgagtaccagcgcatgatggagagcgccagcgcagcgctggccgccacgcacagccccgacgcggactccgtcgccgcggcgcagcagatggcgtttagcggcaacggcggggaaatgcagatgggcggcggcagcatgagcccggggcggctgccggcggcgacggaggcggcgtcgagcttggaggacaccgacttcaagagcgcccgcatcaccgttgaggagagacgggagaagatccacaggtacatcaagaagcggaacgaacgcaacttcagcaagaagatcaagtacgcttgcaggaagaccctggcggacagcaggccccgcgtgcgcggcagattcgccaagaacgacgactatggcgagccgtcgtcaagggtggcgcacaaccacgacgaatacgaccacatggccgccatgaaggcacaggacatactcgaccccgacgccctgcaggccgccatgaactcctacatgtacaaccacactgttgagtcctggatgtaa

SEQ ID NO: 53087 - DNA, 1460 bp, Zea Mays
cgcgactacacgagctgggctcgctcgaagtcgactcgttgacagccgtcacccctgctgtcatttcgtcgagcatctcgccagcatcgcgaccgccgggcgccggcttcctccgcatcgcgtcggttgattcccagcgaggatggagaggttcttctccaacccttcaaacgccccgcggtgcgacacagacaccggcatcaccctaatctcgggccctccgtgttggtcagcgggaagacctcgctcctcttccagttcgcggtgaaccgcgcggcggagagtggccgcggcgtcgtgttcatctgcagcaaggggaggctggagagcaaccctcctttcctgtcccagggcgtcgatccatcgatgagcttacttcagaggatacaaatcaaatatattgaagacggtgatgaaatcagaaagtactttgctgcatttcaccttcttgacgacttccccgctgcagtcattgttgatgattttgcagatttcttctccgacaggagctgccaacaaagatatggaattgctagggctcgagatctagcaatggtgcgtgcactagctttgtgccacaatgctattgggcatgcaaatgcaaagcttggaactcttggttattgcaatctattactttctgatgtacatcaaggtgatactccaagattgttgttcatttaccagagatggataaattccatatacacaatccgaggtgacggcaatggatcctacatacttcagaaccttggcagttcagaaactgggtcaaagaaagcaagaaaagctaaatactcaatagcactacaatatcttgttcttgaagagaccagcacctaaaaattcttcatttttctattacagttcagttcccaacagagatcataggacccgacagttagttttatgcttttagcatactgagtgtaacaacaatttccttttttatggttctcgtagctgcacttgagttagttgtgtatgtaagtttgcacctctagctgatgtgggtgttttgcatttgaaccaatccacaaccgggtttgatatgttatgctgaacatcagtgagcaccacaaattttcagtgtcctcgttttgccagaagttcaggatttgctcaagttgttcaactggattgattacatgtgcggatgatgtgcctcataactatttagcgaagcagcaaggtcttgctttaaggaaattattgtcatgaacaaagtgtcaaagtggcaactgcgttgtcaggcgtgtttccgttacctatttccctttttcttccggacaatatttcattccgtgtctccttttccattgaatgtttcatgtacaagtctttgactagatttatataaaaaaatattttgactaaatttatatatagaaaattataaatatttataatacaaaatgataactattagattagttatagaatacatttttataaaaaaa

SEQ ID NO: 53088 - DNA, 1154 bp, Zea Mays
ggagaacttcgatctgatccagcatgaatcgatgtcttctgaaatttgttacattattgttgtgtaaccttgggggttggaagcaggcttgcctggagcaggaactatgctgcgaaggacatcaagtttggtgttgaggcccgtgctctgatgttgaggggtgttgaggagttggcagatgctgtcaaagtgacaatgggacctaaggggcgcaatgtggttattgagcaaagctttggtgcaccgaaagtcacaaaggatggtgtgactgtagcaaagagcattgaatttaaggatagagtaaagaatgttggtgcaagccttgtgaaacaggttgctaatgcaactaatgacactgctggcgatggtaccacatgtgccactgttttgacaaaagcaatatttactgaggggtgcaaatctgttgcggctggaatgaatgcaatggatttaaggcgcggaatctcaatggctgttgacgctgttgtgaccaatctgaaaggcatggccagaatgatcagcacttcagaagaaattgcacaggtgggtacaatatcagcaaatggggaaagggaaattggtgagcttattgccaaggctatggagaaggttggcaaagagggtgtcatcactattgcggacggtaacaccctttataatgagcttgaagttgtggagggtatgaaactagacagaggttacatctctccgtacttcattaccaactcaaaaacccagaaatgtgaattggaagacccattgatcttaattcatgacaagaaggttacgaacatgcatgctgtggttaaggttttagaaatggctctgaagaaacaaaagcctctactgattgttgcagaagatgtggaaagtgaagcattgggcactttgattattaacaagcttcgtgcaggcatcaaggtctgtgctgtcaaagctcctggttttggggaaaacaggaaggcaaacttacaggaccttgcaatccttactggaggagaggtaataactgaagaactaggaatgaaccttgagaattttgagcctcacatgctgggtacatgcaaaaaggtgactgtctctaaggttgcccctgttattcttgatggagccggagacaagaagtccatgaagagagacgaatctctagaaac

SEQ ID NO: 53089 - DNA, 1212 bp, Zea Mays
aaaccctaaaccctagtggatgcttctagagccgccgcgcaccctccagttcgtctccccagcgctgtctctaaaatccactcgtccaccacctcctcggcgcttcgcatccttcccccctccgcaagaaagaagcgaagcaactctccgccgtctccgtttctccacaccacccaaagctctctccgaccacaacctcgcccccagcgcctccttccgcagtcatgtaccgcgcggccgctagcctcgcctccaaggcgcggcaagccgggaacagcctcgccacccgccaggttggaagcaggcttgcctggagcaggaactatgctgcgaaggacatcaagtttggtgttgaggcccgtgctctgatgttgaggggtgttgaggagttggcagatgctgtcaaagtgacaatgggacctaaggtaccacatgtgccactgttttgacaaaagcaatatttactgaggggtgcaaatctgttgcggctggaatgaatgcaatggatttaaggcgcggaatctcaatggctgttgacgctgttgtgaccaatctgaaaggcatggccagaatgatcagcacttcagaagaaattgcacaggtgggtacaatatcagcaaatggggaaagggaaattggtgagcttattgccaaggctatggagaaggttggcaaagagggtgtcatcactattgcggacggtaacaccctttataatgagcttgaagttgtggagggtatgaaactagacagaggttacatctctccgtacttcattaccaactcaaaaacccagaaatgtgaattggaagacccattgatcttaattcatgacaagaaggttacgaacatgcatgctgtggttaaggttttagaaatggctctgaagaaacaaaagcctctactgattgttgcagaagatgtggaaagtgaagcattgggcactttgattattaacaagcttcgtgcaggcatcaaggtctgtgctgtcaaagctcctggttttggggaaaacaggaaggcaaacttacaggaccttgcaatccttactggaggagaggtaataactgaagaactaggaatgaaccttgagaattttgagcctcacatgctgggtacatgcaaaaaggtgactgtctctaaggttgcccctgttattcttgatggagccggagacaagaagtccatgaagagagacgaatctctagaaac

SEQ ID NO: 53090 - DNA, 1823 bp, Zea Mays
atggttccgacgaccacgggcgctgacggagatggtgaacgacgagtaactgcctctgcagtgggcggaggcgacggtggtgccgccaaatcgacgtccatgggagcggatgtagacgaccccgcgtcaaccaccggcaccggtggtgacggggatgcagtggggagtccgcactccaccaccggcagcggaaccaccgctgtccatccatggagaacgcagaagtgcatgttttgcacttgcacacggcgttcagggatgacgtgcactggtggaagtgcagcgtctagccccacagcaaacgcctccaacatggcatcatcaacaatgtgcagaacttcgcgcatatggcgtatgcgcatggaaacgatcacatttacaaaatgttttgtaacaagaaccagctttacttacatgagcccatccgacgtggcagggaaccaccacgatccgagacgaagacgatgcctcccagtccaagaaagaacggagcaggccgcaggcgatacatacgacgcgatgacggcacggtcccaccaggctgatccctcacggttctttcctattcctattccgctgtaccccagtccccacacacaaagcaccgactcactcggagtcggccactctcaccggccgcggcgcccgcaaccgacctcccctccaggcgaccgcatggcggagcgggagcggaagcggaagcgagcggcggaggagtgggagaggcggaagaggggcaggaagagggagaaggagaggcaggtggggtggacgagcgaccccgttgaggcgcttggggaagatgtgatggggcgggtgatggagttcctggacgcgcgcagcgtggcacgatgcaccgcagtctcctgcgcttggcgcggggtagcggcagacaaccgcctctgggcacctatgtgtactgaattgatggcgggaaaggctcatatcccacgtttaacatcgatccgcactggatccaagttgtctacatattcaatggtcattatggatgggaaacggagtcggatcacaaaagaggatctctgcgatcatgcgtgggaatatcgtttcaccatacacctgattactggaggaaccttgatccatcatggaagcacactggtccacctatgcgacgctacttccaccccgatggctaccacagtgcagaccctcatgacgccgtgtggggtggccatgagtgcacctacacggtcataacgagctttgtcgacgatggccagatcagggagcactacgtgaggatcaaccggtggccgccaatgaaggtgtcaaggaaggacgactggagctgggagctatcgaaccacatgtaccgctataacagcatacctgattcccacaggaaaggatgcactggtcctctgttcccagtttggtgaatgcaagtctacggtagtaatcagcggctacggttcatgctgccgcagtcttatctgctagtagaaatcaagcttgccatacgttcgtaactgaggacaactgaaaaatggaatgtggcatcaggaggttgtatttggtacggctgccgagggtcaaggctaggtgtgtatgcaatatacataaacaaggtatatatatgtattatatgttttgtacttttgtggcattgtgatgatgatgatacccttcgtgatggtttggtagtagacttgtgccgtcgcctgaacacttacatgcctgtggagcgtgttgtaaaaataatgtaagtatgcagcaaatgcggtatgttttggtgtttgtggtgtttatgtatatggttacggagaaggtttttggtcgaagggcctaagatgttttct

SEQ ID NO: 53091 - DNA, 1214 bp, Zea Mays
aatctctctgcaaaaggcaggatgaatgtgtatgtcccaaaagacagagttacaaacttacaccagggatatggatttgtagaattcaggagcgaggaagatgcagattatgctattaagactttgaacatgatcaaactatatgggaagcccataagagtaaacaaggcttcccaggataagaagagcttggacgttggagcaaatctgtttattggcaatcttgatccggatgttgatgagaagctcctctatgataccttcagtgcatttggagtgattgtaactaatcctaaggaaattctagaggctttggctttgtgagctatgagtcctttgaatcatctgaccaagcaatagaggccatgaacaaccaacatttgtgcaaccgcccaatcactgtctcttatgcttacaagaaagacacgaaaggagaacgccatggcacaccagcagagagactgctggcagcaaacaatccaggatctcaaaagaataggccacacacaatgtttgcaagtggtccgccgacccaaggtcatccaaatggtggtccgcctgtgccacggccttatggcaatggcacaattcctggacagattcaacacattcggcaaccacctccaccacctgttggacaattcccccctccaatgcagatgcacgggcaaccaacttggcccgctcaacattctatgccgcctcccatgccatcgcaactccagtacaggctcccaatgaggccaccaccaccaaatatgatgcctcctccggttggcatggtaaggccgccacctcctcccactggtatgtcagcaccacctatgtggatgccacccccacccccaccacatcaaggtggtggaatgcctccgcctcccatgtctatgccaccaccgcctccaccaccatctagttaaacacatgcaaaggacagtaccgtctggtcaatgtgtaagctgtaactgtagactaaggatgctggttcctttcatgtctccatgtaacttcgtcaacactaggttaagaggaggtttgagagttaacctgacagatacactcaagattaacagctatttattcatgttgtgttgaagataaaatgaattttgtgcttgtctacccactacttgtgttctctgattgccgtgatacgtttacaacgatcactatgcacgttctgttgccactgaattatcgatggtggaagtttc

SEQ ID NO: 53092 - DNA, 1319 bp, Zea Mays
attttttctgtaatgatgaaggacatgtctgacgcagtggtgagaagcatttccattgagacaaaaggtcctgggtttgatgcaatctctctgcaaaaggcaggatgaatgtgtatgtcccaaaagacagagttacaaacttacaccagggatatggatttgtagaattcaggagcgaggaagatgcagattatgctattaagactttgaacatgatcaaactatatgggaagcccataagagtaaacaaggcttcccaggataagaagagcttggacgttggagcaaatctgtttattggcaatcttgatccggatgttgatgagaagctcctctatgataccttcagtgcatttggagtgattgtaactaatcctaagataatgcgagatcctgaaacaggaaattctagaggctttggctttgtgagctatgagtcctttgaatcatctgaccaagcaatagaggccatgaacaaccaacatttgtgcaaccgcccaatcactgtctcttatgcttacaagaaagacacgaaaggagaacgccatggcacaccagcagagagactgctggcagcaaacaatccaggatctcaaaagaataggccacacacaatgtttgcaagtggtccgccgacccaaggtcatccaaatggtggtccgcctgtgccacggccttatggcaatggcacaattcctggacagattcaacacattcggcaaccacctccaccacctgttggacaattcccccctccaatgcagatgcacgggcaaccaacttggcccgctcaacattctatgccgcctcccatgccatcgcaactccagtacaggctcccaatgaggccaccaccaccaaatatgatgcctcctccggttggcatggtaaggccgccacctcctcccactggtatgtcagcaccacctatgtggatgccacccccacccccaccacatcaaggtggtggaatgcctccgcctcccatgtctatgccaccaccgcctccaccaccatctagttaaacacatgcaaaggacagtaccgtctggtcaatgtgtaagctgtaactgtagactaaggatgctggttcctttcatgtctccatgtaacttcgtcaacactaggttaagaggaggtttgagagttaacctgacagatacactcaagattaacagctatttattcatgttgtgttgaagataaaatgaattttgtgcttgtctacccactacttgtgttctctgattgccgtgatacgtttacaacgatcactatgcacgttctgttgccactgaattatcgatggtggaagtttc

SEQ ID NO: 53093 - DNA, 1321 bp, Zea Mays
caacctaattacattggcagttacttggtggagcacatctttactcctcaatcctcatgtttctgaggagcttctatgggaattgtttgtccaagcaggccctgttgtgaatgtgtatgtcccaaaagacagagttacaaacttacaccagggatatggatttgtagaattcaggagcgaggaagatgcagattatgctattaagactttgaacatgatcaaactatatgggaagcccataagagtaaacaaggcttcccaggataagaagagcttggacgttggagcaaatctgtttattggcaatcttgatccggatgttgatgagaagctcctctatgataccttcagtgcatttggagtgattgtaactaatcctaagataatgcgagatcctgaaacaggaaattctagaggctttggctttgtgagctatgagtcctttgaatcatctgaccaagcaatagaggccatgaacaaccaacatttgtgcaaccgcccaatcactgtctcttatgcttacaagaaagacacgaaaggagaacgccatggcacaccagcagagagactgctggcagcaaacaatccaggatctcaaaagaataggccacacacaatgtttgcaagtggtccgccgacccaaggtcatccaaatggtggtccgcctgtgccacggccttatggcaatggcacaattcctggacagattcaacacattcggcaaccacctccaccacctgttggacaattcccccctccaatgcagatgcacgggcaaccaacttggcccgctcaacattctatgccgcctcccatgccatcgcaactccagtacaggctcccaatgaggccaccaccaccaaatatgatgcctcctccggttggcatggtaaggccgccacctcctcccactggtatgtcagcaccacctatgtggatgccacccccacccccaccacatcaaggtggtggaatgcctccgcctcccatgtctatgccaccaccgcctccaccaccatctagttaaacacatgcaaaggacagtaccgtctggtcaatgtgtaagctgtaactgtagactaaggatgctggttcctttcatgtctccatgtaacttcgtcaacactaggttaagaggaggtttgagagttaacctgacagatacactcaagattaacagctatttattcatgttgtgttgaagataaaatgaattttgtgcttgtctacccactacttgtgttctctgattgccgtgatacgtttacaacgatcactatgcacgttctgttgccactgaattatcgatggtggaagtttc

SEQ ID NO: 53094 - DNA, 1329 bp, Zea Mays
atttttacaagtattgagactgcgattgaacggtcactggaaaaatcgtgcgtgtttcgctaagtggtttctgaggagcttctatgggaattgtttgtccaagcaggccctgttgtgaatgtgtatgtcccaaaagacagagttacaaacttacaccagggatatggatttgtagaattcaggagcgaggaagatgcagattatgctattaagactttgaacatgatcaaactatatgggaagcccataagagtaaacaaggcttcccaggataagaagagcttggacgttggagcaaatctgtttattggcaatcttgatccggatgttgatgagaagctcctctatgataccttcagtgcatttggagtgattgtaactaatcctaagataatgcgagatcctgaaacaggaaattctagaggctttggctttgtgagctatgagtcctttgaatcatctgaccaagcaatagaggccatgaacaaccaacatttgtgcaaccgcccaatcactgtctcttatgcttacaagaaagacacgaaaggagaacgccatggcacaccagcagagagactgctggcagcaaacaatccaggatctcaaaagaataggccacacacaatgtttgcaagtggtccgccgacccaaggtcatccaaatggtggtccgcctgtgccacggccttatggcaatggcacaattcctggacagattcaacacattcggcaaccacctccaccacctgttggacaattcccccctccaatgcagatgcacgggcaaccaacttggcccgctcaacattctatgccgcctcccatgccatcgcaactccagtacaggctcccaatgaggccaccaccaccaaatatgatgcctcctccggttggcatggtaaggccgccacctcctcccactggtatgtcagcaccacctatgtggatgccacccccacccccaccacatcaaggtggtggaatgcctccgcctcccatgtctatgccaccaccgcctccaccaccatctagttaaacacatgcaaaggacagtaccgtctggtcaatgtgtaagctgtaactgtagactaaggatgctggttcctttcatgtctccatgtaacttcgtcaacactaggttaagaggaggtttgagagttaacctgacagatacactcaagattaacagctatttattcatgttgtgttgaagataaaatgaattttgtgcttgtctacccactacttgtgttctctgattgccgtgatacgtttacaacgatcactatgcacgttctgttgccactgaattatcgatggtggaagtttc

SEQ ID NO: 53095 - DNA, 4623 bp, Zea Mays
actgcctccagctcgctacccaccgcagccgctctgtccccgtcgtccgctaattggaaccataacccccacggtgctaagaggaagacaaaagcgaccttcggcccatctctggcgccgcctcgctccttgtccatcgaacttccagttcgtccactgccccctacccccttaggccaccgggcatggaggccctccgccgaaaccccaacgattgccgcgttgtccaccgccttcgaatgctgaggacaacgaatatccgttggatgtgtcgccagcactggagtttgtcataacagaaaaggatattactggtacaggagctgactcgacacttgttgtctttaataatgaaaggggattttcggcagcaaacattgaatccatatgtaggattggcaggtccactaagaaagggaatagacatcttggctacattggtgaaaaaggtattggtttcaaaagtgtatttctagtttcaagtcaaccacacatattcagcaatggatatcagataaagttcagtgaaaagccttcagcagtttgtgatataggatatattgttcctgaatgggttgatgggaagccaaatattgatgacataagaacagtatatggcccttctaggagccttcctacaactgttattatcttacctttgaagactgataagattcttgctgtgaagaaagaactttctagcacgcatcctgaaattcttttgtttctttcaaagattaggcagctctctgtcaaggaaatgaacaatgatcccaaggccagtaagatcagccagatttcgatctccagtgaagtggactactggtccagcaaggacatagatgcagagtcttacacgcttcatttagctatgcaggaaaatagcaagggggaaacagaagagtgcacctattatatgtggaggcaaaagtttgctgtccaaccagactgcagaattcagaaaaggatggaagttgatcaatgggtagttacgttagcatttcctcatggacagagactaagcagaggagcaaaatcgcctggagtatatgcattccttcctacagagatggtcactaatttgccctttattattcaagcagattttcttctagcttcatcccgagagtccattttatttgacagccaatggaatcgtggtatccttgagtgtgtaccttctgcttttatcaatgcttttggagctctcttgaaatcgtcaagggatgccccacattttgcgctcccacccatttttaggtttctgccgattcaggaatcctcaatatcgctctttgatagtatcaggctgtccataaaaaccaaagttcaagctgaggatataatgccttgtgaaccatgcactgcacagaaggtcttctgcaagcccgctgaagtctctcgcctggatagtgcgttctgcagaattttgaatttggcccagaagcaagggattggtctgcagaatctatcttcgtatggtacttttgtactaagctcctaccttgacaaccttgagtatgatgatgtattagaatttttaggtgttggatatgccaatagagaatggtacagtaagtgtattgatggattaaaccttgtgaaagaggcatcagaagaagtgtaccttcagatcttatattttgttgctggaaattggaaagtgttttctggaacaagtatgatgcttatatctctcataaaatatgtggatgccagcggccaattgtcatgttccagtgtgctagcagcacaaaggtctttaaggttatgcacaacatctaatttggatgacttatcagatttctgaatgagaataacaagactccacatgtcattgaacaaatgaaaaatggctgctgggttaagactcttattggcagaagatcaccattaaatgcaatcctatttaattcagaatgggagaatgcctcggccatcagtatcttgccttttatcgatacagccttctatggggttgacataactgatttcaggtcagagcttaggctatttggagttgttgttgacttcaaaagaaattatcagctggtggttgataactttcggttctctatagatacaatcactcctggtgccacaatactaatgctcaattgtattcgatatgttgaggaatgtcatgattttgtagaaagactgaaagatctcagatgggtgaagactaatgttggcttcagagctcctcacgaaacattccttattgatgatgactggaaatgtcttttggaggtcattgacaagacaccattgcttgatctggaattctatggggatgaaatcaagctgtacaaagaagagttatgtaaaactggtataatcgctggcttcaaggaagcaagtaagaaaatagtgtgtcatgtcaagaaacttgtaaacactagtattacaaaagagctggcatttgcactactaaaatgctacagtgacctaaccaccaggcatgggaggttacctgttgctcttgcgaacttcatgcaacatgagagatggctgcatacaacatttggtttcaggtctccgaaggaagcaattctttttagctcagaatgggagtctattgctttagtctcttgcctaccattcgttgatgacagcgatgcacagtatggccttgggaaggagatttactgctacagtaatgaactgaaggccttgggtgccaaaactcgactagaacagggtgcagcatttgtcatttcggggctccgtattccaactgatccatcagctgtgactccacaagctgttatttcattgctaaaatgcatcagaatttggagacaaaacggatctgatctacctaaaagtttcatgagcgcaatcaacttgaagtgggttaagacaactgcaggttaccgccatccaaacggttgtgtcctctttggttcagtgtgctcttctcatgtttacagggatgatggccctttcgtagatgaagtgttttatggacaggagctagtttcatatgagagtgagctgcaaaaaataggagttaatgtggatcccagagctggttgtgcttgtgcactgatggcacagcatctcaaaggtctctctaatgctgatgcaatctcaaggatttactcgtacttggaggtataccgctggaagcctcgattcaccagtgatgactggatttggatacctcatgcagctaatcaaggacaatgggtcaaccctgccagttgtgttctttatgatactcacggtctttttggctctcagctctatgttctggtgaaatggtacagcagcaaattgcttcgatacttcaacacggcttttggtgtgaagcatcgtccaacagtcagtgattattgcaagctctggagtatgtggcagggctcaaactctacactgacacaaaaagaatgtgttgccttctgggaattctttggcaagaactggagcactgatatggggaaattcattgctgggtgtgtcgataaggttcctgttagttccggagaccagatcttgctacttgagaaacaagatgtctttattcccgatgatctactacttgaggatcttttcaagaagcaggctcagaaacctttgtttgtttggtatccttcaactagtttgccttgcttgtctcctgctagattaaatgatatctacagtagcattggtgttcagaagatatcaaaatctgttgtcagcaatcaatacgatcacttggaaattgaatctgtcacccttgttcataagggtaccgtaattaaacttggcttgctcaaaattgtcctggctttccttacggatcctatccttgacatttctgtcgagaagaggtatgaaatggtcacaagtctcacaaatgttgctgtctacgagacaagagggcctctcaatgtgagttatcaggttggactttcctcgggaagaagcttgcatgttacatgtgcaaggtttttccgttgggagagggagagctcgaggttatttgtgacggaggctgatgaaccaggatcaatgacctatgcaatgaagatggagtatgcatcatgttttgctgaggagatctcaaaaggattgttgtcggagaataaagaacagattccagctcttgctgaactcgtgaggactgggttcttgctggaatttgatgttcctgcagttcagattttgttgaatttgaagaacctacgactgtttgagcaggatgaacaatttcttttaaagctttcacaacattgtgacgatggactaggtggtccttctccttcctatattaatataatagtttgctatttgagggtactgtgggattttgccaagagatcaacatactgatttagttgcatctaaggttatgaaggattcatggaagtgcgttcatatgtgctctccggcaaatgcgtctcaagatacaattgcaaaacatgtcttatggtgttcttgcttagcttcttctatgtatttttttggtttgaactattatattattccagtggtttttatgttaattatgaagcgtggtttgaatatcacagtatttgatatattcgtacttatacttttttattagctgacagtgatattttacggtatggaactatggatacttttcgtggtttgtttttctaagtgaat

SEQ ID NO: 53096 - DNA, 4578 bp, Zea Mays
agaagttgccccgccccactgcctccagctcgctacccaccgcagccgctctgtccccgtcgtccgctaattggaaccataacccccacggtgctaagaggaagacaaaagcgaccttcggcccatctctggcgccgcctcgctccttgtccatcgaacttccagttcgtccactgccccctacccccttaggccaccgggcatggaggccctccgccgaaaccccaacgattgccgcgttgtccaccgccttcgaatgctgaggacaacgaatatccgttggatgtgtcgccagcactggagtttgtcataacagaaaaggatattactggtacaggagctgactcgacacttgttgtctttaataatgaaaggggattttcggcagcaaacattgaatccatatgtaggattggcaggtccactaagaaagggaatagacatcttggctacattggtgaaaaagtttcaagtcaaccacacatattcagcaatggatatcagataaagttcagtgaaaagccttcagcagtttgtgatataggatatattgttcctgaatgggttgatgggaagccaaatattgatgacataagaacagtatatggcccttctaggagccttcctacaactgttattatcttacctttgaagactgataagattcttgctgtgaagaaagaactttctagcacgcatcctgaaattcttttgtttctttcaaagattaggcagctctctgtcaaggaaatgaacaatgatcccaaggccagtaagatcagccagatttcgatctccagtgaagtggactactggtccagcaaggacatagatgcagagtcttacacgcttcatttagctatgcaggaaaatagcaagggggaaacagaagagtgcacctattatatgtggaggcaaaagtttgctgtccaaccagactgcagaattcagaaaaggatggaagttgatcaatgggtagttacgttagcatttcctcatggacagagactaagcagaggagcaaaatcgcctggagtatatgcattccttcctacagagatggtcactaatttgccctttattattcaagcagattttcttctagcttcatcccgagagtccattttatttgacagccaatggaatcgtggtatccttgagtgtgtaccttctgcttttatcaatgcttttggagctctcttgaaatcgtcaagggatgccccacattttgcgctcccacccatttttaggtttctgccgattcaggaatcctcaatatcgctctttgatagtatcaggctgtccataaaaaccaaagttcaagctgaggatataatgccttgtgaaccatgcactgcacagaaggtcttctgcaagcccgctgaagtctctcgcctggatagtgcgttctgcagaattttgaatttggcccagaagcaagggattggtctgcagaatctatcttcgtatggtacttttgtactaagctcctaccttgacaaccttgagtatgatgatgtattagaatttttaggtgttggatatgccaatagagaatggtacagtaagtgtattgatggattaaaccttgtgaaagaggcatcagaagaagtgtaccttcagatcttatattttgttgctggaaattggaaagtgttttctggaacaagtatgatgcttatatctctcataaaatatgtggatgccagcggccaattgtcatgttccagtgtgctagcagcacaaaggtctttaagatttctgaatgagaataacaagactccacatgtcattgaacaaatgaaaaatggctgctgggttaagactcttattggcagaagatcaccattaaatgcaatcctatttaattcagaatgggagaatgcctcggccatcagtatcttgccttttatcgatacagccttctatggggttgacataactgatttcaggtcagagcttaggctatttggagttgttgttgacttcaaaagaaattatcagctggtggttgataactttcggttctctatagatacaatcactcctggtgccacaatactaatgctcaattgtattcgatatgttgaggaatgtcatgattttgtagaaagactgaaagatctcagatgggtgaagactaatgttggcttcagagctcctcacgaaacattccttattgatgatgactggaaatgtcttttggaggtcattgacaagacaccattgcttgatctggaattctatggggatgaaatcaagctgtacaaagaagagttatgtaaaactggtataatcgctggcttcaaggaagcaagtaagaaaatagtgtgtcatgtcaagaaacttgtaaacactagtattacaaaagagctggcatttgcactactaaaatgctacagtgacctaaccaccaggcatgggaggttacctgttgctcttgcgaacttcatgcaacatgagagatggctgcatacaacatttggtttcaggtctccgaaggaagcaattctttttagctcagaatgggagtctattgctttagtctcttgcctaccattcgttgatgacagcgatgcacagtatggccttgggaaggagatttactgctacagtaatgaactgaaggccttgggtgccaaaactcgactagaacagggtgcagcatttgtcatttcggggctccgtattccaactgatccatcagctgtgactccacaagctgttatttcattgctaaaatgcatcagaatttggagacaaaacggatctgatctacctaaaagtttcatgagcgcaatcaacttgaagtgggttaagacaactgcaggttaccgccatccaaacggttgtgtcctctttggttcagtgtgctcttctcatgtttacagggatgatggccctttcgtagatgaagtgttttatggacaggagctagtttcatatgagagtgagctgcaaaaaataggagttaatgtggatcccagagctggttgtgcttgtgcactgatggcacagcatctcaaaggtctctctaatgctgatgcaatctcaaggatttactcgtacttggaggtataccgctggaagcctcgattcaccagtgatgactggatttggatacctcatgcagctaatcaaggacaatgggtcaaccctgccagttgtgttctttatgatactcacggtctttttggctctcagctctatgttctggtgaaatggtacagcagcaaattgcttcgatacttcaacacggcttttggtgtgaagcatcgtccaacagtcagtgattattgcaagctctggagtatgtggcagggctcaaactctacactgacacaaaaagaatgtgttgccttctgggaattctttggcaagaactggagcactgatatggggaaattcattgctgggtgtgtcgataaggttcctgttagttccggagaccagatcttgctacttgagaaacaagatgtctttattcccgatgatctactacttgaggatcttttcaagaagcaggctcagaaacctttgtttgtttggtatccttcaactagtttgccttgcttgtctcctgctagattaaatgatatctacagtagcattggtgttcagaagatatcaaaatctgttgtcagcaatcaatacgatcacttggaaattgaatctgtcacccttgttcataagggtaccgtaattaaacttggcttgctcaaaattgtcctggctttccttacggatcctatccttgacatttctgtcgagaagaggtatgaaatggtcacaagtctcacaaatgttgctgtctacgagacaagagggcctctcaatgtgagttatcaggttggactttcctcgggaagaagcttgcatgttacatgtgcaaggtttttccgttgggagagggagagctcgaggttatttgtgacggaggctgatgaaccaggatcaatgacctatgcaatgaagatggagtatgcatcatgttttgctgaggagatctcaaaaggattgttgtcggagaataaagaacagattccagctcttgctgaactcgtgaggactgggttcttgctggaatttgatgttcctgcagttcagattttgttgaatttgaagaacctacgactgtttgagcaggatgaacaatttcttttaaagctttcacaacattgtgacgatggactaggtggtccttctccttcctatattaatataatagtttgctatttgagggtactgtgggattttgccaagagatcaacatactgatttagttgcatctaaggttatgaaggattcatggaagtgcgttcatatgtgctctccggcaaatgcgtctcaagatacaattgcaaaacatgtcttatggtgttcttgcttagcttcttctatgtatttttttggtttgaactattatattattccagtggtttttatgttaattatgaagcgtggtttgaatatcacagtatttgatatattcgtacttatacttttttattagctgacagtgatattttacggtatggaactatggatacttttcgtggtttgtttttctaagtgaat

SEQ ID NO: 53097 - DNA, 4497 bp, Zea Mays
atggcctcgtcgtcctcagcggcgagggcgcacgtggagcggatccggcgggaacggttctacatcggccgggaggagcggaacccgctagcggaggacatccaccaggcggtcagctacctctctgaggagctctactccaaggacgtccatttcctcatggagctcattcagaatgctgaggacaacgaatatccgttggatgtgtcgccagcactggagtttgtcataacagaaaaggatattactggtacaggagctgactcgacacttgttgtctttaataatgaaaggggattttcggcagcaaacattgaatccatatgtaggattggcaggtccactaagaaagggaatagacatcttggctacattggtgaaaaagtttcaagtcaaccacacatattcagcaatggatatcagataaagttcagtgaaaagccttcagcagtttgtgatataggatatattgttcctgaatgggttgatgggaagccaaatattgatgacataagaacagtatatggcccttctaggagccttcctacaactgttattatcttacctttgaagactgataagattcttgctgtgaagaaagaactttctagcacgcatcctgaaattcttttgtttctttcaaagattaggcagctctctgtcaaggaaatgaacaatgatcccaaggccagtaagatcagccagatttcgatctccagtgaagtggactactggtccagcaaggacatagatgcagagtcttacacgcttcatttagctatgcaggaaaatagcaagggggaaacagaagagtgcacctattatatgtggaggcaaaagtttgctgtccaaccagactgcagaattcagaaaaggatggaagttgatcaatgggtagttacgttagcatttcctcatggacagagactaagcagaggagcaaaatcgcctggagtatatgcattccttcctacagagatggtcactaatttgccctttattattcaagcagattttcttctagcttcatcccgagagtccattttatttgacagccaatggaatcgtggtatccttgagtgtgtaccttctgcttttatcaatgcttttggagctctcttgaaatcgtcaagggatgccccacattttgcgctcccacccatttttaggtttctgccgattcaggaatcctcaatatcgctctttgatagtatcaggctgtccataaaaaccaaagttcaagctgaggatataatgccttgtgaaccatgcactgcacagaaggtcttctgcaagcccgctgaagtctctcgcctggatagtgcgttctgcagaattttgaatttggcccagaagcaagggattggtctgcagaatctatcttcgtatggtacttttgtactaagctcctaccttgacaaccttgagtatgatgatgtattagaatttttaggtgttggatatgccaatagagaatggtacagtaagtgtattgatggattaaaccttgtgaaagaggcatcagaagaagtgtaccttcagatcttatattttgttgctggaaattggaaagtgttttctggaacaagtatgatgcttatatctctcataaaatatgtggatgccagcggccaattgtcatgttccagtgtgctagcagcacaaaggtctttaagatttctgaatgagaataacaagactccacatgtcattgaacaaatgaaaaatggctgctgggttaagactcttattggcagaagatcaccattaaatgcaatcctatttaattcagaatgggagaatgcctcggccatcagtatcttgccttttatcgatacagccttctatggggttgacataactgatttcaggtcagagcttaggctatttggagttgttgttgacttcaaaagaaattatcagctggtggttgataactttcggttctctatagatacaatcactcctggtgccacaatactaatgctcaattgtattcgatatgttgaggaatgtcatgattttgtagaaagactgaaagatctcagatgggtgaagactaatgttggcttcagagctcctcacgaaacattccttattgatgatgactggaaatgtcttttggaggtcattgacaagacaccattgcttgatctggaattctatggggatgaaatcaagctgtacaaagaagagttatgtaaaactggtataatcgctggcttcaaggaagcaagtaagaaaatagtgtgtcatgtcaagaaacttgtaaacactagtattacaaaagagctggcatttgcactactaaaatgctacagtgacctaaccaccaggcatgggaggttacctgttgctcttgcgaacttcatgcaacatgagagatggctgcatacaacatttggtttcaggtctccgaaggaagcaattctttttagctcagaatgggagtctattgctttagtctcttgcctaccattcgttgatgacagcgatgcacagtatggccttgggaaggagatttactgctacagtaatgaactgaaggccttgggtgccaaaactcgactagaacagggtgcagcatttgtcatttcggggctccgtattccaactgatccatcagctgtgactccacaagctgttatttcattgctaaaatgcatcagaatttggagacaaaacggatctgatctacctaaaagtttcatgagcgcaatcaacttgaagtgggttaagacaactgcaggttaccgccatccaaacggttgtgtcctctttggttcagtgtgctcttctcatgtttacagggatgatggccctttcgtagatgaagtgttttatggacaggagctagtttcatatgagagtgagctgcaaaaaataggagttaatgtggatcccagagctggttgtgcttgtgcactgatggcacagcatctcaaaggtctctctaatgctgatgcaatctcaaggatttactcgtacttggaggtataccgctggaagcctcgattcaccagtgatgactggatttggatacctcatgcagctaatcaaggacaatgggtcaaccctgccagttgtgttctttatgatactcacggtctttttggctctcagctctatgttctggtgaaatggtacagcagcaaattgcttcgatacttcaacacggcttttggtgtgaagcatcgtccaacagtcagtgattattgcaagctctggagtatgtggcagggctcaaactctacactgacacaaaaagaatgtgttgccttctgggaattctttggcaagaactggagcactgatatggggaaattcattgctgggtgtgtcgataaggttcctgttagttccggagaccagatcttgctacttgagaaacaagatgtctttattcccgatgatctactacttgaggatcttttcaagaagcaggctcagaaacctttgtttgtttggtatccttcaactagtttgccttgcttgtctcctgctagattaaatgatatctacagtagcattggtgttcagaagatatcaaaatctgttgtcagcaatcaatacgatcacttggaaattgaatctgtcacccttgttcataagggtaccgtaattaaacttggcttgctcaaaattgtcctggctttccttacggatcctatccttgacatttctgtcgagaagaggtatgaaatggtcacaagtctcacaaatgttgctgtctacgagacaagagggcctctcaatgtgagttatcaggttggactttcctcgggaagaagcttgcatgttacatgtgcaaggtttttccgttgggagagggagagctcgaggttatttgtgacggaggctgatgaaccaggatcaatgacctatgcaatgaagatggagtatgcatcatgttttgctgaggagatctcaaaaggattgttgtcggagaataaagaacagattccagctcttgctgaactcgtgaggactgggttcttgctggaatttgatgttcctgcagttcagattttgttgaatttgaagaacctacgactgtttgagcaggatgaacaatttcttttaaagctttcacaacattgtgacgatggactaggtggtccttctccttcctatattaatataatagtttgctatttgagggtactgtgggattttgccaagagatcaacatactgatttagttgcatctaaggttatgaaggattcatggaagtgcgttcatatgtgctctccggcaaatgcgtctcaagatacaattgcaaaacatgtcttatggtgttcttgcttagcttcttctatgtatttttttggtttgaactattatattattccagtggtttttatgttaattatgaagcgtggtttgaatatcacagtatttgatatattcgtacttatacttttttattagctgacagtgatattttacggtatggaactatggatacttttcgtggtttgtttttctaagtgaat

SEQ ID NO: 53098 - DNA, 4056 bp, Zea Mays
caaaagcacaaccatctcgtgctgcttgagagaatgctgaggacaacgaatatccgttggatgtgtcgccagcactggagtttgtcataacagaaaaggatattactggtacaggagctgactcgacacttgttgtctttaataatgaaaggggattttcggcagcaaacattgaatccatatgtaggattggcaggtccactaagaaagggaatagacatcttggctacattggtgaaaaagtttcaagtcaaccacacatattcagcaatggatatcagataaagttcagtgaaaagccttcagcagtttgtgatataggatatattgttcctgaatgggttgatgggaagccaaatattgatgacataagaacagtatatggcccttctaggagccttcctacaactgttattatcttacctttgaagactgataagattcttgctgtgaagaaagaactttctagcacgcatcctgaaattcttttgtttctttcaaagattaggcagctctctgtcaaggaaatgaacaatgatcccaaggccagtaagatcagccagatttcgatctccagtgaagtggactactggtccagcaaggacatagatgcagagtcttacacgcttcatttagctatgcaggaaaatagcaagggggaaacagaagagtgcacctattatatgtggaggcaaaagtttgctgtccaaccagactgcagaattcagaaaaggatggaagttgatcaatgggtagttacgttagcatttcctcatggacagagactaagcagaggagcaaaatcgcctggagtatatgcattccttcctacagagatggtcactaatttgccctttattattcaagcagattttcttctagcttcatcccgagagtccattttatttgacagccaatggaatcgtggtatccttgagtgtgtaccttctgcttttatcaatgcttttggagctctcttgaaatcgtcaagggatgccccacattttgcgctcccacccatttttaggtttctgccgattcaggaatcctcaatatcgctctttgatagtatcaggctgtccataaaaaccaaagttcaagctgaggatataatgccttgtgaaccatgcactgcacagaaggtcttctgcaagcccgctgaagtctctcgcctggatagtgcgttctgcagaattttgaatttggcccagaagcaagggattggtctgcagaatctatcttcgtatggtacttttgtactaagctcctaccttgacaaccttgagtatgatgatgtattagaatttttaggtgttggatatgccaatagagaatggtacagtaagtgtattgatggattaaaccttgtgaaagaggcatcagaagaagtgtaccttcagatcttatattttgttgctggaaattggaaagtgttttctggaacaagtatgatgcttatatctctcataaaatatgtggatgccagcggccaattgtcatgttccagtgtgctagcagcacaaaggtctttaaggttatgcacaacatctaatttggatgacttatcagatttctgaatgagaataacaagactccacatgtcattgaacaaatgaaaaatggctgctgggttaagactcttattggcagaagatcaccattaaatgcaatcctatttaattcagaatgggagaatgcctcggccatcagtatcttgccttttatcgatacagccttctatggggttgacataactgatttcaggtcagagcttaggctatttggagttgttgttgacttcaaaagaaattatcagctggtggttgataactttcggttctctatagatacaatcactcctggtgccacaatactaatgctcaattgtattcgatatgttgaggaatgtcatgattttgtagaaagactgaaagatctcagatgggtgaagactaatgttggcttcagagctcctcacgaaacattccttattgatgatgactggaaatgtcttttggaggtcattgacaagacaccattgcttgatctggaattctatggggatgaaatcaagctgtacaaagaagagttatgtaaaactggtataatcgctggcttcaaggaagcaagtaagaaaatagtgtgtcatgtcaagaaacttgtaaacactagtattacaaaagagctggcatttgcactactaaaatgctacagtgacctaaccaccaggcatgggaggttacctgttgctcttgcgaacttcatgcaacatgagagatggctgcatacaacatttggtttcaggtctccgaaggaagcaattctttttagctcagaatgggagtctattgctttagtctcttgcctaccattcgttgatgacagcgatgcacagtatggccttgggaaggagatttactgctacagtaatgaactgaaggccttgggtgccaaaactcgactagaacagggtgcagcatttgtcatttcggggctccgtattccaactgatccatcagctgtgactccacaagctgttatttcattgctaaaatgcatcagaatttggagacaaaacggatctgatctacctaaaagtttcatgagcgcaatcaacttgaagtgggttaagacaactgcaggttaccgccatccaaacggttgtgtcctctttggttcagtgtgctcttctcatgtttacagggatgatggccctttcgtagatgaagtgttttatggacaggagctagtttcatatgagagtgagctgcaaaaaataggagttaatgtggatcccagagctggttgtgcttgtgcactgatggcacagcatctcaaaggtctctctaatgctgatgcaatctcaaggatttactcgtacttggaggtataccgctggaagcctcgattcaccagtgatgactggatttggatacctcatgcagctaatcaaggacaatgggtcaaccctgccagttgtgttctttatgatactcacggtctttttggctctcagctctatgttctggtgaaatggtacagcagcaaattgcttcgatacttcaacacggcttttggtgtgaagcatcgtccaacagtcagtgattattgcaagctctggagtatgtggcagggctcaaactctacactgacacaaaaagaatgtgttgccttctgggaattctttggcaagaactggagcactgatatggggaaattcattgctgggtgtgtcgataaggttcctgttagttccggagaccagatcttgctacttgagaaacaagatgtctttattcccgatgatctactacttgaggatcttttcaagaagcaggctcagaaacctttgtttgtttggtatccttcaactagtttgccttgcttgtctcctgctagattaaatgatatctacagtagcattggtgttcagaagatatcaaaatctgttgtcagcaatcaatacgatcacttggaaattgaatctgtcacccttgttcataagggtaccgtaattaaacttggcttgctcaaaattgtcctggctttccttacggatcctatccttgacatttctgtcgagaagaggtatgaaatggtcacaagtctcacaaatgttgctgtctacgagacaagagggcctctcaatgtgagttatcaggttggactttcctcgggaagaagcttgcatgttacatgtgcaaggtttttccgttgggagagggagagctcgaggttatttgtgacggaggctgatgaaccaggatcaatgacctatgcaatgaagatggagtatgcatcatgttttgctgaggagatctcaaaaggattgttgtcggagaataaagaacagattccagctcttgctgaactcgtgaggactgggttcttgctggaatttgatgttcctgcagttcagattttgttgaatttgaagaacctacgactgtttgagcaggatgaacaatttcttttaaagctttcacaacattgtgacgatggactaggtggtccttctccttcctatattaatataatagtttgctatttgagggt

SEQ ID NO: 53099 - DNA, 2346 bp, Zea Mays
atcgattcatcttcctatcctgttgaacactgcctatgctagctgcatgcatgcgcgcggatctaggcaggaacaaggcaggcccctcgtcccgcggctgaccacgcagagatcgcacgagtgtggcattggccgtcgtcgcgacgacacttgggtcatctatcatcctccgatccgtcgcctcgccgccggccggcgagcccgagagtacgaggccatgacgcttgcgagcacggacaaggtggtgctgggatgcgtcgcgttcagcatcttctgggtgctggccgtgttcccgtcggtgccgtttatgccggtggggcgcaccgcggggtccctcctgggcgccatgctcatggtgctgttccgcgtgatgacccccgacgaggcgtacaaggcgatcgacctcccgatcctgggcctcctcttcggcaccatggtggtgagcatcttcctggagcgcgccgacatgttcgagtacctcggcggcgcgctggcgtggcggagccggggcagcaaggacctgctcctccgcgtctgcctcgtgtccgccgtggccagcgcgctcttcaccaacgacacctgctgcgtggtgctcaccgagttcatcctcaagctggcgcgccagaacggcctgcccccgcagcccttcctgctggcgctcgcctccagctccaacatcggctccgccgccacgcccatcggcaacccgcagaacctggtcatcgccgtgcagagcggcatcaccttcggccagttcctcgtcggcgtcttcccggccatggccgtcggcgtcgccgccaacacctgcgtcctgctctgctacttctggaggtacctcgcggcgccggagaaggaccaggaggcggggcccgacgcggtcgtggccgacgaggaggtcacctcgcacaggttcacaccggcgcggatgtcgcacgcctcgtccatgaacggcggcttcgacggcgactgcgtcagcgagcccatgcgccggagcgagagcctgggcagggccgacgcgctgaggagccgcagctacaactcggagggcgacatccaggtctccatccggtccatgcgcgcctccagcctgtcgcaggagatggtggatgtgtccaccgtcggcgacgggcccaggaagatcaccaggagcaccagccagcagcgcagcgtcatcatcgaggacgcgccgcccgaggccgacgacgacgcccacaagggcaaggacggcgacgacgacgacgtcaaggtgaagaggtggaaggtggtcgtgtggaagagcgccgtgtacctcaccacgctgggcatgctcgtcgcgcttctcatgggcctcaacatgtcctggtccgccatcaccgctgctcttgtcctcctcgcgctcgacttcactgacgcgcaggcttgcctggagaaggtgtcctactctttgctcatcttcttctgtgggatgttcataacggtcgacggcttcaacaagaccggcatacccaacgcgctctgggagctggtcgagccgtattcgagaatcgacagcgccagaggcacggcgctcctcgcgcttgtcattctcgtcctttcgaacgtggcctccaatgtcccaactgtcctcctgctgggctccagagtggcagcgtcagcggctgccatctccccggagtcgcagaagaaagcctggctcatactagcgtgggtcagcacggtgtccggcaatctcaccctcctgggctccgccgccaacctgatcgtgtgcgagcaggcgcggcgggcgcagttcttcgggtacaacctcaccttctggagccacctccgcttcggcctgccgtcaaccatcatcgtcaccgccatcggcctgctcatcgtcgtcagctactgaatggcgtcgggttgcccatctgaatggcatcgatcgagcagtggccggcacaggtagcagggctcctctcaagtctcaatctggttctgtcggaggggcctgtggtcggagcctttctcggtgaagaaacaagttatgccgaggtgtggactttgcaactttaccctgcatttgcaggacgaaaatcgttacagaggcttgtgctctaccgacccagctagacgcgccaacgtggttgtgtattgagatctttctttgtggcaacaggccggtcactctagcactcatagcaaataatatatagctgttgagtatcatatttggcacctaagcatgttcggacggttcgcccatgtggcccggacggtccgcatctccacgaccagattaacacagatgagagtatttatcccatgcatgtgtatcctaacatatccgtgcaaatatattggttcacgcctaaaaataggtccaga

SEQ ID NO: 53100 - DNA, 2398 bp, Zea Mays
ccaacctggaggaggagattagtaggagtagtatcgatcgatcagcgccagcaaacacagtcgaggcccccgcgacacgcgaggtgtaaaaccgcagacggcggccgtgaggatctaggcaggaacaaggcaggcccctcgtcccgcggctgaccacgcagagatcgcacgagtgtggcattggccgtcgtcgcgacgacacttgggtcatctatcatcctccgatccgtcgcctcgccgccggccggcgagcccgagagtacgaggccatgacgcttgcgagcacggacaaggtggtgctgggatgcgtcgcgttcagcatcttctgggtgctggccgtgttcccgtcggtgccgtttatgccggtggggcgcaccgcggggtccctcctgggcgccatgctcatggtgctgttccgcgtgatgacccccgacgaggcgtacaaggcgatcgacctcccgatcctgggcctcctcttcggcaccatggtggtgagcatcttcctggagcgcgccgacatgttcgagtacctcggcggcgcgctggcgtggcggagccggggcagcaaggacctgctcctccgcgtctgcctcgtgtccgccgtggccagcgcgctcttcaccaacgacacctgctgcgtggtgctcaccgagttcatcctcaagctggcgcgccagaacggcctgcccccgcagcccttcctgctggcgctcgcctccagctccaacatcggctccgccgccacgcccatcggcaacccgcagaacctggtcatcgccgtgcagagcggcatcaccttcggccagttcctcgtcggcgtcttcccggccatggccgtcggcgtcgccgccaacacctgcgtcctgctctgctacttctggaggtacctcgcggcgccggagaaggaccaggaggcggggcccgacgcggtcgtggccgacgaggaggtcacctcgcacaggttcacaccggcgcggatgtcgcacgcctcgtccatgaacggcggcttcgacggcgactgcgtcagcgagcccatgcgccggagcgagagcctgggcagggccgacgcgctgaggagccgcagctacaactcggagggcgacatccaggtctccatccggtccatgcgcgcctccagcctgtcgcaggagatggtggatgtgtccaccgtcggcgacgggcccaggaagatcaccaggagcaccagccagcagcgcagcgtcatcatcgaggacgcgccgcccgaggccgacgacgacgcccacaagggcaaggacggcgacgacgacgacgtcaaggtgaagaggtggaaggtggtcgtgtggaagagcgccgtgtacctcaccacgctgggcatgctcgtcgcgcttctcatgggcctcaacatgtcctggtccgccatcaccgctgctcttgtcctcctcgcgctcgacttcactgacgcgcaggcttgcctggagaaggtgtcctactctttgctcatcttcttctgtgggatgttcataacggtcgacggcttcaacaagaccggcatacccaacgcgctctgggagctggtcgagccgtattcgagaatcgacagcgccagaggcacggcgctcctcgcgcttgtcattctcgtcctttcgaacgtggcctccaatgtcccaactgtcctcctgctgggctccagagtggcagcgtcagcggctgccatctccccggagtcgcagaagaaagcctggctcatactagcgtgggtcagcacggtgtccggcaatctcaccctcctgggctccgccgccaacctgatcgtgtgcgagcaggcgcggcgggcgcagttcttcgggtacaacctcaccttctggagccacctccgcttcggcctgccgtcaaccatcatcgtcaccgccatcggcctgctcatcgtcgtcagctactgaatggcgtcgggttgcccatctgaatggcatcgatcgagcagtggccggcacaggtagcagggctcctctcaagtctcaatctggttctgtcggaggggcctgtggtcggagcctttctcggtgaagaaacaagttatgccgaggtgtggactttgcaactttaccctgcatttgcaggacgaaaatcgttacagaggcttgtgctctaccgacccagctagacgcgccaacgtggttgtgtattgagatctttctttgtggcaacaggccggtcactctagcactcatagcaaataatatatagctgttgagtatcatatttggcacctaagcatgttcggacggttcgcccatgtggcccggacggtccgcatctccacgaccagattaacacagatgagagtatttatcccatgcatgtgtatcctaacatatccgtgcaaatatattggttcacgcctaaaaataggtccaga

SEQ ID NO: 53101 - DNA, 1018 bp, Zea Mays
gtgcttgtctcgcacgttctctctcgccttccacaggcccccctcccctcgctctcccatctcatcatctcggcggctgcaataaaataaatctcgtgcaggggggagggcgtacgacgacgtggacgcaccgtcaaaggcaccaggctgagcaacccctctctctctccctcttatccccaaggcgaggagcggagcggagaggagggcccttctgcttgtttctccgctttgcaagatgtcgtccccgagcaagcgccgcgagatggaccttatgaagctgatgatgagcgactacaaggtggagatggtgaacgacgggatgcaggaattcttcgtcgaattcaagggcccggccgaaagtatctaccaaggtggtgtctggaaggttcgggtagaactgcctgatgcatacccttacaaatccccgtccatcggcttcatcaacaagatttatcacccgaatgtcgatgagatctgttgctgtacccaaatccttctgatccattaaatggggaggctgcagcactgatgatgcgtgatcggcctgtttatgaacagaaagtgaaagaatattgtgaaaagtatgctaaaccagaggacgctggcatcaccccggaagacaagtccagtgacgaagagcttagcgatgacgacgacgacgacaacgactccggggacgaagctatacttggcaatcctgatccttagtctgagtaggaaacagcgcagtcagctcatcaatacattgtccaattgcagaaactgcaagtaaacaaaaactgaaaaactaaaaaaaaaacctctggatgtcatgtaaataagtgtactttgtatgttctccaatgttgtttccttcatttgtctgattgaatttctagttgctgttgcatgcctgtgctttggtttcaaggaaaggcaaaaacaaggttgtggcttcgtccattggatgtggattgcttgcctgtttaagcaacgtaagggtattttgggaatatctgttaggcctcaagccaac

SEQ ID NO: 53102 - DNA, 1378 bp, Zea Mays
gtgcttgtctcgcacgttctctctcgccttccacaggcccccctcccctcgctctcccatctcatcatctcggcggctgcaataaaataaatctcgtgcaggggggagggcgtacgacgacgtggacgcaccgtcaaaggcaccaggctgagcaacccctctctctctccctcttatccccaaggcgaggagcggagcggagaggagggcccttctgcttgtttctccgctttgcaagatgtcgtccccgagcaagcgccgcgagatggaccttatgaagctgatgatgagcgactacaaggtggagatggtgaacgacgggatgcaggaattcttcgtcgaattcaagggcccggccgaaagtaataaccctcgcgccgaatcccagcctcccccctctcgcgccgaatcccggtttctcccctccctctgcctcccggcgggctgatgatccacgtgggctggggggagatgggtttccggagaactgccaatctaccctgtcgatcgtgttcagatattcttgttcgtttagcttcatcctcgattggttgctcagttgacctgaagcgtcctttctttttcagtcatacttttttttttctctcacacgaactcgtactccatttggtaggtatctaccaaggtggtgtctggaaggttcgggtagaactgcctgatgcatacccttacaaatccccgtccatcggcttcatcaacaagatttatcacccgaatgtcgatgagatgtctggctctgtctgtttggatgtcataaaccagacatggagcccaatgtttgatctagtaaatgtttttgaagtattccttccacagctgttgctgtacccaaatccttctgatccattaaatggggaggctgcagcactgatgatgcgtgatcggcctgtttatgaacagaaagtgaaagaatattgtgaaaagtatgctaaaccagaggacgctggcatcaccccggaagacaagtccagtgacgaagagcttagcgatgacgacgacgacgacaacgactccggggacgaagctatacttggcaatcctgatccttagtctgagtaggaaacagcgcagtcagctcatcaatacattgtccaattgcagaaactgcaagtaaacaaaaactgaaaaactaaaaaaaaaacctctggatgtcatgtaaataagtgtactttgtatgttctccaatgttgtttccttcatttgtctgattgaatttctagttgctgttgcatgcctgtgctttggtttcaaggaaaggcaaaaacaaggttgtggcttcgtccattggatgtggattgcttgcctgtttaagcaacgtaagggtattttgggaatatctgttaggcctcaagccaac

SEQ ID NO: 53103 - DNA, 1135 bp, Zea Mays
caccacccggccctacctccagttcgacacgcagagcaaaaattcagaaaggcccaattaggacagttagaataaaggcgccataggatcacggatcaccggaggcgttttgcgtgattgattgcgtttcgggggagggcgtacgacgacgtggacgcaccgtcaaaggcaccaggctgagcaacccctctctctctccctcttatccccaaggcgaggagcggagcggagaggagggcccttctgcttgtttctccgctttgcaagatgtcgtccccgagcaagcgccgcgagatggaccttatgaagctgatgatgagcgactacaaggtggagatggtgaacgacgggatgcaggaattcttcgtcgaattcaagggcccggccgaaagtatctaccaaggtggtgtctggaaggttcgggtagaactgcctgatgcatacccttacaaatccccgtccatcggcttcatcaacaagatttatcacccgaatgtcgatgagatgtctggctctgtctgtttggatgtcataaaccagacatggagcccaatgtttgatctagtaaatgtttttgaagtattccttccacagctgttgctgtacccaaatccttctgatccattaaatggggaggctgcagcactgatgatgcgtgatcggcctgtttatgaacagaaagtgaaagaatattgtgaaaagtatgctaaaccagaggacgctggcatcaccccggaagacaagtccagtgacgaagagcttagcgatgacgacgacgacgacaacgactccggggacgaagctatacttggcaatcctgatccttagtctgagtaggaaacagcgcagtcagctcatcaatacattgtccaattgcagaaactgcaagtaaacaaaaactgaaaaactaaaaaaaaaacctctggatgtcatgtaaataagtgtactttgtatgttctccaatgttgtttccttcatttgtctgattgaatttctagttgctgttgcatgcctgtgctttggtttcaaggaaaggcaaaaacaaggttgtggcttcgtccattggatgtggattgcttgcctgtttaagcaacgtaagggtattttgggaatatctgttaggcctcaagccaac

SEQ ID NO: 53104 - DNA, 2742 bp, Zea Mays
aatactctacttcctgtacgaacagttgagctcccgccgtcgttctcttctgtcaccatggatttcgctgctgacatagaccttcagagggagcgcttgaaaggcattccaagaaacaagcttgctattatctgtttgatgaattccaaccctcctattcctgatatatctgattcttatctggacaatttattatcaaactctctcccagatggaccttttggtaatagcaatataattaatcagccaaatctggtgcaatgcataccatttcagaaaaacacaacgttagtgctaacaaatgaccaggtatctcccggggtatggtacattgggtactttcatggccttggccctgctcgcacgcaatcaaagatgattagccgaggaaaagcacacttggtgagcactcgcattactgtaagaggatgtgccacttcagcattttggggaccctactgcaaccagacagttgacatgattggttgttctcaaccttcaatagataataactcaaggaatcttctagatctgaaagctgagaggaggaacagtttgtatactagagagcacaataggcgtattaatatcttatcacggccgaacggtttagtagaacaagaagttgcatctaacgccacgaccttggtgagaatggaaaactcgatcagttgttccatttccaatgactcaatatgcatcagacaaggcgacatgaagttctacttcttggatgtagtcaacctagcattgcagtttaaaattacagctacaaattttggagctctagggccatccttgatttgctacctgcggcataatgcctttcctcaaagagatctgcatgactattcaggtgatatcagccatgatcctttggttgtcaagttgccgaatattgggcgttggtatattgcaattgaaactgtcaacaaaacacagacgaatgttacagcatcaacacctgttctagacacaacatgtttctcattgaagtggcaattaactggatgcttgaatggaaaaactggaaccaattgctcttgggaggcatatgggctccatagggttcccaagagaagtccttctgtcccttttgagtcatattatgttcctactgatggaacagcatcactggaagatagtcacttctacttggaacaatttttaagcaattcatcccatgaacagtttgcatggacttatttctttttggatgttcctcaaggttcagccggtgcccttatccatgtccagcttaagtcagataaagacttgaactacgagttgtactcgaaatatggtggcttaccatctaatgatacttgggattattatgccagtaggacaagcagcaggatgccataggaactgcaatcagaaaggtgtgtgtcattcctcagttgatgaaagtgggctgactttctacagcttctgcacatgtgatcgcgatcatggtggctttgattgcagcgatgagctagtttcccctaatgggcacatttggcagtctgtttttctaatcgcatcaaatggtgcagctattttacctgccttctgggccctccgacaaaaggtaagctacttagcacccacttgttgaatgctagtgtaaagattgttgggcatggtactggtattcatcagtactagtcatgtctatccaaatcaagtttttggacttctggctttccttcatggctgtcgtgggtacgttcatatatatggctacaattgatgaagtttcaaagagagcaatgcatactgctgtatttatcctcactgctcttttagccgcaactggtgcaacaagatctgcaaatattggaattgttattgccattggttctgttggcctgcttatggggtggctattggagttctctacagcacgaaggtttatatgctggccctcacgaattaaccttaatatgcctcaaagttggccaagcctcagaactttgttccagattactctggagatggtgaacaaacggttccgttggatattcttacttttgggtttcatgacactgtcttttgcggctatcagctggaagctggaatcaaataacaactactggatttggcacagcatatggcacataaccatttatacttcttcattcttcttcctgtgctcaatgcgtgtcagcacaaggaacagcagtccagagtcaaactatgagctaacgaggcaagactctatgccgagatccgagccaagggaaacctaggtttgtttgtgtaggtacatgattatctgttgcagtccggagcgtaataacatatgaccaatcacacaagagggatttgggaaccacgtgtggtcagtctccgcagctgcatcgcatgagaactgtaaatagcacggggcaggtaaaacatctatttgtgggatgttcatcgagaacattgataatcatgtaaatgtgttgtaaaagtaaatccaaaatggaccgtctcttgaggttagctcatgcatcatgagtttggcacttgtcgtagtacgagtctcatacaagctttgatgtggggaacgtatccggtgaaaatcaacctctccgtgcaaccatgtaaacttctaatctgaaccacatgatgttgatccaaatagacgtgcggaggagtgagagaggggatttgaaaaaatgtgattagcaaaggacggttaagtgtaaaattatctacgctcttgcgtcccttgatcaacatcattgatcaacatcatgtagttcagat

SEQ ID NO: 53105 - DNA, 1936 bp, Zea Mays
aatactctacttcctgtacgaacagttgagctcccgccgtcgttctcttctgtcaccatggatttcgctgctgacatagaccttcagagggagcgcttgaaaggcattccaagaaacaagcttgctattatctgtttgatgaattccaaccctcctattcctgatatatctgattcttatctggacaatttatgaaggttctttattgcagtatcaaactctctcccagatggaccttttggtaatagcaatataattaatcagccaaatctggtgcaatgcataccatttcagaaaaacacaacgttagtgctaacaaatgaccaggtatctcccggggtatggtacattgggtactttcatggccttggccctgctcgcacgcaatcaaagatgattagccgaggaaaagcacacttgaattccacggattcggacatggatctatcgattttttatgctaaagagggaacttggtgctttggggtgaagcatccaagtgatacggcaaattctcaaacatacatgtctatatctcttcagggatgccataggaactgcaatcagaaaggtgtgtgtcattcctcagttgatgaaagtgggctgactttctacagcttctgcacatgtgatcgcgatcatggtggctttgattgcagcgatgagctagtttcccctaatgggcacatttggcagtctgtttttctaatcgcatcaaatggtgcagctattttacctgccttctgggccctccgacaaaaggcatttgcagaatggattctttacacatctagtggaatttccagtgcattataccattcatgtgatgttggcacttggtgcattctgtcttttcgtgtattgcagtttttggacttctggctttccttcatggctgtcgtgggtacgttcatatatatggctacaattgatgaagtttcaaagagagcaatgcatactgctgtatttatcctcactgctcttttagccgcaactggtgcaacaagatctgcaaatattggaattgttattgccattggttctgttggcctgcttatggggtggctattggagttctctacagcacgaaggtttatatgctggccctcacgaattaaccttaatatgcctcaaagttggccaagcctcagaactttgttccagattactctggagatggtgaacaaacggttccgttggatattcttacttttgggtttcatgacactgtcttttgcggctatcagctggaagctggaatcaaataacaactactggatttggcacagcatatggcacataaccatttatacttcttcattcttcttcctgtgctcaatgcgtgtcagcacaaggaacagcagtccagagtcaaactatgagctaacgaggcaagactctatgccgagatccgagccaagggaaacctaggtttgtttgtgtaggtacatgattatctgttgcagtccggagcgtaataacatatgaccaatcacacaagagggatttgggaaccacgtgtggtcagtctccgcagctgcatcgcatgagaactgtaaatagcacggggcaggtaaaacatctatttgtgggatgttcatcgagaacattgataatcatgtaaatgtgttgtaaaagtaaatccaaaatggaccgtctcttgaggttagctcatgcatcatgagtttggcacttgtcgtagtacgagtctcatacaagctttgatgtggggaacgtatccggtgaaaatcaacctctccgtgcaaccatgtaaacttctaatctgaaccacatgatgttgatccaaatagacgtgcggaggagtgagagaggggatttgaaaaaatgtgattagcaaaggacggttaagtgtaaaattatctacgctcttgcgtcccttgatcaacatcattgatcaacatcatgtagttcagat

SEQ ID NO: 53106 - DNA, 2778 bp, Zea Mays
aatactctacttcctgtacgaacagttgagctcccgccgtcgttctcttctgtcaccatggatttcgctgctgacatagaccttcagagggagcgcttgaaaggcattccaagaaacaagcttgctattatctgtttgatgaattccaaccctcctattcctgatatatctgattcttatctggacaatttatgtatctcccggggtatggtacattgggtactttcatggccttggccctgctcgcacgcaatcaaagatgattagccgaggaaaagcacacttggtgagcactcgcattactgtaagaggatgtgccacttcagcattttggggaccctactgcaaccagacagttgacatgattggttgttctcaaccttcaatagataataactcaaggaatcttctagatctgaaagctgagaggaggaacagtttgtatactagagagcacaataggcgtattaatatcttatcacggccgaacggtttagtagaacaagaagttgcatctaacgccacgaccttggtgagaatggaaaactcgatcagttgttccatttccaatgactcaatatgcatcagacaaggcgacatgaagttctacttcttggatgtagtcaacctagcattgcagtttaaaattacagctacaaattttggagctctagggccatccttgatttgctacctgcggcataatgcctttcctcaaagagatctgcatgactattcaggtgatatcagccatgatcctttggttgtcaagttgccgaatattgggcgttggtatattgcaattgaaactgtcaacaaaacacagacgaatgttacagcatcaacacctgttctagacacaacatgtttctcattgaagtggcaattaactggatgcttgaatggaaaaactggaaccaattgctcttgggaggcatatgggctccatagggttcccaagagaagtccttctgtcccttttgagtcatattatgttcctactgatggaacagcatcactggaagatagtcacttctacttggaacaatttttaagcaattcatcccatgaacagtttgcatggacttatttctttttggatgttcctcaaggttcagccggtgcccttatccatgtccagcttaagtcagataaagacttgaactacgagttgtactcgaaatatggtggcttaccatctaatgatacttgggattattatgccagtaggacaagcagcagtaatggttcagtatttttttcattacagaattccacggattcggacatggatctatcgattttttatgctaaagagggaacttggtgctttggggtgaagcatccaagtgatacggcaaattctcaaacatacatgtctatatctcttcagggatgccataggaactgcaatcagaaaggtgtgtgtcattcctcagttgatgaaagtgggctgactttctacagcttctgcacatgtgatcgcgatcatggtggctttgattgcagcgatgagctagtttcccctaatgggcacatttggcagtctgtttttctaatcgcatcaaatggtgcagctattttacctgccttctgggccctccgacaaaaggtaagctacttagcacccacttgttgaatgctagtgtaaagattgttgggcatggtactggtattcatcagtactagtcatgtctatccaaatcaagtttttggacttctggctttccttcatggctgtcgtgggtacgttcatatatatggctacaattgatgaagtttcaaagagagcaatgcatactgctgtatttatcctcactgctcttttagccgcaactggtgcaacaagatctgcaaatattggaattgttattgccattggttctgttggcctgcttatggggtggctattggagttctctacagcacgaaggtttatatgctggccctcacgaattaaccttaatatgcctcaaagttggccaagcctcagaactttgttccagattactctggagatggtgaacaaacggttccgttggatattcttacttttgggtttcatgacactgtcttttgcggctatcagctggaagctggaatcaaataacaactactggatttggcacagcatatggcacataaccatttatacttcttcattcttcttcctgtgctcaatgcgtgtcagcacaaggaacagcagtccagagtcaaactatgagctaacgaggcaagactctatgccgagatccgagccaagggaaacctaggtttgtttgtgtaggtacatgattatctgttgcagtccggagcgtaataacatatgaccaatcacacaagagggatttgggaaccacgtgtggtcagtctccgcagctgcatcgcatgagaactgtaaatagcacggggcaggtaaaacatctatttgtgggatgttcatcgagaacattgataatcatgtaaatgtgttgtaaaagtaaatccaaaatggaccgtctcttgaggttagctcatgcatcatgagtttggcacttgtcgtagtacgagtctcatacaagctttgatgtggggaacgtatccggtgaaaatcaacctctccgtgcaaccatgtaaacttctaatctgaaccacatgatgttgatccaaatagacgtgcggaggagtgagagaggggatttgaaaaaatgtgattagcaaaggacggttaagtgtaaaattatctacgctcttgcgtcccttgatcaacatcattgatcaacatcatgtagttcagat

SEQ ID NO: 53107 - DNA, 2892 bp, Zea Mays
aatactctacttcctgtacgaacagttgagctcccgccgtcgttctcttctgtcaccatggatttcgctgctgacatagaccttcagagggagcgcttgaaaggcattccaagaaacaagcttgctattatctgtttgatgaattccaaccctcctattcctgatatatctgattcttatctggacaatttattatcaaactctctcccagatggaccttttggtaatagcaatataattaatcagccaaatctggtgcaatgcataccatttcagaaaaacacaacgttagtgctaacaaatgaccaggtatctcccggggtatggtacattgggtactttcatggccttggccctgctcgcacgcaatcaaagatgattagccgaggaaaagcacacttggtgagcactcgcattactgtaagaggatgtgccacttcagcattttggggaccctactgcaaccagacagttgacatgattggttgttctcaaccttcaatagataataactcaaggaatcttctagatctgaaagctgagaggaggaacagtttgtatactagagagcacaataggcgtattaatatcttatcacggccgaacggtttagtagaacaagaagttgcatctaacgccacgaccttggtgagaatggaaaactcgatcagttgttccatttccaatgactcaatatgcatcagacaaggcgacatgaagttctacttcttggatgtagtcaacctagcattgcagtttaaaattacagctacaaattttggagctctagggccatccttgatttgctacctgcggcataatgcctttcctcaaagagatctgcatgactattcaggtgatatcagccatgatcctttggttgtcaagttgccgaatattgggcgttggtatattgcaattgaaactgtcaacaaaacacagacgaatgttacagcatcaacacctgttctagacacaacatgtttctcattgaagtggcaattaactggatgcttgaatggaaaaactggaaccaattgctcttgggaggcatatgggctccatagggttcccaagagaagtccttctgtcccttttgagtcatattatgttcctactgatggaacagcatcactggaagatagtcacttctacttggaacaatttttaagcaattcatcccatgaacagtttgcatggacttatttctttttggatgttcctcaaggttcagccggtgcccttatccatgtccagcttaagtcagataaagacttgaactacgagttgtactcgaaatatggtggcttaccatctaatgatacttgggattattatgccagtaggacaagcagcagtaatggttcagtatttttttcattacagaattccacggattcggacatggatctatcgattttttatgctaaagagggaacttggtgctttggggtgaagcatccaagtgatacggcaaattctcaaacatacatgtctatatctcttcagggatgccataggaactgcaatcagaaaggtgtgtgtcattcctcagttgatgaaagtgggctgactttctacagcttctgcacatgtgatcgcgatcatggtggctttgattgcagcgatgagctagtttcccctaatgggcacatttggcagtctgtttttctaatcgcatcaaatggtgcagctattttacctgccttctgggccctccgacaaaagaatggattctttacacatctagtggaatttccagtgcattataccattcatgtgatgttggcacttggtgcattctgtcttttcgtgtattgcagtttttggacttctggctttccttcatggctgtcgtgggtacgttcatatatatggctacaattgatgaagtttcaaagagagcaatgcatactgctgtatttatcctcactgctcttttagccgcaactggtgcaacaagatctgcaaatattggaattgttattgccattggttctgttggcctgcttatggggtggctattggagttctctacagcacgaaggtttatatgctggccctcacgaattaaccttaatatgcctcaaagttggccaagcctcagaactttgttccagattactctggagatggtgaacaaacggttccgttggatattcttacttttgggtttcatgacactgtcttttgcggctatcagctggaagctggaatcaaataacaactactggatttggcacagcatatggcacataaccatttatacttcttcattcttcttcctgtgctcaatgcgtgtcagcacaaggaacagcagtccagagtcaaactatgagctaacgaggcaagactctatgccgagatccgagccaagggaaacctaggtttgtttgtgtaggtacatgattatctgttgcagtccggagcgtaataacatatgaccaatcacacaagagggatttgggaaccacgtgtggtcagtctccgcagctgcatcgcatgagaactgtaaatagcacggggcaggtaaaacatctatttgtgggatgttcatcgagaacattgataatcatgtaaatgtgttgtaaaagtaaatccaaaatggaccgtctcttgaggttagctcatgcatcatgagtttggcacttgtcgtagtacgagtctcatacaagctttgatgtggggaacgtatccggtgaaaatcaacctctccgtgcaaccatgtaaacttctaatctgaaccacatgatgttgatccaaatagacgtgcggaggagtgagagaggggatttgaaaaaatgtgattagcaaaggacggttaagtgtaaaattatctacgctcttgcgtcccttgatcaacatcattgatcaacatcatgtagttcagat

SEQ ID NO: 53108 - DNA, 2955 bp, Zea Mays
agggggaggctgtggtggtgtccagctacgggcagggccgcctctcgctcaagccctacgactggacctacctgcgcgttgagctcccgccgtcgttctcttctgtcaccatggatttcgctgctgacatagaccttcagagggagcgcttgaaaggcattccaagaaacaagcttgctattatctgtttgatgaattccaaccctcctattcctgatatatctgattcttatctggacaatttattatcaaactctctcccagatggaccttttggtaatagcaatataattaatcagccaaatctggtgcaatgcataccatttcagaaaaacacaacgttagtgctaacaaatgaccaggtatctcccggggtatggtacattgggtactttcatggccttggccctgctcgcacgcaatcaaagatgattagccgaggaaaagcacacttggtgagcactcgcattactgtaagaggatgtgccacttcagcattttggggaccctactgcaaccagacagttgacatgattggttgttctcaaccttcaatagataataactcaaggaatcttctagatctgaaagctgagaggaggaacagtttgtatactagagagcacaataggcgtattaatatcttatcacggccgaacggtttagtagaacaagaagttgcatctaacgccacgaccttggtgagaatggaaaactcgatcagttgttccatttccaatgactcaatatgcatcagacaaggcgacatgaagttctacttcttggatgtagtcaacctagcattgcagtttaaaattacagctacaaattttggagctctagggccatccttgatttgctacctgcggcataatgcctttcctcaaagagatctgcatgactattcaggtgatatcagccatgatcctttggttgtcaagttgccgaatattgggcgttggtatattgcaattgaaactgtcaacaaaacacagacgaatgttacagcatcaacacctgttctagacacaacatgtttctcattgaagtggcaattaactggatgcttgaatggaaaaactggaaccaattgctcttgggaggcatatgggctccatagggttcccaagagaagtccttctgtcccttttgagtcatattatgttcctactgatggaacagcatcactggaagatagtcacttctacttggaacaatttttaagcaattcatcccatgaacagtttgcatggacttatttctttttggatgttcctcaaggttcagccggtgcccttatccatgtccagcttaagtcagataaagacttgaactacgagttgtactcgaaatatggtggcttaccatctaatgatacttgggattattatgccagtaggacaagcagcagtaatggttcagtatttttttcattacagaattccacggattcggacatggatctatcgattttttatgctaaagagggaacttggtgctttggggtgaagcatccaagtgatacggcaaattctcaaacatacatgtctatatctcttcagggatgccataggaactgcaatcagaaaggtgtgtgtcattcctcagttgatgaaagtgggctgactttctacagcttctgcacatgtgatcgcgatcatggtggctttgattgcagcgatgagctagtttcccctaatgggcacatttggcagtctgtttttctaatcgcatcaaatggtgcagctattttacctgccttctgggccctccgacaaaaggcatttgcagaatggattctttacacatctagtggaatttccagtgcattataccattcatgtgatgttggcacttggtgcattctgtcttttcgtgtattgcagtttttggacttctggctttccttcatggctgtcgtgggtacgttcatatatatggctacaattgatgaagtttcaaagagagcaatgcatactgctgtatttatcctcactgctcttttagccgcaactggtgcaacaagatctgcaaatattggaattgttattgccattggttctgttggcctgcttatggggtggctattggagttctctacagcacgaaggtttatatgctggccctcacgaattaaccttaatatgcctcaaagttggccaagcctcagaactttgttccagattactctggagatggtgaacaaacggttccgttggatattcttacttttgggtttcatgacactgtcttttgcggctatcagctggaagctggaatcaaataacaactactggatttggcacagcatatggcacataaccatttatacttcttcattcttcttcctgtgctcaatgcgtgtcagcacaaggaacagcagtccagagtcaaactatgagctaacgaggcaagactctatgccgagatccgagccaagggaaacctaggtttgtttgtgtaggtacatgattatctgttgcagtccggagcgtaataacatatgaccaatcacacaagagggatttgggaaccacgtgtggtcagtctccgcagctgcatcgcatgagaactgtaaatagcacggggcaggtaaaacatctatttgtgggatgttcatcgagaacattgataatcatgtaaatgtgttgtaaaagtaaatccaaaatggaccgtctcttgaggttagctcatgcatcatgagtttggcacttgtcgtagtacgagtctcatacaagctttgatgtggggaacgtatccggtgaaaatcaacctctccgtgcaaccatgtaaacttctaatctgaaccacatgatgttgatccaaatagacgtgcggaggagtgagagaggggatttgaaaaaatgtgattagcaaaggacggttaagtgtaaaattatctacgctcttgcgtcccttgatcaacatcattgatcaacatcatgtagttcagat

SEQ ID NO: 53109 - DNA, 2987 bp, Zea Mays
cggatgcgctgcgcagggggaggctgtggtggtgtccagctacgggcagggccgcctctcgctcaagccctacgactggacctacctgcgcgttgagctcccgccgtcgttctcttctgtcaccatggatttcgctgctgacatagaccttcagagggagcgcttgaaaggcattccaagaaacaagcttgctattatctgtttgatgaattccaaccctcctattcctgatatatctgattcttatctggacaatttatgaaggttctttattgcagtatcaaactctctcccagatggaccttttggtaatagcaatataattaatcagccaaatctggtgcaatgcataccatttcagaaaaacacaacgttagtgctaacaaatgaccaggtatctcccggggtatggtacattgggtactttcatggccttggccctgctcgcacgcaatcaaagatgattagccgaggaaaagcacacttggtgagcactcgcattactgtaagaggatgtgccacttcagcattttggggaccctactgcaaccagacagttgacatgattggttgttctcaaccttcaatagataataactcaaggaatcttctagatctgaaagctgagaggaggaacagtttgtatactagagagcacaataggcgtattaatatcttatcacggccgaacggtttagtagaacaagaagttgcatctaacgccacgaccttggtgagaatggaaaactcgatcagttgttccatttccaatgactcaatatgcatcagacaaggcgacatgaagttctacttcttggatgtagtcaacctagcattgcagtttaaaattacagctacaaattttggagctctagggccatccttgatttgctacctgcggcataatgcctttcctcaaagagatctgcatgactattcaggtgatatcagccatgatcctttggttgtcaagttgccgaatattgggcgttggtatattgcaattgaaactgtcaacaaaacacagacgaatgttacagcatcaacacctgttctagacacaacatgtttctcattgaagtggcaattaactggatgcttgaatggaaaaactggaaccaattgctcttgggaggcatatgggctccatagggttcccaagagaagtccttctgtcccttttgagtcatattatgttcctactgatggaacagcatcactggaagatagtcacttctacttggaacaatttttaagcaattcatcccatgaacagtttgcatggacttatttctttttggatgttcctcaaggttcagccggtgcccttatccatgtccagcttaagtcagataaagacttgaactacgagttgtactcgaaatatggtggcttaccatctaatgatacttgggattattatgccagtaggacaagcagcagtaatggttcagtatttttttcattacagaattccacggattcggacatggatctatcgattttttatgctaaagagggaacttggtgctttggggtgaagcatccaagtgatacggcaaattctcaaacatacatgtctatatctcttcagggatgccataggaactgcaatcagaaaggtgtgtgtcattcctcagttgatgaaagtgggctgactttctacagcttctgcacatgtgatcgcgatcatggtggctttgattgcagcgatgagctagtttcccctaatgggcacatttggcagtctgtttttctaatcgcatcaaatggtgcagctattttacctgccttctgggccctccgacaaaaggcatttgcagaatggattctttacacatctagtggaatttccagtgcattataccattcatgtgatgttggcacttggtgcattctgtcttttcgtgtattgcagtttttggacttctggctttccttcatggctgtcgtgggtacgttcatatatatggctacaattgatgaagtttcaaagagagcaatgcatactgctgtatttatcctcactgctcttttagccgcaactggtgcaacaagatctgcaaatattggaattgttattgccattggttctgttggcctgcttatggggtggctattggagttctctacagcacgaaggtttatatgctggccctcacgaattaaccttaatatgcctcaaagttggccaagcctcagaactttgttccagattactctggagatggtgaacaaacggttccgttggatattcttacttttgggtttcatgacactgtcttttgcggctatcagctggaagctggaatcaaataacaactactggatttggcacagcatatggcacataaccatttatacttcttcattcttcttcctgtgctcaatgcgtgtcagcacaaggaacagcagtccagagtcaaactatgagctaacgaggcaagactctatgccgagatccgagccaagggaaacctaggtttgtttgtgtaggtacatgattatctgttgcagtccggagcgtaataacatatgaccaatcacacaagagggatttgggaaccacgtgtggtcagtctccgcagctgcatcgcatgagaactgtaaatagcacggggcaggtaaaacatctatttgtgggatgttcatcgagaacattgataatcatgtaaatgtgttgtaaaagtaaatccaaaatggaccgtctcttgaggttagctcatgcatcatgagtttggcacttgtcgtagtacgagtctcatacaagctttgatgtggggaacgtatccggtgaaaatcaacctctccgtgcaaccatgtaaacttctaatctgaaccacatgatgttgatccaaatagacgtgcggaggagtgagagaggggatttgaaaaaatgtgattagcaaaggacggttaagtgtaaaattatctacgctcttgcgtcccttgatcaacatcattgatcaacatcatgtagttcagat

SEQ ID NO: 53110 - DNA, 3074 bp, Zea Mays
cggatgcgctgcgcagggggaggctgtggtggtgtccagctacgggcagggccgcctctcgctcaagccctacgactggacctacctgcgcgttgagctcccgccgtcgttctcttctgtcaccatggatttcgctgctgacatagaccttcagagggagcgcttgaaaggcattccaagaaacaagcttgctattatctgtttgatgaattccaaccctcctattcctgatatatctgattcttatctggacaatttatgaaggttctttattgcagtatcaaactctctcccagatggaccttttggtaatagcaatataattaatcagccaaatctggtgcaatgcataccatttcagaaaaacacaacgttagtgctaacaaatgaccaggtatctcccggggtatggtacattgggtactttcatggccttggccctgctcgcacgcaatcaaagatgattagccgaggaaaagcacacttggtgagcactcgcattactgtaagaggatgtgccacttcagcattttggggaccctactgcaaccagacagttgacatgattggttgttctcaaccttcaatagataataactcaaggaatcttctagatctgaaagctgagaggaggaacagtttgtatactagagagcacaataggcgtattaatatcttatcacggccgaacggtttagtagaacaagaagttgcatctaacgccacgaccttggtgagaatggaaaactcgatcagttgttccatttccaatgactcaatatgcatcagacaaggcgacatgaagttctacttcttggatgtagtcaacctagcattgcagtttaaaattacagctacaaattttggagctctagggccatccttgatttgctacctgcggcataatgcctttcctcaaagagatctgcatgactattcaggtgatatcagccatgatcctttggttgtcaagttgccgaatattgggcgttggtatattgcaattgaaactgtcaacaaaacacagacgaatgttacagcatcaacacctgttctagacacaacatgtttctcattgaagtggcaattaactggatgcttgaatggaaaaactggaaccaattgctcttgggaggcatatgggctccatagggttcccaagagaagtccttctgtcccttttgagtcatattatgttcctactgatggaacagcatcactggaagatagtcacttctacttggaacaatttttaagcaattcatcccatgaacagtttgcatggacttatttctttttggatgttcctcaaggttcagccggtgcccttatccatgtccagcttaagtcagataaagacttgaactacgagttgtactcgaaatatggtggcttaccatctaatgatacttgggattattatgccagtaggacaagcagcagtaatggttcagtatttttttcattacagaattccacggattcggacatggatctatcgattttttatgctaaagagggaacttggtgctttggggtgaagcatccaagtgatacggcaaattctcaaacatacatgtctatatctcttcagggatgccataggaactgcaatcagaaaggtgtgtgtcattcctcagttgatgaaagtgggctgactttctacagcttctgcacatgtgatcgcgatcatggtggctttgattgcagcgatgagctagtttcccctaatgggcacatttggcagtctgtttttctaatcgcatcaaatggtgcagctattttacctgccttctgggccctccgacaaaagaatggattctttacacatctagtggaatttccagtgcattataccattcatgtgatgttggcacttggtgcattctgtcttttcgtgtattgcaggtaagctacttagcacccacttgttgaatgctagtgtaaagattgttgggcatggtactggtattcatcagtactagtcatgtctatccaaatcaagtttttggacttctggctttccttcatggctgtcgtgggtacgttcatatatatggctacaattgatgaagtttcaaagagagcaatgcatactgctgtatttatcctcactgctcttttagccgcaactggtgcaacaagatctgcaaatattggaattgttattgccattggttctgttggcctgcttatggggtggctattggagttctctacagcacgaaggtttatatgctggccctcacgaattaaccttaatatgcctcaaagttggccaagcctcagaactttgttccagattactctggagatggtgaacaaacggttccgttggatattcttacttttgggtttcatgacactgtcttttgcggctatcagctggaagctggaatcaaataacaactactggatttggcacagcatatggcacataaccatttatacttcttcattcttcttcctgtgctcaatgcgtgtcagcacaaggaacagcagtccagagtcaaactatgagctaacgaggcaagactctatgccgagatccgagccaagggaaacctaggtttgtttgtgtaggtacatgattatctgttgcagtccggagcgtaataacatatgaccaatcacacaagagggatttgggaaccacgtgtggtcagtctccgcagctgcatcgcatgagaactgtaaatagcacggggcaggtaaaacatctatttgtgggatgttcatcgagaacattgataatcatgtaaatgtgttgtaaaagtaaatccaaaatggaccgtctcttgaggttagctcatgcatcatgagtttggcacttgtcgtagtacgagtctcatacaagctttgatgtggggaacgtatccggtgaaaatcaacctctccgtgcaaccatgtaaacttctaatctgaaccacatgatgttgatccaaatagacgtgcggaggagtgagagaggggatttgaaaaaatgtgattagcaaaggacggttaagtgtaaaattatctacgctcttgcgtcccttgatcaacatcattgatcaacatcatgtagttcagat

SEQ ID NO: 53111 - DNA, 3171 bp, Zea Mays
cggatgcgctgcgcagggggaggctgtggtggtgtccagctacgggcagggccgcctctcgctcaagccctacgactggacctacctgcgcgttgagctcccgccgtcgttctcttctgtcaccatggatttcgctgctgacatagaccttcagagggagcgcttgaaaggcattccaagaaacaagcttgctattatctgtttgatgaattccaaccctcctattcctgatatatctgattcttatctggacaatttatgaaggttctttattgcagtatcaaactctctcccagatggaccttttggtaatagcaatataattaatcagccaaatctggtgcaatgcataccatttcagaaaaacacaacgttagtgctaacaaatgaccaggtatctcccggggtatggtacattgggtactttcatggccttggccctgctcgcacgcaatcaaagatgattagccgaggaaaagcacacttggtgagcactcgcattactgtaagaggatgtgccacttcagcattttggggaccctactgcaaccagacagttgacatgattggttgttctcaaccttcaatagataataactcaaggaatcttctagatctgaaagctgagaggaggaacagtttgtatactagagagcacaataggcgtattaatatcttatcacggccgaacggtttagtagaacaagaagttgcatctaacgccacgaccttggtgagaatggaaaactcgatcagttgttccatttccaatgactcaatatgcatcagacaaggcgacatgaagttctacttcttggatgtagtcaacctagcattgcagtttaaaattacagctacaaattttggagctctagggccatccttgatttgctacctgcggcataatgcctttcctcaaagagatctgcatgactattcaggtgatatcagccatgatcctttggttgtcaagttgccgaatattgggcgttggtatattgcaattgaaactgtcaacaaaacacagacgaatgttacagcatcaacacctgttctagacacaacatgtttctcattgaagtggcaattaactggatgcttgaatggaaaaactggaaccaattgctcttgggaggcatatgggctccatagggttcccaagagaagtccttctgtcccttttgagtcatattatgttcctactgatggaacagcatcactggaagatagtcacttctacttggaacaatttttaagcaattcatcccatgaacagtttgcatggacttatttctttttggatgttcctcaaggttcagccggtgcccttatccatgtccagcttaagtcagataaagacttgaactacgagttgtactcgaaatatggtggcttaccatctaatgatacttgggattattatgccagtaggacaagcagcagtaatggttcagtatttttttcattacagaattccacggattcggacatggatctatcgattttttatgctaaagagggaacttggtgctttggggtgaagcatccaagtgatacggcaaattctcaaacatacatgtctatatctcttcagggatgccataggaactgcaatcagaaaggtgtgtgtcattcctcagttgatgaaagtgggctgactttctacagcttctgcacatgtgatcgcgatcatggtggctttgattgcagcgatgagctagtttcccctaatgggcacatttggcagtctgtttttctaatcgcatcaaatggtgcagctattttacctgccttctgggccctccgacaaaagaatggattctttacacatctagtggaatttccagtgcattataccattcatgtgatgttggcacttggtgcattctgtcttttcgtgtattgcaggtaagctacttagcacccacttgttgaatgctagtgtaaagattgttgggcatggtactggtattcatcagtactagtcatgtctatccaaatcaaggtaggctaaatatatttgttttaccaattctgttgattgtgtatcccatttgctggactttctaatcattcacaattcttctattccacattatattgtatctgagtccagtttttggacttctggctttccttcatggctgtcgtgggtacgttcatatatatggctacaattgatgaagtttcaaagagagcaatgcatactgctgtatttatcctcactgctcttttagccgcaactggtgcaacaagatctgcaaatattggaattgttattgccattggttctgttggcctgcttatggggtggctattggagttctctacagcacgaaggtttatatgctggccctcacgaattaaccttaatatgcctcaaagttggccaagcctcagaactttgttccagattactctggagatggtgaacaaacggttccgttggatattcttacttttgggtttcatgacactgtcttttgcggctatcagctggaagctggaatcaaataacaactactggatttggcacagcatatggcacataaccatttatacttcttcattcttcttcctgtgctcaatgcgtgtcagcacaaggaacagcagtccagagtcaaactatgagctaacgaggcaagactctatgccgagatccgagccaagggaaacctaggtacatgattatctgttgcagtccggagcgtaataacatatgaccaatcacacaagagggatttgggaaccacgtgtggtcagtctccgcagctgcatcgcatgagaactgtaaatagcacggggcaggtaaaacatctatttgtgggatgttcatcgagaacattgataatcatgtaaatgtgttgtaaaagtaaatccaaaatggaccgtctcttgaggttagctcatgcatcatgagtttggcacttgtcgtagtacgagtctcatacaagctttgatgtggggaacgtatccggtgaaaatcaacctctccgtgcaaccatgtaaacttctaatctgaaccacatgatgttgatccaaatagacgtgcggaggagtgagagaggggatttgaaaaaatgtgattagcaaaggacggttaagtgtaaaattatctacgctcttgcgtcccttgatcaacatcattgatcaacatcatgtagttcagat

SEQ ID NO: 53112 - DNA, 2983 bp, Zea Mays
cccgcggatgcgctgcgcagggggaggctgtggtggtgtccagctacgggcagggccgcctctcgctcaagccctacgactggacctacctgcgcgttgagctcccgccgtcgttctcttctgtcaccatggatttcgctgctgacatagaccttcagagggagcgcttgaaaggcattccaagaaacaagcttgctattatctgtttgatgaattccaaccctcctattcctgatatatctgattcttatctggacaatttatgaaggttctttattgcagtatcaaactctctcccagatggaccttttggtaatagcaatataattaatcagccaaatctggtgcaatgcataccatttcagaaaaacacaacgttagtgctaacaaatgaccaggtatctcccggggtatggtacattgggtactttcatggccttggccctgctcgcacgcaatcaaagatgattagccgaggaaaagcacacttggtgagcactcgcattactgtaagaggatgtgccacttcagcattttggggaccctactgcaaccagacagttgacatgattggttgttctcaaccttcaatagataataactcaaggaatcttctagatctgaaagctgagaggaggaacagtttgtatactagagagcacaataggcgtattaatatcttatcacggccgaacggtttagtagaacaagaagttgcatctaacgccacgaccttggtgagaatggaaaactcgatcagttgttccatttccaatgactcaatatgcatcagacaaggcgacatgaagttctacttcttggatgtagtcaacctagcattgcagtttaaaattacagctacaaattttggagctctagggccatccttgatttgctacctgcggcataatgcctttcctcaaagagatctgcatgactattcaggtgatatcagccatgatcctttggttgtcaagttgccgaatattgggcgttggtatattgcaattgaaactgtcaacaaaacacagacgaatgttacagcatcaacacctgttctagacacaacatgtttctcattgaagtggcaattaactggatgcttgaatggaaaaactggaaccaattgctcttgggaggcatatgggctccatagggttcccaagagaagtccttctgtcccttttgagtcatattatgttcctactgatggaacagcatcactggaagatagtcacttctacttggaacaatttttaagcaattcatcccatgaacagtttgcatggacttatttctttttggatgttcctcaaggttcagccggtgcccttatccatgtccagcttaagtcagataaagacttgaactacgagttgtactcgaaatatggtggcttaccatctaatgatacttgggattattatgccagtaggacaagcagcagtaatggttcagtatttttttcattacagaattccacggattcggacatggatctatcgattttttatgctaaagagggaacttggtgctttggggtgaagcatccaagtgatacggcaaattctcaaacatacatgtctatatctcttcagggatgccataggaactgcaatcagaaaggtgtgtgtcattcctcagttgatgaaagtgggctgactttctacagcttctgcacatgtgatcgcgatcatggtggctttgattgcagcgatgagctagtttcccctaatgggcacatttggcagtctgtttttctaatcgcatcaaatggtgcagctattttacctgccttctgggccctccgacaaaaggtaagctacttagcacccacttgttgaatgctagtgtaaagattgttgggcatggtactggtattcatcagtactagtcatgtctatccaaatcaagtttttggacttctggctttccttcatggctgtcgtgggtacgttcatatatatggctacaattgatgaagtttcaaagagagcaatgcatactgctgtatttatcctcactgctcttttagccgcaactggtgcaacaagatctgcaaatattggaattgttattgccattggttctgttggcctgcttatggggtggctattggagttctctacagcacgaaggtttatatgctggccctcacgaattaaccttaatatgcctcaaagttggccaagcctcagaactttgttccagattactctggagatggtgaacaaacggttccgttggatattcttacttttgggtttcatgacactgtcttttgcggctatcagctggaagctggaatcaaataacaactactggatttggcacagcatatggcacataaccatttatacttcttcattcttcttcctgtgctcaatgcgtgtcagcacaaggaacagcagtccagagtcaaactatgagctaacgaggcaagactctatgccgagatccgagccaagggaaacctaggtttgtttgtgtaggtacatgattatctgttgcagtccggagcgtaataacatatgaccaatcacacaagagggatttgggaaccacgtgtggtcagtctccgcagctgcatcgcatgagaactgtaaatagcacggggcaggtaaaacatctatttgtgggatgttcatcgagaacattgataatcatgtaaatgtgttgtaaaagtaaatccaaaatggaccgtctcttgaggttagctcatgcatcatgagtttggcacttgtcgtagtacgagtctcatacaagctttgatgtggggaacgtatccggtgaaaatcaacctctccgtgcaaccatgtaaacttctaatctgaaccacatgatgttgatccaaatagacgtgcggaggagtgagagaggggatttgaaaaaatgtgattagcaaaggacggttaagtgtaaaattatctacgctcttgcgtcccttgatcaacatcattgatcaacatcatgtagttcagat

SEQ ID NO: 53113 - DNA, 2946 bp, Zea Mays
gggttggcgccgggtccccgcggatgcgctgcgcagggggaggctgtggtggtgtccagctacgggcagggccgcctctcgctcaagccctacgactggacctacctgcgcgttgagctcccgccgtcgttctcttctgtcaccatggatttcgctgctgacatagaccttcagagggagcgcttgaaaggcattccaagaaacaagcttgctattatctgtttgatgaattccaaccctcctattcctgatatatctgattcttatctggacaatttatgaaggttctttattgcagtatcaaactctctcccagatggaccttttggtaatagcaatataattaatcagccaaatctggtgcaatgcataccatttcagaaaaacacaacgttagtgctaacaaatgaccaggtatctcccggggtatggtacattgggtactttcatggccttggccctgctcgcacgcaatcaaagatgattagccgaggaaaagcacacttggtgagcactcgcattactgtaagaggatgtgccacttcagcattttggggaccctactgcaaccagacagttgacatgattggttgttctcaaccttcaatagataataactcaaggaatcttctagatctgaaagctgagaggaggaacagtttgtatactagagagcacaataggcgtattaatatcttatcacggccgaacggtttagtagaacaagaagttgcatctaacgccacgaccttggtgagaatggaaaactcgatcagttgttccatttccaatgactcaatatgcatcagacaaggcgacatgaagttctacttcttggatgtagtcaacctagcattgcagtttaaaattacagctacaaattttggagctctagggccatccttgatttgctacctgcggcataatgcctttcctcaaagagatctgcatgactattcaggtgatatcagccatgatcctttggttgtcaagttgccgaatattgggcgttggtatattgcaattgaaactgtcaacaaaacacagacgaatgttacagcatcaacacctgttctagacacaacatgtttctcattgaagtggcaattaactggatgcttgaatggaaaaactggaaccaattgctcttgggaggcatatgggctccatagggttcccaagagaagtccttctgtcccttttgagtcatattatgttcctactgatggaacagcatcactggaagatagtcacttctacttggaacaatttttaagcaattcatcccatgaacagtttgcatggacttatttctttttggatgttcctcaagaattccacggattcggacatggatctatcgattttttatgctaaagagggaacttggtgctttggggtgaagcatccaagtgatacggcaaattctcaaacatacatgtctatatctcttcagggatgccataggaactgcaatcagaaaggtgtgtgtcattcctcagttgatgaaagtgggctgactttctacagcttctgcacatgtgatcgcgatcatggtggctttgattgcagcgatgagctagtttcccctaatgggcacatttggcagtctgtttttctaatcgcatcaaatggtgcagctattttacctgccttctgggccctccgacaaaaggcatttgcagaatggattctttacacatctagtggaatttccagtgcattataccattcatgtgatgttggcacttggtgcattctgtcttttcgtgtattgcaggtaagctacttagcacccacttgttgaatgctagtgtaaagattgttgggcatggtactggtattcatcagtactagtcatgtctatccaaatcaagtttttggacttctggctttccttcatggctgtcgtgggtacgttcatatatatggctacaattgatgaagtttcaaagagagcaatgcatactgctgtatttatcctcactgctcttttagccgcaactggtgcaacaagatctgcaaatattggaattgttattgccattggttctgttggcctgcttatggggtggctattggagttctctacagcacgaaggtttatatgctggccctcacgaattaaccttaatatgcctcaaagttggccaagcctcagaactttgttccagattactctggagatggtgaacaaacggttccgttggatattcttacttttgggtttcatgacactgtcttttgcggctatcagctggaagctggaatcaaataacaactactggatttggcacagcatatggcacataaccatttatacttcttcattcttcttcctgtgctcaatgcgtgtcagcacaaggaacagcagtccagagtcaaactatgagctaacgaggcaagactctatgccgagatccgagccaagggaaacctaggtttgtttgtgtaggtacatgattatctgttgcagtccggagcgtaataacatatgaccaatcacacaagagggatttgggaaccacgtgtggtcagtctccgcagctgcatcgcatgagaactgtaaatagcacggggcaggtaaaacatctatttgtgggatgttcatcgagaacattgataatcatgtaaatgtgttgtaaaagtaaatccaaaatggaccgtctcttgaggttagctcatgcatcatgagtttggcacttgtcgtagtacgagtctcatacaagctttgatgtggggaacgtatccggtgaaaatcaacctctccgtgcaaccatgtaaacttctaatctgaaccacatgatgttgatccaaatagacgtgcggaggagtgagagaggggatttgaaaaaatgtgattagcaaaggacggttaagtgtaaaattatctacgctcttgcgtcccttgatcaacatcattgatcaacatcatgtagttcagat

SEQ ID NO: 53114 - DNA, 2849 bp, Zea Mays
cgcggggttggcgccgggtccccgcggatgcgctgcgcagggggaggctgtggtggtgtccagctacgggcagggccgcctctcgctcaagccctacgactggacctacctgcgcgttgagctcccgccgtcgttctcttctgtcaccatggatttcgctgctgacatagaccttcagagggagcgcttgaaaggcattccaagaaacaagcttgctattatctgtttgatgaattccaaccctcctattcctgatatatctgattcttatctggacaatttatgaaggttctttattgcagtatcaaactctctcccagatggaccttttggtaatagcaatataattaatcagccaaatctggtgcaatgcataccatttcagaaaaacacaacgttagtgctaacaaatgaccaggtatctcccggggtatggtacattgggtactttcatggccttggccctgctcgcacgcaatcaaagatgattagccgaggaaaagcacacttggtgagcactcgcattactgtaagaggatgtgccacttcagcattttggggaccctactgcaaccagacagttgacatgattggttgttctcaaccttcaatagataataactcaaggaatcttctagatctgaaagctgagaggaggaacagtttgtatactagagagcacaataggcgtattaatatcttatcacggccgaacggtttagtagaacaagaagttgcatctaacgccacgaccttggtgagaatggaaaactcgatcagttgttccatttccaatgactcaatatgcatcagacaaggcgacatgaagttctacttcttggatgtagtcaacctagcattgcagtttaaaattacagctacaaattttggagctctagggccatccttgatttgctacctgcggcataatgcctttcctcaaagagatctgcatgactattcaggtgatatcagccatgatcctttggttgtcaagttgccgaatattgggcgttggtatattgcaattgaaactgtcaacaaaacacagacgaatgttacagcatcaacacctgttctagacacaacatgtttctcattgaagtggcaattaactggatgcttgaatggaaaaactggaaccaattgctcttgggaggcatatgggctccatagggttcccaagagaagtccttctgtcccttttgagtcatattatgttcctactgatggaacagcatcactggaagatagtcacttctacttggaacaatttttaagcaattcatcccatgaacagtttgcatggacttatttctttttggatgttcctcaaggttcagccggtgcccttatccatgtccagcttaagtcagataaagacttgaactacgagttgtactcgaaatatggtggcttaccatctaatgatacttgggattattatgccagtaggacaagcagcaggatgccataggaactgcaatcagaaaggtgtgtgtcattcctcagttgatgaaagtgggctgactttctacagcttctgcacatgtgatcgcgatcatggtggctttgattgcagcgatgagctagtttcccctaatgggcacatttggcagtctgtttttctaatcgcatcaaatggtgcagctattttacctgccttctgggccctccgacaaaagaatggattctttacacatctagtggaatttccagtgcattataccattcatgtgatgttggcacttggtgcattctgtcttttcgtgtattgcagtttttggacttctggctttccttcatggctgtcgtgggtacgttcatatatatggctacaattgatgaagtttcaaagagagcaatgcatactgctgtatttatcctcactgctcttttagccgcaactggtgcaacaagatctgcaaatattggaattgttattgccattggttctgttggcctgcttatggggtggctattggagttctctacagcacgaaggtttatatgctggccctcacgaattaaccttaatatgcctcaaagttggccaagcctcagaactttgttccagattactctggagatggtgaacaaacggttccgttggatattcttacttttgggtttcatgacactgtcttttgcggctatcagctggaagctggaatcaaataacaactactggatttggcacagcatatggcacataaccatttatacttcttcattcttcttcctgtgctcaatgcgtgtcagcacaaggaacagcagtccagagtcaaactatgagctaacgaggcaagactctatgccgagatccgagccaagggaaacctaggtttgtttgtgtaggtacatgattatctgttgcagtccggagcgtaataacatatgaccaatcacacaagagggatttgggaaccacgtgtggtcagtctccgcagctgcatcgcatgagaactgtaaatagcacggggcaggtaaaacatctatttgtgggatgttcatcgagaacattgataatcatgtaaatgtgttgtaaaagtaaatccaaaatggaccgtctcttgaggttagctcatgcatcatgagtttggcacttgtcgtagtacgagtctcatacaagctttgatgtggggaacgtatccggtgaaaatcaacctctccgtgcaaccatgtaaacttctaatctgaaccacatgatgttgatccaaatagacgtgcggaggagtgagagaggggatttgaaaaaatgtgattagcaaaggacggttaagtgtaaaattatctacgctcttgcgtcccttgatcaacatcattgatcaacatcatgtagttcagat

SEQ ID NO: 53115 - DNA, 3124 bp, Zea Mays
cggtgctggtgctggtgctggcgttggtgatgggcgcggggttggcgccgggtccccgcggatgcgctgcgcagggggaggctgtggtggtgtccagctacgggcagggccgcctctcgctcaagccctacgactggacctacctgcgcgttgagctcccgccgtcgttctcttctgtcaccatggatttcgctgctgacatagaccttcagagggagcgcttgaaaggcattccaagaaacaagcttgctattatctgtttgatgaattccaaccctcctattcctgatatatctgattcttatctggacaatttattatcaaactctctcccagatggaccttttggtaatagcaatataattaatcagccaaatctggtgcaatgcataccatttcagaaaaacacaacgttagtgctaacaaatgaccaggtatctcccggggtatggtacattgggtactttcatggccttggccctgctcgcacgcaatcaaagatgattagccgaggaaaagcacacttggtgagcactcgcattactgtaagaggatgtgccacttcagcattttggggaccctactgcaaccagacagttgacatgattggttgttctcaaccttcaatagataataactcaaggaatcttctagatctgaaagctgagaggaggaacagtttgtatactagagagcacaataggcgtattaatatcttatcacggccgaacggtttagtagaacaagaagttgcatctaacgccacgaccttggtgagaatggaaaactcgatcagttgttccatttccaatgactcaatatgcatcagacaaggcgacatgaagttctacttcttggatgtagtcaacctagcattgcagtttaaaattacagctacaaattttggagctctagggccatccttgatttgctacctgcggcataatgcctttcctcaaagagatctgcatgactattcaggtgatatcagccatgatcctttggttgtcaagttgccgaatattgggcgttggtatattgcaattgaaactgtcaacaaaacacagacgaatgttacagcatcaacacctgttctagacacaacatgtttctcattgaagtggcaattaactggatgcttgaatggaaaaactggaaccaattgctcttgggaggcatatgggctccatagggttcccaagagaagtccttctgtcccttttgagtcatattatgttcctactgatggaacagcatcactggaagatagtcacttctacttggaacaatttttaagcaattcatcccatgaacagtttgcatggacttatttctttttggatgttcctcaaggttcagccggtgcccttatccatgtccagcttaagtcagataaagacttgaactacgagttgtactcgaaatatggtggcttaccatctaatgatacttgggattattatgccagtaggacaagcagcagtaatggttcagtatttttttcattacagaattccacggattcggacatggatctatcgattttttatgctaaagagggaacttggtgctttggggtgaagcatccaagtgatacggcaaattctcaaacatacatgtctatatctcttcagggatgccataggaactgcaatcagaaaggtgtgtgtcattcctcagttgatgaaagtgggctgactttctacagcttctgcacatgtgatcgcgatcatggtggctttgattgcagcgatgagctagtttcccctaatgggcacatttggcagtctgtttttctaatcgcatcaaatggtgcagctattttacctgccttctgggccctccgacaaaaggcatttgcagaatggattctttacacatctagtggaatttccagtgcattataccattcatgtgatgttggcacttggtgcattctgtcttttcgtgtattgcaggtaagctacttagcacccacttgttgaatgctagtgtaaagattgttgggcatggtactggtattcatcagtactagtcatgtctatccaaatcaagtttttggacttctggctttccttcatggctgtcgtgggtacgttcatatatatggctacaattgatgaagtttcaaagagagcaatgcatactgctgtatttatcctcactgctcttttagccgcaactggtgcaacaagatctgcaaatattggaattgttattgccattggttctgttggcctgcttatggggtggctattggagttctctacagcacgaaggtttatatgctggccctcacgaattaaccttaatatgcctcaaagttggccaagcctcagaactttgttccagattactctggagatggtgaacaaacggttccgttggatattcttacttttgggtttcatgacactgtcttttgcggctatcagctggaagctggaatcaaataacaactactggatttggcacagcatatggcacataaccatttatacttcttcattcttcttcctgtgctcaatgcgtgtcagcacaaggaacagcagtccagagtcaaactatgagctaacgaggcaagactctatgccgagatccgagccaagggaaacctaggtttgtttgtgtaggtacatgattatctgttgcagtccggagcgtaataacatatgaccaatcacacaagagggatttgggaaccacgtgtggtcagtctccgcagctgcatcgcatgagaactgtaaatagcacggggcaggtaaaacatctatttgtgggatgttcatcgagaacattgataatcatgtaaatgtgttgtaaaagtaaatccaaaatggaccgtctcttgaggttagctcatgcatcatgagtttggcacttgtcgtagtacgagtctcatacaagctttgatgtggggaacgtatccggtgaaaatcaacctctccgtgcaaccatgtaaacttctaatctgaaccacatgatgttgatccaaatagacgtgcggaggagtgagagaggggatttgaaaaaatgtgattagcaaaggacggttaagtgtaaaattatctacgctcttgcgtcccttgatcaacatcattgatcaacatcatgtagttcagat

SEQ ID NO: 53116 - DNA, 3190 bp, Zea Mays
gtttagtcagagcttcgcggatttcgcgggtgcttcggtcgttggactctgatggccgcggcgcggcggcaggccgcggtgctggtgctggtgctggcgttggtgatgggcgcggggttggcgccgggtccccgcggatgcgctgcgcagggggaggctgtggtggtgtccagctacgggcagggccgcctctcgctcaagccctacgactggacctacctgcgcgttgagctcccgccgtcgttctcttctgtcaccatggatttcgctgctgacatagaccttcagagggagcgcttgaaaggcattccaagaaacaagcttgctattatctgtttgatgaattccaaccctcctattcctgatatatctgattcttatctggacaatttattatcaaactctctcccagatggaccttttggtaatagcaatataattaatcagccaaatctggtgcaatgcataccatttcagaaaaacacaacgttagtgctaacaaatgaccaggtatctcccggggtatggtacattgggtactttcatggccttggccctgctcgcacgcaatcaaagatgattagccgaggaaaagcacacttggtgagcactcgcattactgtaagaggatgtgccacttcagcattttggggaccctactgcaaccagacagttgacatgattggttgttctcaaccttcaatagataataactcaaggaatcttctagatctgaaagctgagaggaggaacagtttgtatactagagagcacaataggcgtattaatatcttatcacggccgaacggtttagtagaacaagaagttgcatctaacgccacgaccttggtgagaatggaaaactcgatcagttgttccatttccaatgactcaatatgcatcagacaaggcgacatgaagttctacttcttggatgtagtcaacctagcattgcagtttaaaattacagctacaaattttggagctctagggccatccttgatttgctacctgcggcataatgcctttcctcaaagagatctgcatgactattcaggtgatatcagccatgatcctttggttgtcaagttgccgaatattgggcgttggtatattgcaattgaaactgtcaacaaaacacagacgaatgttacagcatcaacacctgttctagacacaacatgtttctcattgaagtggcaattaactggatgcttgaatggaaaaactggaaccaattgctcttgggaggcatatgggctccatagggttcccaagagaagtccttctgtcccttttgagtcatattatgttcctactgatggaacagcatcactggaagatagtcacttctacttggaacaatttttaagcaattcatcccatgaacagtttgcatggacttatttctttttggatgttcctcaaggttcagccggtgcccttatccatgtccagcttaagtcagataaagacttgaactacgagttgtactcgaaatatggtggcttaccatctaatgatacttgggattattatgccagtaggacaagcagcagtaatggttcagtatttttttcattacagaattccacggattcggacatggatctatcgattttttatgctaaagagggaacttggtgctttggggtgaagcatccaagtgatacggcaaattctcaaacatacatgtctatatctcttcagggatgccataggaactgcaatcagaaaggtgtgtgtcattcctcagttgatgaaagtgggctgactttctacagcttctgcacatgtgatcgcgatcatggtggctttgattgcagcgatgagctagtttcccctaatgggcacatttggcagtctgtttttctaatcgcatcaaatggtgcagctattttacctgccttctgggccctccgacaaaagaatggattctttacacatctagtggaatttccagtgcattataccattcatgtgatgttggcacttggtgcattctgtcttttcgtgtattgcaggtaagctacttagcacccacttgttgaatgctagtgtaaagattgttgggcatggtactggtattcatcagtactagtcatgtctatccaaatcaagtttttggacttctggctttccttcatggctgtcgtgggtacgttcatatatatggctacaattgatgaagtttcaaagagagcaatgcatactgctgtatttatcctcactgctcttttagccgcaactggtgcaacaagatctgcaaatattggaattgttattgccattggttctgttggcctgcttatggggtggctattggagttctctacagcacgaaggtttatatgctggccctcacgaattaaccttaatatgcctcaaagttggccaagcctcagaactttgttccagattactctggagatggtgaacaaacggttccgttggatattcttacttttgggtttcatgacactgtcttttgcggctatcagctggaagctggaatcaaataacaactactggatttggcacagcatatggcacataaccatttatacttcttcattcttcttcctgtgctcaatgcgtgtcagcacaaggaacagcagtccagagtcaaactatgagctaacgaggcaagactctatgccgagatccgagccaagggaaacctaggtttgtttgtgtaggtacatgattatctgttgcagtccggagcgtaataacatatgaccaatcacacaagagggatttgggaaccacgtgtggtcagtctccgcagctgcatcgcatgagaactgtaaatagcacggggcaggtaaaacatctatttgtgggatgttcatcgagaacattgataatcatgtaaatgtgttgtaaaagtaaatccaaaatggaccgtctcttgaggttagctcatgcatcatgagtttggcacttgtcgtagtacgagtctcatacaagctttgatgtggggaacgtatccggtgaaaatcaacctctccgtgcaaccatgtaaacttctaatctgaaccacatgatgttgatccaaatagacgtgcggaggagtgagagaggggatttgaaaaaatgtgattagcaaaggacggttaagtgtaaaattatctacgctcttgcgtcccttgatcaacatcattgatcaacatcatgtagttcagat

SEQ ID NO: 53117 - DNA, 3430 bp, Zea Mays
cccattccccggtacctgaataaacagtgtgctggtgcagtgtgactgcgagcgcgtgggtttagtcagagcttcgcggatttcgcgggtgcttcggtcgttggactctgatggccgcggcgcggcggcaggccgcggtgctggtgctggtgctggcgttggtgatgggcgcggggttggcgccgggtccccgcggatgcgctgcgcagggggaggctgtggtggtgtccagctacgggcagggccgcctctcgctcaagccctacgactggacctacctgcgcgttgagctcccgccgtcgttctcttctgtcaccatggatttcgctgctgacatagaccttcagagggagcgcttgaaaggcattccaagaaacaagcttgctattatctgtttgatgaattccaaccctcctattcctgatatatctgattcttatctggacaatttatgaaggttctttattgcagtatcaaactctctcccagatggaccttttggtaatagcaatataattaatcagccaaatctggtgcaatgcataccatttcagaaaaacacaacgttagtgctaacaaatgaccaggtatctcccggggtatggtacattgggtactttcatggccttggccctgctcgcacgcaatcaaagatgattagccgaggaaaagcacacttggtgagcactcgcattactgtaagaggatgtgccacttcagcattttggggaccctactgcaaccagacagttgacatgattggttgttctcaaccttcaatagataataactcaaggaatcttctagatctgaaagctgagaggaggaacagtttgtatactagagagcacaataggcgtattaatatcttatcacggccgaacggtttagtagaacaagaagttgcatctaacgccacgaccttggtgagaatggaaaactcgatcagttgttccatttccaatgactcaatatgcatcagacaaggcgacatgaagttctacttcttggatgtagtcaacctagcattgcagtttaaaattacagctacaaattttggagctctagggccatccttgatttgctacctgcggcataatgcctttcctcaaagagatctgcatgactattcaggtgatatcagccatgatcctttggttgtcaagttgccgaatattgggcgttggtatattgcaattgaaactgtcaacaaaacacagacgaatgttacagcatcaacacctgttctagacacaacatgtttctcattgaagtggcaattaactggatgcttgaatggaaaaactggaaccaattgctcttgggaggcatatgggctccatagggttcccaagagaagtccttctgtcccttttgagtcatattatgttcctactgatggaacagcatcactggaagatagtcacttctacttggaacaatttttaagcaattcatcccatgaacagtttgcatggacttatttctttttggatgttcctcaaggttcagccggtgcccttatccatgtccagcttaagtcagataaagacttgaactacgagttgtactcgaaatatggtggcttaccatctaatgatacttgggattattatgccagtaggacaagcagcagtaatggttcagtatttttttcattacagaattccacggattcggacatggatctatcgattttttatgctaaagagggaacttggtgctttggggtgaagcatccaagtgatacggcaaattctcaaacatacatgtctatatctcttcagggatgccataggaactgcaatcagaaaggtgtgtgtcattcctcagttgatgaaagtgggctgactttctacagcttctgcacatgtgatcgcgatcatggtggctttgattgcagcgatgagctagtttcccctaatggcatttgcagaatggattctttacacatctagtggaatttccagtgcattataccattcatgtgatgttggcacttggtgcattctgtcttttcgtgtattgcaggtaagctacttagcacccacttgttgaatgctagtgtaaagattgttgggcatggtactggtattcatcagtactagtcatgtctatccaaatcaaggtaggctaaatatatttgttttaccaattctgttgattgtgtatcccatttgctggactttctaatcattcacaattcttctattccacattatattgtatctgagtccagtttttggacttctggctttccttcatggctgtcgtgggtacgttcatatatatggctacaattgatgaagtttcaaagagagcaatgcatactgctgtatttatcctcactgctcttttagccgcaactggtgcaacaagatctgcaaatattggaattgttattgccattggttctgttggcctgcttatggggtggctattggagttctctacagcacgaaggtttatatgctggccctcacgaattaaccttaatatgcctcaaagttggccaagcctcagaactttgttccagattactctggagatggtgaacaaacggttccgttggatattcttacttttgggtttcatgacactgtcttttgcggctatcagctggaagctggaatcaaataacaactactggatttggcacagcatatggcacataaccatttatacttcttcattcttcttcctgtgctcaatgcgtgtcagcacaaggaacagcagtccagagtcaaactatgagctaacgaggcaagactctatgccgagatccgagccaagggaaacctaggtaaggaacgggagtggtcggaatgaagtattgtctctacttcctgctcctggtagctagttggaagtttatgtttgatggttccatgcaggaactggctgagttgggctatatatgtgcaggtttgtttgtgtaggtacatgattatctgttgcagtccggagcgtaataacatatgaccaatcacacaagagggatttgggaaccacgtgtggtcagtctccgcagctgcatcgcatgagaactgtaaatagcacggggcaggtaaaacatctatttgtgggatgttcatcgagaacattgataatcatgtaaatgtgttgtaaaagtaaatccaaaatggaccgtctcttgaggttagctcatgcatcatgagtttggcacttgtcgtagtacgagtctcatacaagctttgatgtggggaacgtatccggtgaaaatcaacctctccgtgcaaccatgtaaacttctaatctgaaccacatgatgttgatccaaatagacgtgcggaggagtgagagaggggatttgaaaaaatgtgattagcaaaggacggttaagtgtaaaattatctacgctcttgcgtcccttgatcaacatcattgatcaacatcatgtagttcagat

SEQ ID NO: 53118 - DNA, 3316 bp, Zea Mays
aaataagatatttatctaaacccctaccggtctactccgtacggggccagccgtgtacgcctgccgcttttcgtcttttccagtctttttcctggcaattaataaagcggaaaggatgggcaagaaagcaaaccagcagcagcagattagattagcgccgtgccggaaaaacagctcctcgcctctctcccccattccccggtacctgaataaacagtgtgctggtgcagtgtgactgcgagcgcgtgggtttagtcagagcttcgcggatttcgcgggtgcttcggtcgttggactctgatggccgcggcgcggcggcaggccgcggtgctggtgctggtgctggcgttggtgatgggcgcggggttggcgccgggtccccgcggatgcgctgcgcagggggaggctgtggtggtgtccagctacgggcagggccgcctctcgctcaagccctacgactggacctacctgcgcgttgagctcccgccgtcgttctcttctgtcaccatggatttcgctgctgacatagaccttcagagggagcgcttgaaaggcattccaagaaacaagcttgctattatctgtttgatgaattccaaccctcctattcctgatatatctgattcttatctggacaatttatgaaggttctttattgcagtatcaaactctctcccagatggaccttttggtaatagcaatataattaatcagccaaatctggtgcaatgcataccatttcagaaaaacacaacgttagtgctaacaaatgaccaggtatctcccggggtatggtacattgggtactttcatggccttggccctgctcgcacgcaatcaaagatgattagccgaggaaaagcacacttggtgagcactcgcattactgtaagaggatgtgccacttcagcattttggggaccctactgcaaccagacagttgacatgattggttgttctcaaccttcaatagataataactcaaggaatcttctagatctgaaagctgagaggaggaacagtttgtatactagagagcacaataggcgtattaatatcttatcacggccgaacggtttagtagaacaagaagttgcatctaacgccacgaccttggtgagaatggaaaactcgatcagttgttccatttccaatgactcaatatgcatcagacaaggcgacatgaagttctacttcttggatgtagtcaacctagcattgcagtttaaaattacagctacaaattttggagctctagggccatccttgatttgctacctgcggcataatgcctttcctcaaagagatctgcatgactattcaggtgatatcagccatgatcctttggttgtcaagttgccgaatattgggcgttggtatattgcaattgaaactgtcaacaaaacacagacgaatgttacagcatcaacacctgttctagacacaacatgtttctcattgaagtggcaattaactggatgcttgaatggaaaaactggaaccaattgctcttgggaggcatatgggctccatagggttcccaagagaagtccttctgtcccttttgagtcatattatgttcctactgatggaacagcatcactggaagatagtcacttctacttggaacaatttttaagcaattcatcccatgaacagtttgcatggacttatttctttttggatgttcctcaaggttcagccggtgcccttatccatgtccagcttaagtcagataaagacttgaactacgagttgtactcgaaatatggtggcttaccatctaatgatacttgggattattatgccagtaggacaagcagcagtaatggttcagtatttttttcattacagaattccacggattcggacatggatctatcgattttttatgctaaagagggaacttggtgctttggggtgaagcatccaagtgatacggcaaattctcaaacatacatgtctatatctcttcagggatgccataggaactgcaatcagaaagcttctgcacatgtgatcgcgatcatggtggctttgattgcagcgatgagctagtttcccctaatgggcacatttggcagtctgtttttctaatcgcatcaaatggtgcagctattttacctgccttctgggccctccgacaaaaggtaagctacttagcacccacttgttgaatgctagtgtaaagattgttgggcatggtactggtattcatcagtactagtcatgtctatccaaatcaagtttttggacttctggctttccttcatggctgtcgtgggtacgttcatatatatggctacaattgatgaagtttcaaagagagcaatgcatactgctgtatttatcctcactgctcttttagccgcaactggtgcaacaagatctgcaaatattggaattgttattgccattggttctgttggcctgcttatggggtggctattggagttctctacagcacgaaggtttatatgctggccctcacgaattaaccttaatatgcctcaaagttggccaagcctcagaactttgttccagattactctggagatggtgaacaaacggttccgttggatattcttacttttgggtttcatgacactgtcttttgcggctatcagctggaagctggaatcaaataacaactactggatttggcacagcatatggcacataaccatttatacttcttcattcttcttcctgtgctcaatgcgtgtcagcacaaggaacagcagtccagagtcaaactatgagctaacgaggcaagactctatgccgagatccgagccaagggaaacctaggtttgtttgtgtaggtacatgattatctgttgcagtccggagcgtaataacatatgaccaatcacacaagagggatttgggaaccacgtgtggtcagtctccgcagctgcatcgcatgagaactgtaaatagcacggggcaggtaaaacatctatttgtgggatgttcatcgagaacattgataatcatgtaaatgtgttgtaaaagtaaatccaaaatggaccgtctcttgaggttagctcatgcatcatgagtttggcacttgtcgtagtacgagtctcatacaagctttgatgtggggaacgtatccggtgaaaatcaacctctccgtgcaaccatgtaaacttctaatctgaaccacatgatgttgatccaaatagacgtgcggaggagtgagagaggggatttgaaaaaatgtgattagcaaaggacggttaagtgtaaaattatctacgctcttgcgtcccttgatcaacatcattgatcaacatcatgtagttcagat

SEQ ID NO: 53119 - DNA, 1222 bp, Zea Mays
cggatgcgctgcgcagggggaggctgtggtggtgtccagctacgggcagggccgcctctcgctcaagccctacgactggacctacctgcgcgttgagctcccgccgtcgttctcttctgtcaccatggatttcgctgctgacatagaccttcagagggagcgcttgaaaggcattccaagaaacaagcttgctattatctgtttgatgaattccaaccctcctattcctgatatatctgattcttatctggacaatttatgaaggttctttattgcagtatcaaactctctcccagatggaccttttggtaatagcaatataattaatcagccaaatctggtgcaatgcataccatttcagaaaaacacaacgttagtgctaacaaatgaccaggtatctcccggggtatggtacattgggtactttcatggccttggccctgctcgcacgcaatcaaagatgattagccgaggaaaagcacacttggtgagcactcgcattactgtaagaggatgtgccacttcagcattttggggaccctactgcaaccagacagttgacatgattggttgttctcaaccttcaatagataataactcaaggaatcttctagatctgaaagctgagaggaggaacagtttgtatactagagagcacaataggcgtattaatatcttatcacggccgaacggtttagtagaacaagaagttgcatctaacgccacgaccttggtgagaatggaaaactcgatcagttgttccatttccaatgactcaatatgcatcagacaaggcgacatgaagttctacttcttggatgtagtcaacctagcattgcagtttaaaattacagctacaaattttggagctctagggccatccttgatttgctacctgcggcataatgcctttcctcaaagagatctgcatgactattcaggtgatatcagccatgatcctttggttgtcaagttgccgaatattgggcgttggtatattgcaattgaaactgtcaacaaaacacagacgaatgttacagcatcaacacctgttctagacacaacatgtttctcattgaagtggcaattaactggatgcttgaatggaaaaactggaaccaattgctcttgggaggcatatgggctccattggaagacggcggtccgtagacaagagcaagacccaaaggccatctttcagaatcgtcggtgcatgagcatg

SEQ ID NO: 53120 - DNA, 1029 bp, Zea Mays
cctatttcctccacaacatctaccccttccacctccttccaccccaatcacaaaccctagagcccgaggacaccagatctgttctcttcttcgcttgtcccaaccatgcggattcgtaggagaacatctcacgtccttggctccggctactctacacctgctactccgcctcctatgcttgtaactccaccaccgatttcggaaccgtgtttggagccgcttacatctcacattcacgacgacttcttgagccctactacaacccgagagagtctctgcaagctcagtcgctcaccatgggacctcttggatgacttgtccctctcggatcctcaggaggtggatgacctccttgatggttactatgtaaacatggactcccatgcatggagcctctcctcggccaccatgcccgtcacctccgtgaagaatgagaagacgacgaccatggccgcagctagcagtgagagagcacaactacagatactgaataagaatacaacattgaaaaaggctacagtgggggagaaaagggtcagagagatccagaaccaaaagactgcaaatgtgaagaaaaaagagggtaaggaagaggcagcacgtacctggcagtgcaagaagaatgatggcaaggggtggaactgccgtcacaatgcgagtcaccccaactccctctgtgagtaccacttgatgaagaagcgttcctacttgaacttacagcatgcttcgccagcggaggaagataaggccatggcggcagcaccaacatcagcagcctccaagccctccagcagctccaacacacagaagacgaagcttcccaacaactacgatgcaaacgagggcttctactactaccacgggtttcgcccgtctcgtggcaagaggcgctgcaggaaccatccaaagaatgatgaagaggtgaaggtggaaccatccaaatctgcttctcttccgagtcatgccaaagttgagttgttgtttctggtaataatgctactgacagcaggtattttgagttcatttgtg

SEQ ID NO: 53121 - DNA, 214 bp, Zea Mays
atgaacagcagcaaatggtgcaccaaccgtgctagttcaaggcatttgtctctaaaagcacttcttgtgcacaatggacggccccgtctcatcatactcgcccttggtcacatgctggttttgagggaaaacgaccttagccaatatcgcaccacccagccaggccgagtaccttgctaggttctcgggcatgtattcaggaggctggaggaaa

SEQ ID NO: 53122 - DNA, 956 bp, Zea Mays
atgaaaccgacatctgaaccaacgacggaggatgctctggcacctccggtcactcaccgtgccattcttcaagcgcgcttcgagcgctgtgcgacaggatggtgaggcctcctagcatggtggacatggcggggtcatgcatttctgcccagcaactccgccatggccacgagatagataatcgtggagtgcgcgatgagcatacagtgatgatcctacaactgttggaagggccccaagatgagacaaacctagatgattggttatcaggtgatttgcatccatccccattgttggagacaaatgcccattaccagccaagatgtaggaaaagcggccgaagaggagctcggaggagaaggacgtctccatgggacccgatgttctttgagagacctgttagcagggagtactccacagccaaaggtaggaaaaacaatagccggtggacttctaaagaagtggagagactggcacgaggcgtctcaaggtttggtgtcggacaatggaccctgctgaagcaggaatttttcaaaagctcaattaggacagcagtaaacctcaaggacaagtggagaaacctgctgaaaggttaccagttattgcagttgaaggcttgcagatactactccccagaaagtaaaaaaaatgcagtaagatcattttcaaagatacggaatgggggtgccaaactgccaactggccagggccagtttggaaaggaatccagtagcaggatgtgaatcttctttttcagttttgtcttcttcttatggctttttggaaaggttacagctcttttttttattttgtttttaatgtatcgaactcccaactgaacaacttagaactctgaagtgtctgcgtgtgctgtattgttttacagcttacgtctgtgtatgcagtgtgcaaccaaagttcataatccgaccaagtttgtgatgtgatgttgttct

SEQ ID NO: 53123 - DNA, 1006 bp, Zea Mays
ctgccctccttatattagcatgcttcctccgctccaataggctacggcagccttggctccctccggcctccgccgtgcctcttcgcctccgacgcggcttccgggcgccttctcgccgcttttcgctcctcagctgatggagcccgcgccgactgaacaagactatggctttcttggcgacctgcagctcagcaccacgattgacagtccccacatactacagatagataatcgtggagtgcgcgatgagcatacagtgatgatcctacaactgttggaagggccccaagatgagacaaacctagatgattggttatcaggtgatttgcatccatccccattgttggagacaaatgcccattaccagccaagatgtaggaaaagcggccgaagaggagctcggaggagaaggacgtctccatgggacccgatgttctttgagagacctgttagcagggagtactccacagccaaaggtaggaaaaacaatagccggtggacttctaaagaagtggagagactggcacgaggcgtctcaaggtttggtgtcggacaatggaccctgctgaagcaggaatttttcaaaagctcaattaggacagcagtaaacctcaaggacaagtggagaaacctgctgaaaggttaccagttattgcagttgaaggcttgcagatactactccccagaaagtaaaaaaaatgcagtaagatcattttcaaagatacggaatgggggtgccaaactgccaactggccagggccagtttggaaaggaatccagtagcaggatgtgaatcttctttttcagttttgtcttcttcttatggctttttggaaaggttacagctcttttttttattttgtttttaatgtatcgaactcccaactgaacaacttagaactctgaagtgtctgcgtgtgctgtattgttttacagcttacgtctgtgtatgcagtgtgcaaccaaagttcataatccgaccaagtttgtgatgtgatgttgttct

SEQ ID NO: 53124 - DNA, 560 bp, Zea Mays
cctctccatgttgaggcagccgtcgcggtgccttcgtcgcctccctgggcttcgccaccggatgctgaatctgcgcaatgacttcttgcgtaagaaatttgatgggatgaagtatgatttgaggagggtggaagaggtctactatgatgtgaagatccgtggacttgtacctgcgtagttgaaacaagagacttagaatccttggtaatgttagattgttaacataccgtggtttggctttttgtcatccataacgtgttcatctagctaaaatgtgaaaaatattctgttggagcgtatgtgttatggactgaacttgggggcactcgaatgaccttgctcatttcttttactgtggcaccacatgttcatgcatttgaccccgggatgtagatcgagttagatttcgtgaactctggagagaataatttttattggctcactttgcctttcacaaatcttcatacttatctaatggtgatatacatgtttggattttcaatgggatctgtggtttgtaggcaaggcaatgatagtgtgtttggtttgaggaattaaat

SEQ ID NO: 53125 - DNA, 973 bp, Zea Mays
ctcagtaaaaaaaggacataacgaaatcataattgcacaattacattgctcattttacaaaacagtattatcggaacatatcatcatcatggttatttaaaaggcgcttaagcgctactgagtacgtaaaacgctgcaatgtttcacgaaaaaactcgtaaaatgaccgtttgaagcgctaaagcgtccctttttagcgtttaagcgctttgggtcgtaaaaaggccgcgttttggcgcttttccagcgcaccccaacccatttctgtaatttcgtctaacctaaaacaggcatcctccatcttttgcgtgaggcccgcaacctctccatgttgaggcagccgtcgcggtgccttcgtcgcctccctgggcttcgccaccgcctagatttgtagtaaatcgcgtcactgctggcgactatgactgtcctaaaagggttttgggcttcttgaccgatcttcatgcttcgtttaggatgctgaatctgcgcaatgacttcttgcgtaagaaatttgatgggatgaagtatgatttgaggagggtggaagaggtctactatgatgtgaagatccgtggacttgtacctgcgtagttgaaacaagagacttagaatccttggtaatgttagattgttaacataccgtggtttggctttttgtcatccataacgtgttcatctagctaaaatgtgaaaaatattctgttggagcgtatgtgttatggactgaacttgggggcactcgaatgaccttgctcatttcttttactgtggcaccacatgttcatgcatttgaccccgggatgtagatcgagttagatttcgtgaactctggagagaataatttttattggctcactttgcctttcacaaatcttcatacttatctaatggtgatatacatgtttggattttcaatgggatctgtggtttgtaggcaaggcaatgatagtgtgtttggtttgaggaattaaat

SEQ ID NO: 53126 - DNA, 1220 bp, Zea Mays
cattgccacaccctgactccgccatcaaaaacatctccaaaacctcattccgcaatgagacccgcagccgcagcagccaccgctaccaccgccgcgctccgtctccgcgccgcctccctctcgccttctctcgctgcctccctctcgccttctctcgccgccctcctttctcatcgtagatcctccctcattcttcctccgctgcgccgcatctgctcccttgcgcctccccactcctccgccgcccccaattcgcagcccccgccgcagttgctctctcccatcatggacgcgcagttcgtgctcttccgcgcgcagctcgacgagtcttccaccctccgcgaccgcatccgtgccgtcgtcgccgagattgagtccgcctcccgcgtcgccaccgccgcgctcctcctagtccaccagcccgtccccctggcagatgtgcttgtgaaagccaaggcgcaggtagaggtgatcaaggggttgtacgcgcgcctggcggaagtcctcaaggaatgccctgggcagtactacaggtaccatgctgattggaggactgagacacatatggtagtgtcgatgcttgcattcatgcactggctggagacaggtggcctactcatgcatgctgaagcccaggagaagctagggttgtgctctggggagtttggccttgatgttgaggactacctgacaggactgtgcttcatgtccaatgaatttgatgctgaatctgcgcaatgacttcttgcgtaagaaatttgatgggatgaagtatgatttgaggagggtggaagaggtctactatgatgtgaagatccgtggacttgtacctgcgtagttgaaacaagagacttagaatccttggtaatgttagattgttaacataccgtggtttggctttttgtcatccataacgtgttcatctagctaaaatgtgaaaaatattctgttggagcgtatgtgttatggactgaacttgggggcactcgaatgaccttgctcatttcttttactgtggcaccacatgttcatgcatttgaccccgggatgtagatcgagttagatttcgtgaactctggagagaataatttttattggctcactttgcctttcacaaatcttcatacttatctaatggtgatatacatgtttggattttcaatgggatctgtggtttgtaggcaaggcaatgatagtgtgtttggtttgaggaattaaat

SEQ ID NO: 53127 - DNA, 1196 bp, Zea Mays
cattgccacaccctgactccgccatcaaaaacatctccaaaacctcattccgcaatgagacccgcagccgcagcagccaccgctaccaccgccgcgctccgtctccgcgccgcctccctctcgccttctctcgctgcctccctctcgccttctctcgccgccctcctttctcatcgtagatcctccctcattcttcctccgctgcgccgcatctgctcccttgcgcctccccactcctccgccgcccccaattcgcagcccccgccgcagttgctctctcccatcatggacgcgcagttcgtgctcttccgcgcgcagctcgacgagtcttccaccctccgcgaccgcatccgtgccgtcgtcgccgagattgagtccgcctcccgcgtcgccaccgccgcgctcctcctagtccaccagcccgtccccctggcagatgtgcttgtgaaagccaaggcgcaggtagaggtgatcaaggggttgtacgcgcgcctggcggaagtcctcaaggaatgccctgggcagtactacagtgtgctctggggagtttggccttgatgttgaggactacctgacaggactgtgcttcatgtccaatgaatttcctagatttgtagtaaatcgcgtcactgctggcgactatgactgtcctaaaagggttttgggcttcttgaccgatcttcatgcttcgtttaggatgctgaatctgcgcaatgacttcttgcgtaagaaatttgatgggatgaagtatgatttgaggagggtggaagaggtctactatgatgtgaagatccgtggacttgtacctgcgtagttgaaacaagagacttagaatccttggtaatgttagattgttaacataccgtggtttggctttttgtcatccataacgtgttcatctagctaaaatgtgaaaaatattctgttggagcgtatgtgttatggactgaacttgggggcactcgaatgaccttgctcatttcttttactgtggcaccacatgttcatgcatttgaccccgggatgtagatcgagttagatttcgtgaactctggagagaataatttttattggctcactttgcctttcacaaatcttcatacttatctaatggtgatatacatgtttggattttcaatgggatctgtggtttgtaggcaaggcaatgatagtgtgtttggtttgaggaattaaat

SEQ ID NO: 53128 - DNA, 1333 bp, Zea Mays
ctcctgctcccctgccagtgccacattgccacaccctgactccgccatcaaaaacatctccaaaacctcattccgcaatgagacccgcagccgcagcagccaccgctaccaccgccgcgctccgtctccgcgccgcctccctctcgccttctctcgctgcctccctctcgccttctctcgccgccctcctttctcatcgtagatcctccctcattcttcctccgctgcgccgcatctgctcccttgcgcctccccactcctccgccgcccccaattcgcagcccccgccgcagttgctctctcccatcatggacgcgcagttcgtgctcttccgcgcgcagctcgacgagtcttccaccctccgcgaccgcatccgtgccgtcgtcgccgagattgagtccgcctcccgcgtcgccaccgccgcgctcctcctagtccaccagcccgtccccctggcagatgtgcttgtgaaagccaaggcgcaggtagaggtgatcaaggggttgtacgcgcgcctggcggaagtcctcaaggaatgccctgggcagtactacaggtaccatgctgattggaggactgagacacatatggtagtgtcgatgcttgcattcatgcactggctggagacaggtggcctactcatgcatgctgaagcccaggagaagctaggtgtgctctggggagtttggccttgatgttgaggactacctgacaggactgtgcttcatgtccaatgaatttcctagatttgtagtaaatcgcgtcactgctggcgactatgactgtcctaaaagggttttgggcttcttgaccgatcttcatgcttcgtttaggatgctgaatctgcgcaatgacttcttgcgtaagaaatttgatgggatgaagtatgatttgaggagggtggaagaggtctactatgatgtgaagatccgtggacttgtacctgcgtagttgaaacaagagacttagaatccttggtaatgttagattgttaacataccgtggtttggctttttgtcatccataacgtgttcatctagctaaaatgtgaaaaatattctgttggagcgtatgtgttatggactgaacttgggggcactcgaatgaccttgctcatttcttttactgtggcaccacatgttcatgcatttgaccccgggatgtagatcgagttagatttcgtgaactctggagagaataatttttattggctcactttgcctttcacaaatcttcatacttatctaatggtgatatacatgtttggattttcaatgggatctgtggtttgtaggcaaggcaatgatagtgtgtttggtttgaggaattaaat

SEQ ID NO: 53129 - DNA, 1906 bp, Zea Mays
gtcgagtgctccgcatctcgcattctcgccggtgctgctgcaattaacgccgcccccggccaaccacccgaaacctacctccgccgccgttgtcgccaccgtcaacatggcgagccaaggggagccctcggcctctgcttccgatccgaaggagaagaaggacttctcgacggcgatcctggagaggaaaaagtcaccgaaccgccttgtcgtcgacgaggccaccaacgacgataactccgtcgtcgcgctgcaccctgacaccatggagaggctgcagctcttccgcggcgacaccgtgctcctcaagggtaagaagaggaaagacactatttgcattgtccttgcggacgaaacctgtgaggagccaaaggttcggatgaacaaggttgtccgccagaacctaagggtgaggcttggtgatgtggtttctgtccaccagtgccaggatgtgaaatatgggaagcgtgtccacattcttccaattgatgatacagttgaaggcattacagggaacctgtttgatgccttcttgaaaccatatttcctagaagcatacaggccgttgaggaaaggagaccttttccttgtcagaggaggaatgagaagtgtggaattcaaagtgatagagactgatcctgctgaatattgtatcgttgcgccagatactgaaatattttgtgatggggagcctattaagagggaggatgaggagcgtcttgatgaagttggttatgatgatgttggtggagttagaaagcaaatggcccaaatcagagagcttgttgagcttccactacgccatcctcaacttttcaaatctattggtgtgaagccaccaaagggcatattgctgtacgggccacctggttccggaaagactcttattgctcgtgctgttgcaaatgagactggagcctttttcttcctgatcaatggtccagagattatgtcaaagctggcaggggagagtgaaagcaatctcagaaaggcatttgaagaagcagagaagaatgctccatctatcattttcattgatgaaattgattccattgcacccaagagagagaagaccaatggagaagtagagcgtcgtattgtttcacagctactgactcttatggatggactgaaatctcgttcccatgttattgttatgggtgctacaaaccgaccaaacagcattgatcctgctcttcgaagatttggaaggtttgatcgggaaattgacattggagttcctgatgaagttggccgtctcgaggttctccgcattcacactaagaacatgaaactagctgaagatgttaatttggaactcatttcaaaagatacccatggatatgttgaaatttgccagcgtgcgtgcaaatatgcaatcagagagaacattgagaaggatattgagagggaaaggcggagaaaggacaaccctgaggcgatggaggaagacgaagtggatgagatcgctgagatcagggcccctcacttcgaggagtcgatgaagtatgctcggcgtagtgtcagtgatgctgatatccgcaagtatcaggcgtttgcccagacattgcagcagtcccgggggttcggcagtgagttccgcttctcggatcagccggcgacagctggtgctgctgctgcagctgatccgtttgcttctgcgggtgctgcggctgatgatgacgatctatacagctagttgggttgttcaatatcagtcccgtcactcatctgtttaaaactgatcatactaaacacgcttgtcatgcaatgatatttatttgccgtacatttggacgtcgctgagatgatgcactctcggccttcggttaacttttcatgccatattctccatgtcattgtctgggccatgacattttattaattattgtgaaatctatcatct

SEQ ID NO: 53130 - DNA, 2752 bp, Zea Mays
ctcgtcgagtgctccgcatctcgcattctcgccggtgctgctgcaattaacgccgcccccggccaaccacccgaaacctacctccgccgccgttgtcgccaccgtcaacatggcgagccaaggggagccctcggcctctgcttccgatccgaaggagaagaaggacttctcgacggcgatcctggagaggaaaaagtcaccgaaccgccttgtcgtcgacgaggccaccaacgacgataactccgtcgtcgcgctgcaccctgacaccatggagaggctgcagctcttccgcggcgacaccgtgctcctcaagggtaagaagaggaaagacactatttgcattgtccttgcggacgaaacctgtgaggagccaaaggttcggatgaacaaggttgtccgccagaacctaagggtgaggcttggtgatgtggtttctgtccaccagtgccaggatgtgaaatatgggaagcgtgtccacattcttccaattgatgatacagttgaaggcattacagggaacctgtttgatgccttcttgaaaccatatttcctagaagcatacaggccgttgaggaaaggagaccttttccttgtcagaggaggaatgagaagtgtggaattcaaagtgatagagactgatcctgctgaatattgtatcgttgcgccagatactgaaatattttgtgatggggagcctattaagagggaggatgaggagcgtcttgatgaagttggttatgatgatgttggtggagttagaaagcaaatggcccaaatcagagagcttgttgagcttccactacgccatcctcaacttttcaaatctattggtgtgaagccaccaaagggcatattgctgtacgggccacctggttccggaaagactcttattgctcgtgctgttgcaaatgagactggagcctttttcttcctgatcaatggtccagagattatgtcaaagctggcaggggagagtgaaagcaatctcagaaaggcatttgaagaagcagagaagaatgctccatctatcattttcattgatgaaattgattccattgcacccaagagagagaagaccaatggagaagtagagcgtcgtattgtttcacagctactgactcttatggatggactgaaatctcgttcccatgttattgttatgggtgctacaaaccgaccaaacagcattgatcctgctcttcgaagatttggaaggtttgatcgggaaattgacattggagttcctgatgaagttggccgtctcgaggttctccgcattcacactaagaacatgaaactagctgaagatgttaatttggaactcatttcaaaagatacccatggatatgttggtgctgatcttgctgccctttgcactgaggctgctcttcagtgcattcgtgagaagatggacatcatagatcttgaggatgagacaatcgatgcagagatattgaactcaatggctgttacaaatgaccatttcaagactgcgcttggaacaagcaacccatctgctcttcgtgaaactgttgtcgaagtcccaaatgtctcttgggaggatattggtgggctggagaatgtcaagagggagctccaggagactgttcaatatcctgtggagcatccggagaagttcgagaagtttggcatgtctccatccaaaggagttttgttctatggtcctcctggttgtggtaagaccttgttggcaaaggcaattgccaacgagtgccaggctaacttcatcagtgtcaagggtcctgagttgcttaccatgtggtttggtgagagtgaagccaacgtccgtgaaatttttgacaaggctcgtcaatctgctccttgtgtcctcttctttgatgagcttgactcaattgctactcagagaggaagcagtgtgggtgatgctggaggtgcggctgatagagtgcttaatcagctactgacagaaatggatggcatgaatgccaagaaaactgtgtttattattggagctacaaacaggcctgacatcattgaccctgctctgctgaggccagggcgtcttgaccagctgatctacattccactgcctgatgagcagtctaggctccagatcttcaaggcctgccttaggaagtcccctgtggcgaaggatgtggacttgaatgctcttgctaagtacactcaagggttcagtggagcagatatcacagaaatttgccagcgtgcgtgcaaatatgcaatcagagagaacattgagaaggatattgagagggaaaggcggagaaaggacaaccctgaggcgatggaggaagacgaagtggatgagatcgctgagatcagggcccctcacttcgaggagtcgatgaagtatgctcggcgtagtgtcagtgatgctgatatccgcaagtatcaggcgtttgcccagacattgcagcagtcccgggggttcggcagtgagttccgcttctcggatcagccggcgacagctggtgctgctgctgcagctgatccgtttgcttctgcgggtgctgcggctgatgatgacgatctatacagctagttgggttgttcaatatcagtcccgtcactcatctgtttaaaactgatcatactaaacacgcttgtcatgcaatgatatttatttgccgtacatttggacgtcgctgagatgatgcactctcggccttcggttaacttttcatgccatattctccatgtcattgtctgggccatgacattttattaattattgtgaaatctatcatct

SEQ ID NO: 53131 - DNA, 1700 bp, Zea Mays
agcaacttggcagcaccgcgccgccgcagcccctccgccacgccagccatcagtccatcactgcgcgtctgccccttgcgcagttgcgctcgcggcccgcccgcacggtcccgccgcctatttatcaacgccgcccccacccgccactctctcccctctgtcccagaacgcgccccagcctcccacctagaactccgcgcccagcgctttccgtaaccaccaccaccacagcgggcacagtgacaggttgaggagacggccgccatgggagaggagaagaagacgggcaagggcggcggcggcggcggcggcgacaagaagaaggacgccggcgctggggccgcgccgcagcccatcgtgttgaaggtcgacttgcattgcgccggctgcgccaacaaggtccgcaaggccatcaaagcgcgcaccaggcgtggagtcggtgacgccggacatggcggcgggcaaggtggtcgtgaccggtccggcggacgcggtgcagctcaaggagcgcatcgaggctagggccaagaagcccgtgcagatcgtctccgccggcgccggttcgcccaagaaggacaaggagaagaaagctgacggcggcgagaaaaatgcggccaaagagaagggcggcggcgatgcagagaagaagaaggccgacaagaagaagggaggcggtgatggaggagagaaaaatgccgacaagaagaagggcggcggcggcggcgataagaaggccgacaaggagaagggcactggcaaacccaaggaggaagaggaggaggaggagaagcccaaggaacccaaggaggagacggttacgctcaagatccaactgcactgcgacggctgcatggaccgcatcaagcgccgcatctgcaagatcaaaggtgtgaaggatgtggcgttcgacgccgccaaggacctggtgaaggtgacgggcaccatggacgccgccgttctgccggcgtacctcagggagaagctcagccgggacgtcgaagtcgtcgcgcccggcaagaaggacggcggcggcggcggcgacaagaagggcaagggcgcaggagacggggcagagaagaagaacaagaagaaggacggtggggccgaggggaagaacgatagagccgcggccgcggccgcggccgccgcctccgcatcggtggcgccgattcccttggccgacgccggcggcatgtacctgatgcccccgcactacgggtacatgccgtacccgccggctcccggcggctactacggcgccgctccaccgcccaaccacgccggcttctacgccaacgccggtgtccattacccgcccccgacagcctacggctacggccccgcccacctccacgcgccccagatgttcagcgacgagaaccccaacgcctgctccgtcatgtgatctctcgttcgttcgctcgctccgccggtttgccatcggcgccccttcttccgtcattgtgtcagaccaagaatcgtggcttgggttttaacagtcggtttaattaattatcagttagtgttagccagtttaatcattgctccgagttcattaccagcagacctgtgtaaatgacagcagcgagtctcgctccgccccgttgtaatgcagcgtcatgtgtactttagccggacccgacaaaattttgcccctttgtcatcgcgaatcgccatttgcgacgtcgctgatggtgctc

SEQ ID NO: 53132 - DNA, 1900 bp, Zea Mays
gtattctctcctcccgcattcacttgttgcaaccatcgccttctccctcgccgcgagagtgctcaacctggtgtcctggataaggcaacgggataggaagcgataattggcggagagtgaaggttcccgtcctaggccgaagtcctcgttgttgccggaagaagtaccgcatgacttcgccgggtagcggcggatcgacgactgcaagttatgtagccaattcgcccccctacttgtagatctgggtttttgtaaagtttatccggaagctacttgtagatctgggtttttgtaaagtttatccggaagatttgtatggattggggtagatccgaagtacatatccatcccacgcttggggttttagggtatgacactcgcacctttggattgtagtagatgttcgtccgtatgcaaccattttgttgttgtcgtcggctgtttcgactagaaaaatacaaaccctaggatattacactacgatttagtttcatatctttcgcttcaaatgcggcaaagtgtagttaacatctttttgaatcactgctagatgtcctacactccaaaagacgccctggaatgggctgttcgggagatggaggaccacacctgtcaaattaggttgtcgagaaggatggaagcaaccacctcgatgacaacaccacagaggaagaacttgaagcagctcgtgagatagaacttgaaaggctccccactcccgaaactcttaaaaaccttgaggacttttgtgaggaatggggtatgcagtatgacaacgatcaatctcgtgggatcaactaggagtaattgtagaataatgtaaggttcagagagatgtagcacatggaacttgttatgtgtcaatgtaaaatggtaatgtgaactctagtgtcttgtggagtcaatgtgaaccatgaagtgccatgtttggagttatgaactacatgcttatgaaatgatgatggcttcttccgattttgcattgtgttgttgtgtttaatacaattgcagtcgtactcattactacaaaattttgcccatttatcactcaagtttcctatggacaactcttggcctcgttttccatttcacagtatgtacgaagtaacctatactccaagattggaactgtcaacagatcaagcatggaacaactaggaagggttctagaatcctaacgaggcaatgcaaggcatacaagaccttgttcaggatgagctgccgccaatgagttctaaaaagaaaacagttcacaagaggctcaaaaatttcactgcaactgaggatgaatgtcttgtatcaacgtacttaaatgttagcacagacccaattgtgggtgtgaaccaaccaataaaaggctactaacagaggatcgctaactactgcgaagaacacaagaaaactccagtttctccgaccatatcctccctacagcattggtgggcagacattcaaagggacacttcaaggttttgtggattctttgcccaagttgaaaggcgcaaacagagtggtgtgaacgaatctgacaaggttggtttatggtttggttactctatacaactggcagtgcattcaagttcatgcattgctggttgatgctaaaggacgaaatgaagtggacaactcaattggtcgggcgtcaactaattctgagtccaacaaggcaacaagtgagaagccatgcactgagaaccattaacaacataactcacttcgggtccattccctgtggagaggtcgtcgaacacgggagagatataacaccctaaatctaggaaaaataaaggatgctttaaatatgtgattatggcaagatttgtttatttaaattcatatttgagaacataatttattatgaaagagcaattaatgaagtgagaataaatcaatattaaat

SEQ ID NO: 53133 - DNA, 1068 bp, Zea Mays
ccttccagcaggtctcgggcgtggttgcgaaaaatgaggcggctgaaaacaaagcgtattctctcctcccgcattcacttgttgcaaccatcgccttctccctcgccgcgagagtgctcaacctggtgtcctggataaggcaacgggataggaagcgataattggcggagagtgaaggttcccgtcctaggccgaagtcctcgttgttgccggaagaagtaccgcatgacttcgccgggtagcggcggatcgacgactgcaatatgtacgaagtaacctatactccaagattggaactgtcaacagatcaagcatggaacaactaggaagggttctagaatcctaacgaggcaatgcaaggcatacaagaccttgttcaggatgagctgccgccaatgagttctaaaaagaaaacagttcacaagaggctcaaaaatttcactgcaactgaggatgaatgtcttgtatcaacgtacttaaatgttagcacagacccaattgtgggtgtgaaccaaccaataaaaggctactaacagaggatcgctaactactgcgaagaacacaagaaaactccagtttctccgaccatatcctccctacagcattggtgggcagacattcaaagggacacttcaaggttttgtggattctttgcccaagttgaaaggcgcaaacagagtggtgtgaacgaatctgacaaggttggtttatggtttggttactctatacaactggcagtgcattcaagttcatgcattgctggttgatgctaaaggacgaaatgaagtggacaactcaattggtcgggcgtcaactaattctgagtccaacaaggcaacaagtgagaagccatgcactgagaaccattaacaacataactcacttcgggtccattccctgtggagaggtcgtcgaacacgggagagatataacaccctaaatctaggaaaaataaaggatgctttaaatatgtgattatggcaagatttgtttatttaaattcatatttgagaacataatttattatgaaagagcaattaatgaagtgagaataaatcaatattaaat

SEQ ID NO: 53134 - DNA, 1779 bp, Zea Mays
ggaaagcgtcccggacgcggtgtttacgtgacgtttgtgcactgtggcaccttccagcaggtctcgggcgtggttgcgaaaaatgaggcggctgaaaacaaagcgtattctctcctcccgcattcacttgttgcaaccatcgccttctccctcgccgcgagagtgctcaacctggtgtcctggataaggcaacgggataggaagcgataattggcggagagtgaaggttcccgtcctaggccgaagtcctcgttgttgccggaagaagtaccgcatgacttcgccgggtagcggcggatcgacgactgcaaatgtcctacactccaaaagacgccctggaatgggctgttcgggagatggaggaccacacctgtcaaattaggtagcttgtcggcagtgctacaagcacaccaatgccaaccgagcatctgaaatgtgttaacctcaagatttttaagctcgcggactggcttgacaaggtttcaatcctatgcttcgaggttgtcgagaaggatggaagcaaccacctcgatgacaacaccacagaggaagaacttgaagcagctcgtgagatagaacttgaaaggctccccactcccgaaactcttaaaaaccttgaggacttttgtgaggaatggggtatgcagtatgacaacgatcaatctcgtgggatcaactaggagtaattgtagaataatgtaaggttcagagagatgtagcacatggaacttgttatgtgtcaatgtaaaatggtaatgtgaactctagtgtcttgtggagtcaatgtgaaccatgaagtgccatgtttggagttatgaactacatgcttatgaaatgatgatggcttcttccgattttgcattgtgttgttgtgtttaatacaattgcagtcgtactcattactacaaaattttgcccatttatcactcaagtttcctatggacaactcttggcctcgttttccatttcacagtatgtacgaagtaacctatactccaagattggaactgtcaacagatcaagcatggaacaactaggaagggttctagaatcctaacgaggcaatgcaaggcatacaagaccttgttcaggatgagctgccgccaatgagttctaaaaagaaaacagttcacaagaggctcaaaaatttcactgcaactgaggatgaatgtcttgtatcaacgtacttaaatgttagcacagacccaattgtgggtgtgaaccaaccaataaaaggctactaacagaggatcgctaactactgcgaagaacacaagaaaactccagtttctccgaccatatcctccctacagcattggtgggcagacattcaaagggacacttcaaggttttgtggattctttgcccaagttgaaaggcgcaaacagagtggtgtgaacgaatctgacaaggttggtttatggtttggttactctatacaactggcagtgcattcaagttcatgcattgctggttgatgctaaaggacgaaatgaagtggacaactcaattggtcgggcgtcaactaattctgagtccaacaaggcaacaagtgagaagccatgcactgagaaccattaacaacataactcacttcgggtccattccctgtggagaggtcgtcgaacacgggagagatataacaccctaaatctaggaaaaataaaggatgctttaaatatgtgattatggcaagatttgtttatttaaattcatatttgagaacataatttattatgaaagagcaattaatgaagtgagaataaatcaatattaaat

SEQ ID NO: 53135 - DNA, 2778 bp, Zea Mays
atgaagatggtaatctcagtcaaagcgcgggatgcatttcgcatctccttcggtccttccccagcccatccggtacggagccaaatctctggccgaacgaaaaagcgcggagatttccagggagaagcagtgttgcagacgcccggattcggggcgcgtcgttcctacatagaccgcgagtcgcctcctgcacctgcgggattcgccgcctgtcccagatccaagaaacgcataacgggcgtggagccagttgggccagggaagatttaaccagtcgggcccggaaggagcctaagggttggatctgatgctaccaggtcgctgagcatcgctactgaagggggcagcttctgattccggcagatggctcctgaaatgatggaggaggggcaatcagcttcctataccgtggatgacgctctcttgtcatcaggttttgggaggttccagatattgattctttcatatgctgggattggcttaattgccgaagcgatggaaatgatgctgctatcatttgttggtccatcagtacagctagaatggaagcttacttctcatcaggaaagcatgattacaagtgttgtttttgttgggatgctgattggagcttactcgtggggtgtggtttcagacaactatggaaggaggcaggtccaatcttttacttatgtcatgtaccattttgcacaaaattatgcaagtcaatttcctttttgctgatgattaacatgaagttaccaagcttgttactgatgtcatttctattgcacagttgcttcttcctacttcctagttatagctgattagtatcaatgtcatgtttgggatcagaatacgccatgtgtaaaaaactcggccggtagggaaaaggccgcccccaaggtattatattaagaagaagctcaatcggagccctgaccgaaaggtcatgaaaactggtccccgtgcaacatgagggttcgccccatataggctagatctttactccctcccaacccctacacgaggatccgacctctataggtcagccccatctcgtgtacatacaaccaggggaacaagctagtgacctttttttaaccttagcctgaaattcgttcccattgggattcgaactcaggacttaaggagtgctactcaaaccagctaacctattggctagaagatgtctctatgattgttcacatgaatgatcatgaattaatcaggaacaaagttcaatacatgttactttcgagaacgagcttcaaatcattctcaaagtttatagtcatgaatcaattgcttgtgtacatcatacaagtcctaacactctgttttatttggattctataggagaggctttctctttacagccattatgacaagtggagctggattttttagcgcttttgctccgaactatctatcattaatttccctgagattcttagttggtattggtttgggaggaggacctgttctgggatcttggttcttggaatttgttcctgctccaactagaggaacttggatggtggtattttctgcattttggactgttggaacaatcttggaggcatctcttgcatggacaattatgcccaagtttggttggaggtggttgttagcattatcagctgttccatcttttctcctgctgctattttatgccattacaccagagtcaccaaggtttctttgcatgaaaggccggactactgaggctgtggatatattggagaaaatggcaagactaaacaatgtacaactaccttctggtaggcttgtttctgacaaaaatattgagctagatgaagtttcaggatcttcagagtccacgacacttctggctggtgccgaagaaagtgacaacctaaatgaggatcagggttctgatttcggaggtattaagtccgtcggcaagctactcgcaccaaaactgatcagagcaaccctgcttctgtggatggccttctttggaaatgcgtttgcctattatggcattgttcttctgacatcagagctcagtaatggaaacaggatatgtgccaaagaggatgttgaatcagttcattcaaccaatgcaagcctatataagaatgttttcatatctagttttgcagagatcccagggtcatttctgtcggccatgatcgtggatagatttggtcggaagcgttccatggcgtcgatgctcttcactagctgcgttttcttactcccactagtgttctcccggacagatatactaaccagaatctccctgtttggtgcccggctctgtatatctgccagcttcaccatcgtatacatatatgctccagagatttacccgaccgcggtgaggacgacgggcatcggcatcgcgagctcagtgggcaggatcgggggcatcctctgcccactcgtcgctgtcgccctggtgcacagctgccagcagacgacggcgatcctcctcttcgagcttgtaatcttcctctccggcctggccgtctcgttcttccccttcgagacgaaggggtgtaggctcaacgacaccgacgtggacatgaactgatccggtggctgggtgtagtgtgactctcagagcaattttcctgtggcggttaccggaattgcatatggattggatatttttagcaacacgtatacgtgttagactacccgtctagggtttatgttattccccttgtaatgaccgttataccccctgtgtaatgggcctggcccagttactcactctattaatatcactcccaacccctgtttagggtatgggttcctattccaaca

SEQ ID NO: 53136 - DNA, 2449 bp, Zea Mays
gtcccgttgcccgttacggacgcgtggcagcccgcctccgctttgagcctttgaccaatgaagatggtaatctcagtcaaagcgcgggatgcatttcgcatctccttcggtccttccccagcccatccggtacggagccaaatctctggccgaacgaaaaagcgcggagatttccagggagaagcagtgttgcagacgcccggattcggggcgcgtcgttcctacatagaccgcgagtcgcctcctgcacctgcgggattcgccgcctgtcccagatccaagaaacgcataacgggcgtggagccagttgggccagggaagatttaaccagtcgggcccggaaggagcctaagggttggatctgatgctaccaggtcgctgagcatcgctactgaagggggcagcttctgattccggcagatggctcctgaaatgatggaggaggggcaatcagcttcctataccgtggatgacgctctcttgtcatcaggttttgggaggttccagatattgattctttcatatgctgggattggcttaattgccgaagcgatggaaatgatgctgctatcatttgttggtccatcagtacagctagaatggaagcttacttctcatcaggaaagcatgattacaagtgttgtttttgttgggatgctgattggagcttactcgtggggtgtggtttcagacaactatggaaggaggcaggagaggctttctctttacagccattatgacaagtggagctggattttttagcgcttttgctccgaactatctatcattaatttccctgagattcttagttggtattggtttgggaggaggacctgttctgggatcttggttcttggaatttgttcctgctccaactagaggaacttggatggtggtattttctgcattttggactgttggaacaatcttggaggcatctcttgcatgggtataatatttgcccctgaatattttgaaactgatagcgctattcatattttataatagtgcccagcatgaaaatcagcagtaaacattgcacatgaacataacctgatgcaactgattctcaatttctcattgtatactccagtttattcagaaatttatggaccactcacgaacagttaaatctgctaatagggttgctgattaccatacaaaagattaacctgtagtattaatttggtctgttacttgatcattttttttccatgcctaattttttttcaccatactaatggcagacaattatgcccaagtttggttggaggtggttgttagcattatcagctgttccatcttttctcctgctgctattttatgccattacaccagagtcaccaaggtttctttgcatgaaaggccggactactgaggctgtggatatattggagaaaatggcaagactaaacaatgtacaactaccttctggtaggcttgtttctgacaaaaatattgagctagatgaagtttcaggatcttcagagtccacgacacttctggctggtgccgaagaaagtgacaacctaaatgaggatcagggttctgatttcggaggtattaagtccgtcggcaagctactcgcaccaaaactgatcagagcaaccctgcttctgtggatggccttctttggaaatgcgtttgcctattatggcattgttcttctgacatcagagctcagtaatggaaacaggatatgtgccaaagaggatgttgaatcagttcattcaaccaatgcaagcctatataagaatgttttcatatctagttttgcagagatcccagggtcatttctgtcggccatgatcgtggatagatttggtcggaagcgttccatggcgtcgatgctcttcactagctgcgttttcttactcccactagtgttctcccggacagatatactaaccagaatctccctgtttggtgcccggctctgtatatctgccagcttcaccatcgtatacatatatgctccagagatttacccgaccgcggtgaggacgacgggcatcggcatcgcgagctcagtgggcaggatcgggggcatcctctgcccactcgtcgctgtcgccctggtgcacagctgccagcagacgacggcgatcctcctcttcgagcttgtaatcttcctctccggcctggccgtctcgttcttccccttcgagacgaaggggtgtaggctcaacgacaccgacgtggacatgaactgatccggtggctgggtgtagtgtgactctcagagcaattttcctgtggcggttaccggaattgcatatggattggatatttttagcaacacgtatacgtgttagactacccgtctagggtttatgttattccccttgtaatgaccgttataccccctgtgtaatgggcctggcccagttactcactctattaatatcactcccaacccctgtttagggtatgggttcctattccaaca

SEQ ID NO: 53137 - DNA, 2086 bp, Zea Mays
ctcactcacctccgcgtcggtgggcggccagcccgtcccgttgcccgttacggacgcgtggcagcccgcctccgctttgagcctttgaccaatgaagatggtaatctcagtcaaagcgcgggatgcatttcgcatctccttcggtccttccccagcccatccggtacggagccaaatctctggccgaacgaaaaagcgcggagatttccagggagaagcagtgttgcagacgcccggattcggggcgcgtcgttcctacatagaccgcgagtcgcctcctgcacctgcgggattcgccgcctgtcccagatccaagaaacgcataacgggcgtggagccagttgggccagggaagatttaaccagtcgggcccggaaggagcctaagggttggatctgatgctaccaggtcgctgagcatcgctactgaagggggcagcttctgattccggcagatggctcctgaaatgatggaggaggggcaatcagcttcctataccgtggatgacgctctcttgtcatcagtacagctagaatggaagcttacttctcatcaggaaagcatgattacaagtgttgtttttgttgggatgctgattggagcttactcgtggggtgtggtttcagacaactatggaaggaggcaggagaggctttctctttacagccattatgacaagtggagctggattttttagcgcttttgctccgaactatctatcattaatttccctgagattcttagttggtattggtttgggaggaggacctgttctgggatcttggttcttggaatttgttcctgctccaactagaggaacttggatggtggtattttctgcattttggactgttggaacaatcttggaggcatctcttgcatggacaattatgcccaagtttggttggaggtggttgttagcattatcagctgttccatcttttctcctgctgctattttatgccattacaccagagtcaccaaggtttctttgcatgaaaggccggactactgaggctgtggatatattggagaaaatggcaagactaaacaatgtacaactaccttctggtaggcttgtttctgacaaaaatattgagctagatgaagtttcaggatcttcagagtccacgacacttctggctggtgccgaagaaagtgacaacctaaatgaggatcagggttctgatttcggaggtattaagtccgtcggcaagctactcgcaccaaaactgatcagagcaaccctgcttctgtggatggccttctttggaaatgcgtttgcctattatggcattgttcttctgacatcagagctcagtaatggaaacaggatatgtgccaaagaggatgttgaatcagttcattcaaccaatgcaagcctatataagaatgttttcatatctagttttgcagagatcccagggtcatttctgtcggccatgatcgtggatagatttggtcggaagcgttccatggcgtcgatgctcttcactagctgcgttttcttactcccactagtgttctcccggacagatatactaaccagaatctccctgtttggtgcccggctctgtatatctgccagcttcaccatcgtatacatatatgctccagagatttacccgaccgcggtgaggacgacgggcatcggcatcgcgagctcagtgggcaggatcgggggcatcctctgcccactcgtcgctgtcgccctggtgcacagctgccagcagacgacggcgatcctcctcttcgagcttgtaatcttcctctccggcctggccgtctcgttcttccccttcgagacgaaggggtgtaggctcaacgacaccgacgtggacatgaactgatccggtggctgggtgtagtgtgactctcagagcaattttcctgtggcggttaccggaattgcatatggattggatatttttagcaacacgtatacgtgttagactacccgtctagggtttatgttattccccttgtaatgaccgttataccccctgtgtaatgggcctggcccagttactcactctattaatatcactcccaacccctgtttagggtatgggttcctattccaaca

SEQ ID NO: 53138 - DNA, 6548 bp, Zea Mays
tgcagacatgcatacttaaaaaaactcataaggtacacaaagcatgagataacataacaaacatgagtttcaaagcatttcaaattcaacattgaaaaattaagaaataaatatcattactaactcaatctgcaatggagaaatgcaattaataatgcatggctcgtttacgaaaaatagcttcatactaatgttctggaacatgactttacaatgattaattctgatcgagagacacttagtagcccgaaagtccattgagcagctaactagataaaaaatcattcagccaaacagtacccaccaaaatatatactccctcaatcccaaaataagtgcacaactcacattttgtgccaactaatttcaattttcaacatttgtatatccaaataggtttactataagctggcaaatagaccgtcaggtacgtcccttcccctcccatgccgacgcttgcactccccaatgccccatgtcggcgcccactccggggccggcggccaccttccaggggatcgccgccgcccctccctcctcccatttagcccccctgcaggcgtccgcttcctcccatcctcctcctttgtacgcggctccgctcaagcctggtgggcggtccaagccagatcgctggcgcgcggagagttccgctggtggcggctcctgcagctccgctgggagtgccccttctggcccttcctttcgcgacatggtgctgctctcccggccttcgtctccggctagtcggactcccaggtctgggcctcgggcgtcgctgtgtagggagctccaggccgcggttctccagccgtcggtagtggggggaactgcgaagtgcgccgctgatggttggcagactgtggagtcccggtcacaccggcggcctcggtcacactctccacgaggcggaccacgtgaagacatcaacgcttacaatctcggggagcagggacagcaacgtcgttcagccaaagaaagactaggacccagatgcttggattccaaacaaacgaatcctaactcttctgagctggacaattttgtgggtggcccttgctgcgatctcaacgaagaacaccgtgcgggcctagagactccccacggggatgactcggctccggtgcacactgaagagcaagcccaacatgatgtttttctgatcagacggactgcaatcctattgggcagcagagtatcactagagatttgtgctcagttccaagtgtcaaacaccgtgcgggccttgaggctcccttcggagaggcttcggctccggtgcacattgaagaccaatgcagcgatcacactgctgaacaccgtgcgggtcttgagaatccccacggggatgactcggctccggtgcacactgaagagcaagcccaacatgttgtttttctgatcagacggactacaatcctattaggcagcagagtattactagagatttgtgctcggttctaagtgtcaaacaccgtgcgggccttgaggctcccttaggagaggcctcggctccgttgcactttgaggaaaattctcatcatcattttttccaaagccaggccgctgcaacatcagaaagaaggctcatagaggcgtcaaacctgctcgtttaccatagaaaaaagaagcataacaagccgctggttgaaattgctgaagaaacaatggaaaataatatcagtccagcactgcagatgaaaggcgaggaccctttaacagccaaaaaagaggtatttcttaaacaaattgtgaaagagaagtctctggtattctgccagccccagaaaatccacctccaaagcccataatctctgagcgttccactgttgtgtcccttcgccgcagccaccgtattgctggaatgggagcaaaaattggcaagcaagatcttccctcaagagcaacaaagaaagttatgaaggctctcaaggtggtgggggaactggaagagatagatcagcaaatcagaaaagactatgaaaaaatattctctgaaagacttcccctcaatcacatagaggctctcgcagccttctttgggtggaaggtgccggatgagctgagggcagaggctcaatcgcatagtgctgctgcctgctgagtgcccccttctctcttttgttgtttttctaaacatgtaatttatggatccaagaaaaatatttatatggaatgttaagggactgaattctacttcgagacagagttctgttcgcagttttatagattccctgggagtggacattgtttgtttgcaagagactaagatgcaggaaattaccagattcaaagtgatagccattctgggagtaaacttcgagcattttgtctacttaccctctttgggtgccagcggaggaattcttgtggcctggaagagccatttacaagtcacaggattgagtagagtggacaatttcagcgtatctgtgcagttcaaaaactccaatggccagcattggtggttaaccaatgtctatggtccccaaagcaatgaagataatatctccttcctgctagaactcagacagatcatagcagagtgtcatgggccttgggttgtttcaggggacttcaatcttatatacaaagaggatgacaaaaacaacgctttttgcaatagagccataatggggagattcaggaaatttattgatgatacaagtcttattgacctgcctctaatagggcgtaaatatacctggtctaatcaccaagtgtctcctactttggttagattagacagagtcctgtgctcaagtgactaggaagatatttttcccaataacctcctccaaagcgctgcaccaagtgtctcctactttggttagattagacagagtcatgtgctcaagtgactaggaagatatttttcccaataacctcctccaaagcgctgcctgaggactctgatcattgcccccttgtgctaggtctgcagagcaactgctttggcaagaggcggttccattttgaatccttttggccaaagttggatggattccaggaagctgccagtgaagcatggatgtctatcgatgaaggagtccgcccagttccaagcttcgataggagactaaaagccactgctaggtcctagcagaaatggagtgggcaaaagattggacatgtgacctcacagttagctttagcaagggagattattcacatgcttgaagtagcccaagatttcaggcttttgtcccctttggaggattggctgagatgtggactgaaaaagcactccttagcccttgcctcatttaagcgcaccattgcacgttctagatcaagaatcaactggctcaaagagggagatgctaacaccaagctattccatatgcacgccagatatagaaagaactttatggcaaaattggtctttggagataatgtgtttactgatcatgctgacaaagccatgctggtggataatttctacagaagcctgttgggaacaagatcggatagaactgtcactattaatcttaactacctggggctgccctctcataatttggaggatctggacttaccaattacagaaaaagaagtctttgaagccattaaagagttgccatccgacaaatctcctggacctgatgggttcacaggaagattttacaaggcttgctggcctaccattaaggaaaatgtgatgcaggttctggcagccatttgggacaggaaatttggtcacttcaacaaatttaattcagctcttgtcacccttattccaaaaaaggagggtgctgaccaagtcaaggactttaggcctattagtttagtgcatagcatggccaagctagtcgctaaaatcctagctaacagactggggaataaactgcaatctatggtctctcaaaggcagagtgctttcatcaaaggccagttcatccaagacaattttatgattgtgcaacaaactgccagactcctccttcagcaaagacaagcaagaatccttttgaagctagacattactaaagcttttgactcagtatcctggcctttcctcctcgaagttcttcaaaaactggggtttgggcagatttggacggatgttctgagtggactgctatctacctcgtccacacatgtaatgctcaatggtgttgctggtgaaaaaattcagctcaaaaagggcttaagacagggagaccccctctcacctatgttgttcatacttgtcatggacgtgttaggttggttaatttcaaaagctgatctagaaaatttgttgcaaccattgtcttctagacctttgcaacacagagtgtccttgtatgttgatgatgtgatcatgtttttgcatccaaaagaatctgatattcaattggttctcaaaattttagagatttttggagaagcttcagggctgaagaccaacatccaaaaaagcagtgtgtacccaattagatgtggggaagaggaagtggcgacccttcaggagtttctcccttgtgagatctcttctttcccctataaatacattggcctgcctttgtctttgaacaagctttccagaaatcaaactcaatacataatcgacaagattgctgaccagctccgtgggtggaaagctgacttgatgactagagctggaagaaaagtgcaagtccaatatgttatgacatgaatgatcatctaccttgcaatggcggtggacttacctccaagagctctcaaggacattgataaaattagaaaaggattcttgtggcgtggaagaaaagaagtcagagggggacactgcctggtggcttggggtagagtgtgcaggccagttgagttgggaggtttgggcattttcaaccttaaagagcttggttgggctctgagaatgagatggttgtggctggcaaaagtggaacctgataaaccttgggcaggactccctatgcattttccttcaaaggtgaaatccttctttcatgctaccattcacacggaaattggcaatggatactcgacactattttgggaagatagatggattcatggacgaaatgtgatggacattgctcccagattgctgctagctgtgccaaggcgaattcaaaacagtagaattgtccatacagctctagcaaatagaagttggctaaatgacatccaaggagctctcactgtggaagtccttgctgattatcttgatctttgggatgctattctcacagtaaacataaatccgcatagagaggacaaacacatttttaggcttgctcataacggcaaatactcggccaaagtagcctacgagagtttattcattgggtcaacatattttgggcattgtgacagggtttggcactcctggtcccccccaaatgcaaatttttcctatggcttgtggcgctgcagaggtgttggacagctgacagacttcagaggagggggggcttgatcgccctgatcagtgccctctttgtgaccaggaaatggaaaccattgaccatctcgtgagctgtgtgtttgcaagaaattaccggttcaggctgctgagaaaggttaacctccagaatttcactcctcatgtctatgaagagaatatcatgctctggtggaaaagatgtagtgatcagttgcatggaattgccagaaaagggctaaactcgcttatcagtctcggcctctggatattgtggaaccatcgaaacgcatgtgttttttacggtctttctccctgtcttaatacagccatcaagaggaccggggaggagagggatctgtgggtgttaggaggggctacaaacttagatcttctaacaaccccaatcccaggtctttagatcaaaatagtttctggttccttttatttatggatgtatttttgtttctttgttttcgaccaccgtaatgggggtcttcttgtactgatccattttggatcctttttttccttccttcttaatgaaaagatgtgcatgtctcttgcgcgttcaaaaaaaaatataggtttactatgaaaatatctagcatgattaatctaatgatgcttatttggtatcatgaatattagtgttttttaatatattttatcaaccatgagattgattgactcctcgaaatgtgagatgtgcacttatattttgggacggagtatttctgaaatccatgtagcaactcaactcacttttgctttaattaaataatccaacataaactaagtctcaaagagtcaaaggtgtctctgccttatgctttaataatgtaataaatgagcagagaagtctccatttgcctaattatgtatgcatctggttgttgtggcacatcaacatgcagaaatgcttccaaatttaagatccacgagagttacattttttaatgctattctcaaaatataatctcatggacaaatagtacacttagtttgagtgcaaaagaaaccatgaaatatacaatgctaggtatttcatttaaaatgtatgaatcaaaagtactgtataataagtcaccagccacagttttatataagattggaggacacagaatattcatattatcaactggcttatatcatgagaaaattaagaaacaag

SEQ ID NO: 53139 - DNA, 3313 bp, Zea Mays
gggctatcagggaagagcgcggctgtcgcagaacctcccaagttatcagacccacatgcacctgtccttgtctcaaagacctcagacagctatgcgtgtgcaccaaacaacttaacaggatctgtccgagtgccccgaggaccccggataaacgacttaccgccaagatcgcaggattaagtaaacacaaatcacacaccaacatttgcagcggaaattctttattacaaaatcgttacaagttacaacatttacaagttataacaagactacaatatatatatcatcggagttgattacaaaagaaattgattcaaaaagattacaatttaaatgtataaaacatttataagttttaaaatacatgctagcttaagtgacagtcctcaataaagaagctaaagatgagatatacttatataagaaggccgagcccaccggcacttagcaccatccacaacagaacaaaattacaacctgaaaaacaacagggaataaaaccctgagtacgcaattactcagcaagacttacccgactaaagaaaagactctcaagggtatgctggtttaaaaaggattcaaggtaaggctcatcaagtttcaaagactcatttttgcagaaaagcttactagtagtggatccttatgccaaaacttttacttcacaaattaagtacttttcctgaatctagatttgcctaatctagagcattcacttgtcctatactagcttcattttagcagctttagtttcacttgttatctacgatgcagggcagtgatccagtcttcatatccgagaagtaacggcgatccgaatcgattaatactcagctgaggatctccaaccacacgacatatgtagcacttaacccttgcatatgtcaacttgccaccgggtttctcaagaccagaacgggttcacgcgacccgagagcacagcactcccccgtccagccgttggcctggttggtacacgttactctcgccatggtgcccgccatgtttccgagagtacagcaccccaccttccagtttcttgccacggagggtacaagctactctcgccatctctccactcccagtgcgtgcgagctgttctggtattggtccgaccgaggctaagcttacccatgacgaggcatgtggccagttaaagggtcctagatcagcaagcctactttcggtgcggtccttaatcgacacagacgggcgacctttcctgctcaacgtctggtctcatattaaaataattctgaaaacctggtacctgtcagaggtaccctactgaaatgatgaagtcatcaaggcctttgataccttcatcattccagcccctttttccttgtaaaaacatgattcatacatcaaaatattttgttccttgtctataagcaggctaagcatatctagcttttcaaatcaggtatcaaggatgataatcaataattcaaggaagttatgcagcaaaggtttaaccattcaactcctaccacctaatgcagcatataagtgataaaatatttttaaaacagcaagaaggtggcaaatgcaccggggcttgcctgggataaacactatgttagtgttgttagatgaatgccacttgatgatcaactttcgttttgacatccgcttagtccatccatcttcaggctcattggccgacatcgtcttgtgggttgttttgatccacacccttcgcttagcacgattttcagctagcgtacctaattagatgtacaatgcacatgtatgaacataataactagtacaatattatatgaagttacatggtataggattaaatattgtctagcaaagcattacaagcaagcataagtaatcactagttacatttaactctacaacaatcaggaccttctagttaattggacctaactcaaaccatagtaactatacataagcaccatattattcttagttagagcaaacactaaattctgatatttaatcaaacaatatgttttgtatacggcgaacacgaccaaactacaaacccttgccaccaaacatcatatatatatatatcaaagaaactggacaccaccaaagcatttactcccttttcaaaacgctaaagtctagagcaagcattgagaaagaaaagaacaaccatatgcaactataagactttattaattaagacaagaactaacaaaatctaggtatccacacaaaagaaaactccaaatagtcatttaaatacttgctgaatttggacagcagaacaacagcaagttgttttattcataacttacacaatattcatccaaaaatagtaaactaagactttttggaaagcttataaagtcctctaaaattttggtattatcatcacaatgagattcgacatttagaaatgtcaaacagtactagacacaatttctgtccagatttggacagaattcgactacttacttcattaattcataactagagtttcagacattcaaatcaggtgattctagactttttagaaagctagtagaattatctacaattcatttataatcatctcaaagtgattcaatgtgtatcaaagtcaattaattcaaccacacattgctgtccagatttttgacagattcagactgtatagtttaaacagctgtaactgggtctctagaccaccaaaacgggtgctccaaaatttgttggaaagcttaagcaaaatactacaattctcctataattactaagagctgattctcagtttaacttgggcaaacaaggtcattttcgaaatctgtacaaaatctggacacattctgaaactggacttggaaaattcataactcctaaactattatacctatgtctgtcaaattttaatacaagcgagataatgaagttatctccaacttttatgtatgacatttctacagaaaatatagtttggttcattaatcaatcagcacggcaaaaacagtacatgcagtccaaaatatcaactatcttgttttaattcatacttagctcctacacattatttgattcgttctctaaatcatcttattagattaactttgcttgacgcctaaataaacatcatataacatagaactctacagtacaccttgaacacctaagaacttaaagtactcgcatatatacctcctcgaattattctccgacttcaaccgaaatcgaagcatcgacactacttgctttcaaataaatttttgggacagcgatgacactcgtacggagcctttaatcgattaaaaaaacatttaaccactcgccacgtacaacaggtgagggttgttaaagtgaagcattgattcac

SEQ ID NO: 53140 - DNA, 1488 bp, Zea Mays
gtttgctctacatgctgggattatcggcaatttacaagtacattgagttttacgatgttatgtctgttccaatggcaattgctttgtctggtcaaccgctgcttggacaagcagtgatggttaagccatctgaggctgaaaagaacttagttcagtcaaatgcgacatcaggtggtgcggcttcaggtggagcaagaaagttgtatgttggcaatcttcactcaaatattactgaagaccaattaagacaggtatttgaaccatttgggcaagtggagcttgtacagcttcctctagatgcaatgactggactgtgcaaaggttatggctttattcagtttgcccggcttgaagatgcaaaagctgcacagagtttgaatgggcagcttgatattgccggcagagttattaaggtttcagctgttactgatcatgtgggagtgcaagctagtggaggctccagagctgctctaatgctcaaattggacaggagtggtacagcaaccagcttaactggtggtattggtgctgctggagtggctgtaccagctacttcagttattggggcagcaggagctgcttctcttctgtcaccaacagtttctgctgttggatcagttcctggggcacctgtgcttcctattaccgctcagaatgtgatcatgtccacacctacagaattcttgttgcttaaaaacatgtttgacccatcattggagacggatcctgattttgacttggatattagagatgatgtccaagatgaatgttccaagtttggtgcagtgaagcatatttttgttgacaaaaatactgcaggcttcgtgtatctgcagttcgatagtgtaactgcagcagggaaggcccaacaagcacttcatggaagatggttcgccggaaagatgattacagcgacatttatgtccgatcaggaatacagtactaagttcccaaacttgtgagcatatgcggggaagagttggtcagacccgcatagttcgttcggagagtttgctagtgctgtatcgttggatggtagactagacgaacaccttattgattgtatgacaggatagtttcagttgcagcgctggtcgtgcgtacaatgtttgatgtactttatttacggcatcacacacagtgaccatcccttattttgtccaccgaatgaaatgccctatgatctccaggcacgttggcatatggtttatttatgtacgatctgttggcactggtacgtatttgtatactaagcaaaagcgttacataatcacaatggtacctttattagtcccctgtcgtgggatatgcggccgcattttggccagctttccaatgtgttccattttatttttgttctcatgatgtttcgacatgttttcatcagtttttcctttcaccaaggtcactatttcattccgtttcattttcatttactccactgatactgtatctagttattttatttggtttatcaagaaattataa

SEQ ID NO: 53141 - DNA, 2575 bp, Zea Mays
atagtagggtttggactatacaattctcgtgtctcgccctcccccgacgcgccgtctagggtttcacagccgcaccccgatccactagagctatggagttcgacgaatacgagtacctggagaaggcggtggagccggctcccccgccggccaatggttccggctccggcgagaaggaccgcggctcgcgtcgccgcgagggcgacgagggccgcatatcgaagcgctcccgctcgggggaggaccgcgagcggggccggcaccgcagcgttcgggaacaccgggatcgggataaggatgacgggaaggagaaggagaggagccgcgatagccgcgggaaggacagagacagggaagggagagaacgggagaaggagaggggggacaggcaccggcccagagagagggaggtggaacgggagcggaggagcctgagccgttcggagcggcgccgtatcgaggaagaggagatggtgagggagctggagatggagcgcgagcgcagcgagcgacaccactatcgcgaccgtgacgtcaggcgtaggaaagatgacggggcagagccagaagttgatccagaaagggaccagaggactgtatttgctttccactatctctgaaggcagacgaaagagatgtttatgagttcttctcaagggctgggaaggttcgtgatgttcgtcttatcatggaccgaaactcaagacgttctaaaggagttgggattacacactgaaattttatagtttgctctacatgctgggattatcggcaatttacaagtaagatggaatattagatcattctgatgtcagtcagcagttgaggacagtttgattccagtgtatttgacaaacacttggtgcaggttctaggcaataaagggggcacccaagaaccaagttcgaaacctctacaatttttgatcaaaatgcctgaagttttctgtgaaaaattgaaatgtcttaacatatgatgccccacttattgttcttcttttcttttttacaggaagacatcttttcttggacgcttcgatgtttgtactaaacatatatctaaatttgcaggtacattgagttttacgatgttatgtctgttccaatggcaattgctttgtctggtcaaccgctgcttggacaagcagtgatggttaagccatctgaggctgaaaagaacttagttcagtcaaatgcgacatcaggtggtgcggcttcaggtggagcaagaaagttgtatgttggcaatcttcactcaaatattactgaagaccaattaagacaggtatttgaaccatttgggcaagtggagcttgtacagcttcctctagatgcaatgactggactgtgcaaaggttatggctttattcagtttgcccggcttgaagatgcaaaagctgcacagagtttgaatgggcagcttgatattgccggcagagttattaaggtttcagctgttactgatcatgtgggagtgcaagctagtggagctactactggagatctagatgatgatgaaggtggaggcttggcgctaaatgcaagctccagagctgctctaatgctcaaattggacaggagtggtacagcaaccagcttaactggtggtattggtgctgctggagtggctgtaccagctacttcagttattggggcagcaggagctgcttctcttctgtcaccaacagtttctgctgttggatcagttcctggggcacctgtgcttcctattaccgctcagaatgtgatcatgtccacacctacagaattcttgttgcttaaaaacatgtttgacccatcattggagacggatcctgattttgacttggatattagagatgatgtccaagatgaatgttccaagtttggtgcagtgaagcatatttttgttgacaaaaatactgcaggcttcgtgtatctgcagttcgatagtgtaactgcagcagggaaggcccaacaagcacttcatggaagatggttcgccggaaagatgattacagcgacatttatgtccgatcaggaatacagtactaagttcccaaacttgtgagcatatgcggggaagagttggtcagacccgcatagttcgttcggagagtttgctagtgctgtatcgttggatggtagactagacgaacaccttattgattgtatgacaggatagtttcagttgcagcgctggtcgtgcgtacaatgtttgatgtactttatttacggcatcacacacagtgaccatcccttattttgtccaccgaatgaaatgccctatgatctccaggcacgttggcatatggtttatttatgtacgatctgttggcactggtacgtatttgtatactaagcaaaagcgttacataatcacaatggtacctttattagtcccctgtcgtgggatatgcggccgcattttggccagctttccaatgtgttccattttatttttgttctcatgatgtttcgacatgttttcatcagtttttcctttcaccaaggtcactatttcattccgtttcattttcatttactccactgatactgtatctagttattttatttggtttatcaagaaattataa

SEQ ID NO: 53142 - DNA, 2199 bp, Zea Mays
atagtagggtttggactatacaattctcgtgtctcgccctcccccgacgcgccgtctagggtttcacagccgcaccccgatccactagagctatggagttcgacgaatacgagtacctggagaaggcggtggagccggctcccccgccggccaatggttccggctccggcgagaaggaccgcggctcgcgtcgccgcgagggcgacgagggccgcatatcgaagcgctcccgctcgggggaggaccgcgagcggggccggcaccgcagcgttcgggaacaccgggatcgggataaggatgacgggaaggagaaggagaggagccgcgatagccgcgggaaggacagagacagggaagggagagaacgggagaaggagaggggggacaggcaccggcccagagagagggaggtggaacgggagcggaggagcctgagccgttcggagcggcgccgtatcgaggaagaggagatggtgagggagctggagatggagcgcgagcgcagcgagcgacaccactatcgcgaccgtgacgtcaggcgtaggaaagatgacggggcagagccagaagttgatccagaaagggaccagaggactgtatttgctttccactatctctgaaggcagacgaaagagatgtttatgagttcttctcaagggctgggaaggttcgtgatgttcgtcttatcatggaccgaaactcaagacgttctaaaggagttgggtacattgagttttacgatgttatgtctgttccaatggcaattgctttgtctggtcaaccgctgcttggacaagcagtgatggttaagccatctgaggctgaaaagaacttagttcagtcaaatgcgacatcaggtggtgcggcttcaggtggagcaagaaagttgtatgttggcaatcttcactcaaatattactgaagaccaattaagacaggtatttgaaccatttgggcaagtggagcttgtacagcttcctctagatgcaatgactggactgtgcaaaggttatggctttattcagtttgcccggcttgaagatgcaaaagctgcacagagtttgaatgggcagcttgatattgccggcagagttattaaggtttcagctgttactgatcatgtgggagtgcaagctagtggagctactactggagatctagatgatgatgaaggtggaggcttggcgctaaatgcaagctccagagctgctctaatgctcaaattggacaggagtggtacagcaaccagcttaactggtggtattggtgctgctggagtggctgtaccagctacttcagttattggggcagcaggagctgcttctcttctgtcaccaacagtttctgctgttggatcagttcctggggcacctgtgcttcctattaccgctcagaatgtgatcatgtccacacctacagaattcttgttgcttaaaaacatgtttgacccatcattggagagatgatgtccaagatgaatgttccaagtttggtgcagtgaagcatatttttgttgacaaaaatactgcaggcttcgtgtatctgcagttcgatagtgtaactgcagcagggaaggcccaacaagcacttcatggaagatggttcgccggaaagatgattacagcgacatttatgtccgatcaggaatacagtactaagttcccaaacttgtgagcatatgcggggaagagttggtcagacccgcatagttcgttcggagagtttgctagtgctgtatcgttggatggtagactagacgaacaccttattgattgtatgacaggatagtttcagttgcagcgctggtcgtgcgtacaatgtttgatgtactttatttacggcatcacacacagtgaccatcccttattttgtccaccgaatgaaatgccctatgatctccaggcacgttggcatatggtttatttatgtacgatctgttggcactggtacgtatttgtatactaagcaaaagcgttacataatcacaatggtacctttattagtcccctgtcgtgggatatgcggccgcattttggccagctttccaatgtgttccattttatttttgttctcatgatgtttcgacatgttttcatcagtttttcctttcaccaaggtcactatttcattccgtttcattttcatttactccactgatactgtatctagttattttatttggtttatcaagaaattataa

SEQ ID NO: 53143 - DNA, 2288 bp, Zea Mays
atagtagggtttggactatacaattctcgtgtctcgccctcccccgacgcgccgtctagggtttcacagccgcaccccgatccactagagctatggagttcgacgaatacgagtacctggagaaggcggtggagccggctcccccgccggccaatggttccggctccggcgagaaggaccgcggctcgcgtcgccgcgagggcgacgagggccgcatatcgaagcgctcccgctcgggggaggaccgcgagcggggccggcaccgcagcgttcgggaacaccgggatcgggataaggatgacgggaaggagaaggagaggagccgcgatagccgcgggaaggacagagacagggaagggagagaacgggagaaggagaggggggacaggcaccggcccagagagagggaggtggaacgggagcggaggagcctgagccgttcggagcggcgccgtatcgaggaagaggagatggtgagggagctggagatggagcgcgagcgcagcgagcgacaccactatcgcgaccgtgacgtcaggcgtaggaaagatgacggggcagagccagaagttgatccagaaagggaccagaggactgtatttgctttccagctatctctgaaggcagacgaaagagatgtttatgagttcttctcaagggctgggaaggttcgtgatgttcgtcttatcatggaccgaaactcaagacgttctaaaggagttgggattacacactgaaattttatagtttgctctacatgctgggattatcggcaatttacaagtacattgagttttacgatgttatgtctgttccaatggcaattgctttgtctggtcaaccgctgcttggacaagcagtgatggttaagccatctgaggctgaaaagaacttagttcagtcaaatgcgacatcaggtggtgcggcttcaggtggagcaagaaagttgtatgttggcaatcttcactcaaatattactgaagaccaattaagacaggtatttgaaccatttgggcaagtggagcttgtacagcttcctctagatgcaatgactggactgtgcaaaggttatggctttattcagtttgcccggcttgaagatgcaaaagctgcacagagtttgaatgggcagcttgatattgccggcagagttattaaggtttcagctgttactgatcatgtgggagtgcaagctagtggagctactactggagatctagatgatgatgaaggtggaggcttggcgctaaatgcaagctccagagctgctctaatgctcaaattggacaggagtggtacagcaaccagcttaactggtggtattggtgctgctggagtggctgtaccagctacttcagttattggggcagcaggagctgcttctcttctgtcaccaacagtttctgctgttggatcagttcctggggcacctgtgcttcctattaccgctcagaatgtgatcatgtccacacctacagaattcttgttgcttaaaaacatgtttgacccatcattggagacggatcctgattttgacttggatattagagatgatgtccaagatgaatgttccaagtttggtgcagtgaagcatatttttgttgacaaaaatactgcaggcttcgtgtatctgcagttcgatagtgtaactgcagcagggaaggcccaacaagcacttcatggaagatggttcgccggaaagatgattacagcgacatttatgtccgatcaggaatacagtactaagttcccaaacttgtgagcatatgcggggaagagttggtcagacccgcatagttcgttcggagagtttgctagtgctgtatcgttggatggtagactagacgaacaccttattgattgtatgacaggatagtttcagttgcagcgctggtcgtgcgtacaatgtttgatgtactttatttacggcatcacacacagtgaccatcccttattttgtccaccgaatgaaatgccctatgatctccaggcacgttggcatatggtttatttatgtacgatctgttggcactggtacgtatttgtatactaagcaaaagcgttacataatcacaatggtacctttattagtcccctgtcgtgggatatgcggccgcattttggccagctttccaatgtgttccattttatttttgttctcatgatgtttcgacatgttttcatcagtttttcctttcaccaaggtcactatttcattccgtttcattttcatttactccactgatactgtatctagttattttatttggtttatcaagaaattataa

SEQ ID NO: 53144 - DNA, 2565 bp, Zea Mays
atagtagggtttggactatacaattctcgtgtctcgccctcccccgacgcgccgtctagggtttcacagccgcaccccgatccactagagctatggagttcgacgaatacgagtacctggagaaggcggtggagccggctcccccgccggccaatggttccggctccggcgagaaggaccgcggctcgcgtcgccgcgagggcgacgagggccgcatatcgaagcgctcccgctcgggggaggaccgcgagcggggccggcaccgcagcgttcgggaacaccgggatcgggataaggatgacgggaaggagaaggagaggagccgcgatagccgcgggaaggacagagacagggaagggagagaacgggagaaggagaggggggacaggcaccggcccagagagagggaggtggaacgggagcggaggagcctgagccgttcggagcggcgccgtatcgaggaagaggagatggtgagggagctggagatggagcgcgagcgcagcgagcgacaccactatcgcgaccgtgacgtcaggcgtaggaaagatgacggggcagagccagaagttgatccagaaagggaccagaggactgtatttgctttccagctatctctgaaggcagacgaaagagatgtttatgagttcttctcaagggctgggaaggttcgtgatgttcgtcttatcatggaccgaaactcaagacgttctaaaggagttgggattacacactgaaattttatagtttgctctacatgctgggattatcggcaatttacaagtaagatggaatattagatcattctgatgtcagtcagcagttgaggacagtttgattccagtgtatttgacaaacacttggtgcaggttctaggcaataaagggggcacccaagaaccaagttcgaaacctctacaatttttgatcaaaatgcctgaagttttctgtgaaaaattgaaatgtcttaacatatgatgccccacttattgttcttcttttcttttttacaggaagacatcttttcttggacgcttcgatgtttgtactaaacatatatctaaatttgcaggtacattgagttttacgatgttatgtctgttccaatggcaattgctttgtctggtcaaccgctgcttggacaagcagtgatggttaagccatctgaggctgaaaagaacttagttcagtcaaatgcgacatcaggtggtgcggcttcaggtggagcaagaaagttgtatgttggcaatcttcactcaaatattactgaagaccaattaagacaggtatttgaaccatttgggcaagtggagcttgtacagcttcctctagatgcaatgactggactgtgcaaaggttatggctttattcagtttgcccggcttgaagatgcaaaagctgcacagagtttgaatgggcagcttgatattgccggcagagttattaaggtttcagctgttactgatcatgtgggagtgcaagctagtggagctactactggagatctagatgatgatgaaggcgctaaatgcaagctccagagctgctctaatgctcaaattggacaggagtggtacagcaaccagcttaactggtggtattggtgctgctggagtggctgtaccagctacttcagttattggggcagcaggagctgcttctcttctgtcaccaacagtttctgctgttggatcagttcctggggcacctgtgcttcctattaccgctcagaatgtgatcatgtccacacctacagaattcttgttgcttaaaaacatgtttgacccatcattggagacggatcctgattttgacttggatattagagatgatgtccaagatgaatgttccaagtttggtgcagtgaagcatatttttgttgacaaaaatactgcaggcttcgtgtatctgcagttcgatagtgtaactgcagcagggaaggcccaacaagcacttcatggaagatggttcgccggaaagatgattacagcgacatttatgtccgatcaggaatacagtactaagttcccaaacttgtgagcatatgcggggaagagttggtcagacccgcatagttcgttcggagagtttgctagtgctgtatcgttggatggtagactagacgaacaccttattgattgtatgacaggatagtttcagttgcagcgctggtcgtgcgtacaatgtttgatgtactttatttacggcatcacacacagtgaccatcccttattttgtccaccgaatgaaatgccctatgatctccaggcacgttggcatatggtttatttatgtacgatctgttggcactggtacgtatttgtatactaagcaaaagcgttacataatcacaatggtacctttattagtcccctgtcgtgggatatgcggccgcattttggccagctttccaatgtgttccattttatttttgttctcatgatgtttcgacatgttttcatcagtttttcctttcaccaaggtcactatttcattccgtttcattttcatttactccactgatactgtatctagttattttatttggtttatcaagaaattataa

SEQ ID NO: 53145 - DNA, 2175 bp, Zea Mays
atagtagggtttggactatacaattctcgtgtctcgccctcccccgacgcgccgtctagggtttcacagccgcaccccgatccactagagctatggagttcgacgaatacgagtacctggagaaggcggtggagccggctcccccgccggccaatggttccggctccggcgagaaggaccgcggctcgcgtcgccgcgagggcgacgagggccgcatatcgaagcgctcccgctcgggggaggaccgcgagcggggccggcaccgcagcgttcgggaacaccgggatcgggataaggatgacgggaaggagaaggagaggagccgcgatagccgcgggaaggacagagacagggaagggagagaacgggagaaggagaggggggacaggcaccggcccagagagagggaggtggaacgggagcggaggagcctgagccgttcggagcggcgccgtatcgaggaagaggagatggtgagggagctggagatggagcgcgagcgcagcgagcgacaccactatcgcgaccgtgacgtcaggcgtaggaaagatgacggggcagagccagaagttgatccagaaagggaccagaggactgtatttgctttccagctatctctgaaggcagacgaaagagatgtttatgagttcttctcaagggctgggaaggttcgtgatgttcgtcttatcatggaccgaaactcaagacgttctaaaggagttgggtacattgagttttacgatgttatgtctgttccaatggcaattgctttgtctggtcaaccgctgcttggacaagcagtgatggttaagccatctgaggctgaaaagaacttagttcagtcaaatgcgacatcaggtggtgcggcttcaggtggagcaagaaagttgtatgttggcaatcttcactcaaatattactgaagaccaattaagacaggtatttgaaccatttgggcaagtggagcttgtacagcttcctctagatgcaatgactggactgtgcaaaggttatggctttattcagtttgcccggcttgaagatgcaaaagctgcacagagtttgaatgggcagcttgatattgccggcagagttattaaggtttcagctgttactgatcatgtgggagtgcaagctagtggaggctccagagctgctctaatgctcaaattggacaggagtggtacagcaaccagcttaactggtggtattggtgctgctggagtggctgtaccagctacttcagttattggggcagcaggagctgcttctcttctgtcaccaacagtttctgctgttggatcagttcctggggcacctgtgcttcctattaccgctcagaatgtgatcatgtccacacctacagaattcttgttgcttaaaaacatgtttgacccatcattggagacggatcctgattttgacttggatattagagatgatgtccaagatgaatgttccaagtttggtgcagtgaagcatatttttgttgacaaaaatactgcaggcttcgtgtatctgcagttcgatagtgtaactgcagcagggaaggcccaacaagcacttcatggaagatggttcgccggaaagatgattacagcgacatttatgtccgatcaggaatacagtactaagttcccaaacttgtgagcatatgcggggaagagttggtcagacccgcatagttcgttcggagagtttgctagtgctgtatcgttggatggtagactagacgaacaccttattgattgtatgacaggatagtttcagttgcagcgctggtcgtgcgtacaatgtttgatgtactttatttacggcatcacacacagtgaccatcccttattttgtccaccgaatgaaatgccctatgatctccaggcacgttggcatatggtttatttatgtacgatctgttggcactggtacgtatttgtatactaagcaaaagcgttacataatcacaatggtacctttattagtcccctgtcgtgggatatgcggccgcattttggccagctttccaatgtgttccattttatttttgttctcatgatgtttcgacatgttttcatcagtttttcctttcaccaaggtcactatttcattccgtttcattttcatttactccactgatactgtatctagttattttatttggtttatcaagaaattataa

SEQ ID NO: 53146 - DNA, 775 bp, Zea Mays
atcgctcctgtgctcatgtcgtgtgatgcccatgtgttgtgtgccagaattccaactatttcgtgtgtcagccacctgtttgttgtattgactcagtgggaaaaaagggcgttcaactgttctaatagaggcaaaatcttcaagtacagacgtagatttccgacagcccaaacgttcaaacttcaaacaaacgagcgttttggaatctgtatcctgtgctgccttacatgtgtaggtacttgatgggattccttctcttgtaccaaaagatggaaagttactcgacgaccaagaagtgaaatcagaacaagagtccagcactagggattcttctggttgaatccttgtctatgcaacatctaattgaagcaatatgttgtagtaaatcgacggtaataaaaccaagtgcttcttgtcggaaatcgtcaccatattgccctagaggatgaggtgcaccgtttctgttgagaaggctaatatggttgtcttgaaagacaacaatgaaattggcaaacatagtttctgctttattttcttttactggaataactattctgttcatatactgcatctgatagtacaaaataatagttggactcataattcaaagttatcatgctctatatgtgttcttttagaaaaaaaaacagttggcttgcttttctttagagtagcaattagctgaacctgccaaaatatgtttttgttagccctgatttgggtggatttccccgaaccagccaatgatattatattggtaaaagtaaaaaataaa

SEQ ID NO: 53147 - DNA, 1396 bp, Zea Mays
caaaagcgccggcgccgttcatctccccccccctctctctctctctctctctccccttcctctcgagttcgagtctcgatatcggcaaagcaggggacctacctattgtgcggctgcggcgcccgtcgttgattcatccgctggctcgcgctcgccggtggcgccggggaacagccagctcgagctcgctttcgcttcgcatcatgggagccgctgggttctgagctgcgcggccggcctgtttcagctgagatgaaactggaaaagaatcaaagttctgcatcacctgccacttcgaattttagagtgaatagcaattgccatggggtctggatcagggacactgaagcagaagaaacgagtgaaacatgcaaagaacaaatacttgaaacctggtgccctcgctcagattcgctatagcaggagtacaagcagggacattgggaagaaaaggattttgttgaatgcgaaagatgagctggagttacctccacagcctgagactccaaggactccaaatgcatctgtgtcctgtggtgattcagggcttgaatcacttcctcttgatttgctgatcaagatcatgtgttgcttgcaccatgacgaactgaaagttgttttccatgtttcaaaaaggattcgaaaagcagttcaacttgccagggagtttcatttcaactacactactccagacagaagcagacaggagttgctcctgaatagaacccctcttccaacggagcattggcctttcttaagaatcaacggcaaggacgtgcacgtttccaccccaaggacaccgagggctccaaaacacgctgctcgcctttcacgcctcaagctggtcgacgtgaagccaatcacggctgttctcttcccggagtcttcgacaccttttccttcgaagcgtctccgacgctgggtgccaccgtggctgccaagacatgcgtgtaaagctgcttcatcgcccagagttttacggtacgaggaggagctttgcgaagcggtggcacagaacaagcttctctgaagatccaaaaagtgcatcgctttcatctttagtgtatagcttatctatgtcaagcccatagtagtatgagttttgtctgccagctcctaaactggcatcttagattattgtggtcaggttaggttttagactagtgctagactatcttataccagtcataagtatggagtttgcttttattccatgagtctgtatatatcacataataaagtgagcttgaaatcagattggatccttcaagagcagagggcctgtgaggcctggatgaactctgtttgccgaatagtttgtcaactaccatcgctttgtcctgatctgtgtacttttgaattgggccgcgtttaggagtagagttagtattgcggt

SEQ ID NO: 53148 - DNA, 1413 bp, Zea Mays
caaaagcgccggcgccgttcatctccccccccctctctctctctctctctctccccttcctctcgagttcgagtctcgatatcggcaaagcaggggacctacctattgtgcggctgcggcgcccgtcgttgattcatccgctggctcgcgctcgccggtggcgccggggaacagccagctcgagctcgctttcgcttcgcatcatgggagccgctgggttctgagctgcgcggccggcctgtttcagctgagatgaaactggaaaagaatcaaagttctgcatcacctgccacttcgaattttagagtgaatagcaattgccatggggtctggatcagggacactgaagcagaagaaacgagtgaaacatgcaaagaacaaatacttgaaacctggtgccctcgctcagattcgctatagcaggagtacaagcagggacattgggaagaaaaggattttgttgaatgcgaaagatgagctggagttacctccacagcctgagggcaggtattgccaaagactccaaggactccaaatgcatctgtgtcctgtggtgattcagggcttgaatcacttcctcttgatttgctgatcaagatcatgtgttgcttgcaccatgacgaactgaaagttgttttccatgtttcaaaaaggattcgaaaagcagttcaacttgccagggagtttcatttcaactacactactccagacagaagcagacaggagttgctcctgaatagaacccctcttccaacggagcattggcctttcttaagaatcaacggcaaggacgtgcacgtttccaccccaaggacaccgagggctccaaaacacgctgctcgcctttcacgcctcaagctggtcgacgtgaagccaatcacggctgttctcttcccggagtcttcgacaccttttccttcgaagcgtctccgacgctgggtgccaccgtggctgccaagacatgcgtgtaaagctgcttcatcgcccagagttttacggtacgaggaggagctttgcgaagcggtggcacagaacaagcttctctgaagatccaaaaagtgcatcgctttcatctttagtgtatagcttatctatgtcaagcccatagtagtatgagttttgtctgccagctcctaaactggcatcttagattattgtggtcaggttaggttttagactagtgctagactatcttataccagtcataagtatggagtttgcttttattccatgagtctgtatatatcacataataaagtgagcttgaaatcagattggatccttcaagagcagagggcctgtgaggcctggatgaactctgtttgccgaatagtttgtcaactaccatcgctttgtcctgatctgtgtacttttgaattgggccgcgtttaggagtagagttagtattgcggt

SEQ ID NO: 53149 - DNA, 1480 bp, Zea Mays
caaaagcgccggcgccgttcatctccccccccctctctctctctctctctctccccttcctctcgagttcgagtctcgatatcggcaaagcaggggacctacctattgtgcggctgcggcgcccgtcgttgattcatccgctggctcgcgctcgccggtggcgccggggaacagccagctcgagctcgctttcgcttcgcatcatgggagccgctgggttctgagctgcgcggccggcctgtttcagctgagatgaaactggaaaagaatcaaagttctgcatcacctgccacttcgaattttagagtgaatagcaattgccatggggtctggatcagggacactgaagcagaagaaacgagtgaaacatgcaaagaacaaatacttgaaacctggtgccctcgctcagattcgctatagcaggagtacaagcagggacattgggaagaaaaggattttgttgaatgcgaaagatgagctggagttacctccacagcctgaggttctcttagaaagcaatacactagttttgtcccctgcaagactcaattttgagccatttggtagtaatacagggcaggtattgccaaagactccaaggactccaaatgcatctgtgtcctgtggtgattcagggcttgaatcacttcctcttgatttgctgatcatgtgttgcttgcaccatgacgaactgaaagttgttttccatgtttcaaaaaggattcgaaaagcagttcaacttgccagggagtttcatttcaactacactactccagacagaagcagacaggagttgctcctgaatagaacccctcttccaacggagcattggcctttcttaagaatcaacggcaaggacgtgcacgtttccaccccaaggacaccgagggctccaaaacacgctgctcgcctttcacgcctcaagctggtcgacgtgaagccaatcacggctgttctcttcccggagtcttcgacaccttttccttcgaagcgtctccgacgctgggtgccaccgtggctgccaagacatgcgtgtaaagctgcttcatcgcccagagttttacggtacgaggaggagctttgcgaagcggtggcacagaacaagcttctctgaagatccaaaaagtgcatcgctttcatctttagtgtatagcttatctatgtcaagcccatagtagtatgagttttgtctgccagctcctaaactggcatcttagattattgtggtcaggttaggttttagactagtgctagactatcttataccagtcataagtatggagtttgcttttattccatgagtctgtatatatcacataataaagtgagcttgaaatcagattggatccttcaagagcagagggcctgtgaggcctggatgaactctgtttgccgaatagtttgtcaactaccatcgctttgtcctgatctgtgtacttttgaattgggccgcgtttaggagtagagttagtattgcggt

SEQ ID NO: 53150 - DNA, 2075 bp, Zea Mays
cgatcctccgctagtctatccgcgggtcccgcccgttccgcgtcctcagctgctgctcgacctggttttggcgccaacccccgtcgaaattttttggttttccctccacctcgccccgactcccccacgccctagagtacaaaagcgccggcgccgttcatctccccccccctctctctctctctctctctccccttcctctcgagttcgagtctcgatatcggcaaagcaggggacctacctattgtgcggctgcggcgcccgtcgttgattcatccgctggctcgcgctcgccggtggcgccggggaacagccagctcgagctcgctttcgcttcgcatcatgggagccgctgggttctgagctgcgcggccggcctgtttcagctgagatgaaactggaaaagaatcaaagttctgcatcacctgccacttcgaattttagagtgaatagcaattgccatggggtctggatcagggacactgaagcagaagaaacgagtgaaacatgcaaagaacaaatacttgaaacctggtgccctcgctcagattcgctatagcaggagtacaagcagggacattgggaagaaaaggattttgttgaatgcgaaagatgagctggagttacctccacagcctgagggcaggtattgccaaagactccaaggactccaaatgcatctgtgtcctgtggtgattcagggcttgaatcacttcctcttgatttgctgatcaagatcatgtgttgcttgcaccatgacgaactgaaagttgttttccatgtttcaaaaaggattcgaaaagcagtaagtataatctcttagctgttgcattctttatttgtaaattaggtaaaagcctcgtttttttttctcattttcttgtctgcattgaaatgatgacatattttcaaagaacagtaattgatgtcatctaggtgcggaaaaaagatagcattgccttttagcatatctctgacatatatactcttctcattctctgctcattaacaatgattgatgatgttatctgatattggaaaatgcaaaaagtgttgctttctattccattattaaatgacgtagtgcatagatgcaaaaaaatgttgcgtcttcaattagtagtttcccaccttgggattatgaactagcgagtcattacattcttgtcaattctgtcactatttttgcatgcccgactatttatttattcacttaatttgcattcttgacattctacatgtttattttgcatttccattagtcaacttatgtattcctcccttttatttctattttcaagctcacctttaacggtaaatcgaactaggttcaacttgccagggagtttcatttcaactacactactccagacagaagcagacaggagttgctcctgaatagaacccctcttccaacggagcattggcctttcttaagaatcaacggcaaggacgtgcacgtttccaccccaaggacaccgagggctccaaaacacgctgctcgcctttcacgcctcaagctggtcgacgtgaagccaatcacggctgttctcttcccggagtcttcgacaccttttccttcgaagcgtctccgacgctgggtgccaccgtggctgccaagacatgcgtgtaaagctgcttcatcgcccagagttttacggtacgaggaggagctttgcgaagcggtggcacagaacaagcttctctgaagatccaaaaagtgcatcgctttcatctttagtgtatagcttatctatgtcaagcccatagtagtatgagttttgtctgccagctcctaaactggcatcttagattattgtggtcaggttaggttttagactagtgctagactatcttataccagtcataagtatggagtttgcttttattccatgagtctgtatatatcacataataaagtgagcttgaaatcagattggatccttcaagagcagagggcctgtgaggcctggatgaactctgtttgccgaatagtttgtcaactaccatcgctttgtcctgatctgtgtacttttgaattgggccgcgtttaggagtagagttagtattgcggt

SEQ ID NO: 53151 - DNA, 4151 bp, Zea Mays
aagctagcaacggcacgagttggctcgaaccgaggcctccggcagtccggcccactcggccactcccgtcgcggctcgcgaggagagagaagagtaaaagagcaccttcttctccgcgtccccatcccaccacacctccggatcagcagcgaagtagcctgcactacgccggtgcctagtagtagtagcaccgctccggctccactgttgaacgttgaacggaagccagaccggcccgcaccttgatgcccgctcctatggcggcttccaccttccccgtcgccccgctgcacgcgccgccgctggtgcgcccccgggtcgtccctccttcccccaccttcggctgctgctgccgctgctccgctccgcgcggggggctcaccttgcgcccgcaggcttgcgctccacgccgccgctgcaaccccgcgatccgcccggtgaggttctgtgcggaagttggttcggtgtggcccgtggtgctcactcgatcgatcagaagggggtttcaaaagggtataagtgtcgcaagggtggatgacaatgctgctggtcaagtcagtttaggtgatgacaacgaggatttagaccatatcaccaacgaaacccttcgtaccacaataaggaaaagcaaggaagtgctggcaaggcacaagatcataatgaatcagatatcagaaaagaagcagctcatctcaactatactagacagttccattcataatgagcaagagccactcagtggtcagagtgatggttccttatcaaacctgaatgcaattgcaaagggcacagagattggttatgaccatcagacataccataataggtctttacagcaatatgaatttgacaccacttatggagaatccatctacgatcagaacacatactatgaaagttcagaagacgacggcactgatttcagtgagaattatcagtataaaagttttcctagagctactcgtagtgtgtatgaactagaagaagataatggtatgaaacaaggctatgtggtacaactaagtcaagcaagtggacatgagcagtcagttaacgagggaacaaatgacaatgcgtctgaagttgatgttatgaatgtcatattggtagccgcagagtgtgctccttggtccaaaacaggtgggcttggggatgttgctggagctttgcctaaggctttggccaagagaggtcatcgtgtcatggtgtgccttttgtgagctattgtgtctgaaagagatttaactaagctcctactagttggaagtggtgcaagttaacatggaagataaacaggatggttgtaaagtccataaaatcactcattcatcctgtagatggttgcaaaaagatttttttgaaaatgcaggagacgtgtttttttatattaagaacaaaaaaagggataagaacccttacacacaccaacacaaaatcagttcagttcacatggttacagagatcaccaatcctaagccttctactgttccccatccggcacaagggaaaatcactttagttcaactaaagaggattgacaattaagtttgtataggtacctgacattgtggccactataaaaccatattgagtggacaaccataattaaccagctgtgcgagtcatgtgctctatggcctccttatacaaagtgggttttcacaaaagactaagatctattcatgatatgttcagcagaactcatatacgtttgggccaaaaatatttgagctatatagaagcatttttctgcagctcaagttgcctaaattctaagcagtgtacctggatattctgtttttcagttttagggctagattgcaatgttgtgctctgctaccttcactgtgcaatctagttaattgtgggagcctactattctattaaacttttgctttatggttccagtaaaaacataccttcatataattgttatgtccaacattaaaaagtacgctcttgaaaagccacaataccaataggcacagtagtttttctaaaaagtaggagctgtattgttaatcttggttagtgcctcatatgggaataactcatgcagtacattccaaagcaaaccagtgttcttatttgagagaacataggctatgtttctgtgatttttggttagaacaaaactaaattttcaatagctacagttggagaagcatttaaatactaaacacataatcattttttatattttttgttaggtagtagttccaaaatacggtgactatgaggaaccacaagagataggagagccaaggagctaccacgttgcagggcaggatatggaagtaaagtattatcatgcatacatagatggtgtggattttgttttcattgacaatcctgtcttccactatgttcaaagtgaaatttatggtggggaccaaactgacatctggaaacgaatggttttgttgtgcaaagcagctgtagaggttcaatggtatgttccatgtggtggcttctgctacggtgatggaaatcttgtgtttattgcaaatgattggcatactgcacttctacctgtttatttaaaggcatactatcgtgacaatggttttatgccatatgcccgttcagttcttgtgatacacaatatagcacatcagctggtattagagctgctgatcgtttgcttaccgttagtcatggttatgcatgggagctcaaaacacctgatggcggctggggccttcatagtatcattaatgaaaacgattggaaattccagggtattgtaaatggtattgatactgctgattggaatcctaggcatgatgtccatctacaatctgatgggtacaccaactattctctagaaaccgttcagactggtaaagcacagtgcaaggaagcactacagaaagagcttggactccctgttcgtggcgatgttccggtcattgcttttattggacggctggaccatcaaaaaggtgtagatctgatagcagaggcaatgccgtggattgctggtcaggatgtacaattaattatgttgggtactggaagacaagaccttgaagatacattgaggaggcttgagagccagcattatgacagggtccggggctgggttgggttctctgtccggttggctcatcggatgacagcaggggctgatatactattgatgccatcaaggtttgagccatgtgggctgaaccagctatatgccatgatgtacgggactgttcctgtagttcatgctgttggtggtctccgcgacacagtccaacattataatccctatgaggaggttggagttggatggacttttgagaaagcagaggcaaacagaatgatcgatgccctagggcactgcttgaacacatacagaaattactggagcagttgggaaggtatccaacgtagagggatgatgcaggacctaagctgggataacgctgctaaactctacgaggaagttcttcttgccgccaaatatcagtggtgactgttgttgaactgtccaaggaactgttgatatttgtcattcatagacctgaaggctttctgtcgcatagaagtcaccgactgtttcaattcttttggtgactgcttcacacagctgctgcatgctttgtcctgaattttgcaggacggtgtgcgtcgcaacagccaaattttttttgttgttgccagttcctaataatcgcatcagatgtgaatgtgaattctgagtctacctcctggacaaacacagtggatgaggcttttgctggaaacaggttaatgctggaggaaagattgaggggaagcgtcgtgcactttttgcaagtgtttacgaattcatttgttctacagggagagctcatttagacgctttggtacaggagggtggtagatagcagagaaactgatgctttgtatcttgagtagttttgttgtatctctaaattaggatacttgttacaatgttcagttcttcatatttttttccgtgcatatcctgtagatgatttagtgttccggtcttccgaatgatcgtaaaaaaggggtttgcaggttgttgagaataatatataattatgaaagggcatcggaatccctgaacaatactgaagttctctgaaagaaccgaggccatgaatgtatgtttcggaagtctacgactcacctagggttgccgtgcaagtttt

SEQ ID NO: 53152 - DNA, 4260 bp, Zea Mays
aagctagcaacggcacgagttggctcgaaccgaggcctccggcagtccggcccactcggccactcccgtcgcggctcgcgaggagagagaagagtaaaagagcaccttcttctccgcgtccccatcccaccacacctccggatcagcagcgaagtagcctgcactacgccggtgcctagtagtagtagcaccgctccggctccactgttgaacgttgaacggaagccagaccggcccgcaccttgatgcccgctcctatggcggcttccaccttccccgtcgccccgctgcacgcgccgccgctggtgcgcccccgggtcgtccctccttcccccaccttcggctgctgctgccgctgctccgctccgcgcggggggctcaccttgcgcccgcaggcttgcgctccacgccgccgctgcaaccccgcgatccgcccggtgaggttctgtgcggaagttggttcggtgtggcccgtggtgctcactcgatcgatcagaagggggtttcaaaagggtataagtgtcgcaagggtggatgacaatgctgctggtcaagtcagtttaggtgatgacaacgaggatttagaccatatcaccaacgaaacccttcgtaccacaataaggaaaagcaaggaagtgctggcaaggcacaagatcataatgaatcagatatcagaaaagaagcagctcatctcaactatactagacagttccattcataatgagcaagagccactcagtggtcagagtgatggttccttatcaaacctgaatgcaattgcaaagggcacagagattggttatgaccatcagacataccataataggtctttacagcaatatgaatttgacaccacttatggagaatccatctacgatcagaacacatactatgaaagttcagaagacgacggcactgatttcagtgagaattatcagtataaaagttttcctagagctactcgtagtgtgtatgaactagaagaagataatggtatgaaacaaggctatgtggtacaactaagtcaagcaagtggacatgagcagtcagttaacgagggaacaaatgacaatgcgtctgaagttgatgttatgaatgtcatattggtagccgcagagtgtgctccttggtccaaaacaggtgggcttggggatgttgctggagctttgcctaaggctttggccaagagaggtcatcgtgtcatggtgtgccttttgtgagctattgtgtctgaaagagatttaactaagctcctactagttggaagtggtgcaagttaacatggaagataaacaggatggttgtaaagtccataaaatcactcattcatcctgtagatggttgcaaaaagatttttttgaaaatgcaggagacgtgtttttttatattaagaacaaaaaaagggataagaacccttacacacaccaacacaaaatcagttcagttcacatggttacagagatcaccaatcctaagccttctactgttccccatccggcacaagggaaaatcactttagttcaactaaagaggattgacaattaagtttgtataggtacctgacattgtggccactataaaaccatattgagtggacaaccataattaaccagctgtgcgagtcatgtgctctatggcctccttatacaaagtgggttttcacaaaagactaagatctattcatgatatgttcagcagaactcatatacgtttgggccaaaaatatttgagctatatagaagcatttttctgcagctcaagttgcctaaattctaagcagtgtacctggatattctgtttttcagttttagggctagattgcaatgttgtgctctgctaccttcactgtgcaatctagttaattgtgggagcctactattctattaaacttttgctttatggttccagtaaaaacataccttcatataattgttatgtccaacattaaaaagtacgctcttgaaaagccacaataccaataggcacagtagtttttctaaaaagtaggagctgtattgttaatcttggttagtgcctcatatgggaataactcatgcagtacattccaaagcaaaccagtgttcttatttgagagaacataggctatgtttctgtgatttttggttagaacaaaactaaattttcaatagctacagttggagaagcatttaaatactaaacacataatcattttttatattttttgttaggtagtagttccaaaatacggtgactatgaggaaccacaagagataggagagccaaggagctaccacgttgcagggcaggatatggaagtaaagtattatcatgcatacatagatggtgtggattttgttttcattgacaatcctgtcttccactatgttcaaagtgaaatttatggtggggaccaaactgacatctggaaacgaatggttttgttgtgcaaagcagctgtagaggttcaatggtatgttccatgtggtggcttctgctacggtgatggaaatcttgtgtttattgcaaatgattggcatactgcacttctacctgtttatttaaaggcatactatcgtgacaatggttttatgccatatgcccgttcagttcttgtgatacacaatatagcacatcagggccgtggcccgatagatgatttcaggtacctggatttgcctggtcattacatggatcagttcaaactttatgatccattcggaggtgatcatctaaacatttttgcagctggtattagagctgctgatcgtttgcttaccgttagtcatggttatgcatgggagctcaaaacacctgatggcggctggggccttcatagtatcattaatgaaaacgattggaaattccagggtattgtaaatggtattgatactgctgattggaatcctaggcatgatgtccatctacaatctgatgggtacaccaactattctctagaaaccgttcagactggtaaagcacagtgcaaggaagcactacagaaagagcttggactccctgttcgtggcgatgttccggtcattgcttttattggacggctggaccatcaaaaaggtgtagatctgatagcagaggcaatgccgtggattgctggtcaggatgtacaattaattatgttgggtactggaagacaagaccttgaagatacattgaggaggcttgagagccagcattatgacagggtccggggctgggttgggttctctgtccggttggctcatcggatgacagcaggggctgatatactattgatgccatcaaggtttgagccatgtgggctgaaccagctatatgccatgatgtacgggactgttcctgtagttcatgctgttggtggtctccgcgacacagtccaacattataatccctatgaggaggttggagttggatggacttttgagaaagcagaggcaaacagaatgatcgatgccctagggcactgcttgaacacatacagaaattactggagcagttgggaaggtatccaacgtagagggatgatgcaggacctaagctgggataacgctgctaaactctacgaggaagttcttcttgccgccaaatatcagtggtgactgttgttgaactgtccaaggaactgttgatatttgtcattcatagacctgaaggctttctgtcgcatagaagtcaccgactgtttcaattcttttggtgactgcttcacacagctgctgcatgctttgtcctgaattttgcaggacggtgtgcgtcgcaacagccaaattttttttgttgttgccagttcctaataatcgcatcagatgtgaatgtgaattctgagtctacctcctggacaaacacagtggatgaggcttttgctggaaacaggttaatgctggaggaaagattgaggggaagcgtcgtgcactttttgcaagtgtttacgaattcatttgttctacagggagagctcatttagacgctttggtacaggagggtggtagatagcagagaaactgatgctttgtatcttgagtagttttgttgtatctctaaattaggatacttgttacaatgttcagttcttcatatttttttccgtgcatatcctgtagatgatttagtgttccggtcttccgaatgatcgtaaaaaaggggtttgcaggttgttgagaataatatataattatgaaagggcatcggaatccctgaacaatactgaagttctctgaaagaaccgaggccatgaatgtatgtttcggaagtctacgactcacctagggttgccgtgcaagtttt

SEQ ID NO: 53153 - DNA, 3241 bp, Zea Mays
aagctagcaacggcacgagttggctcgaaccgaggcctccggcagtccggcccactcggccactcccgtcgcggctcgcgaggagagagaagagtaaaagagcaccttcttctccgcgtccccatcccaccacacctccggatcagcagcgaagtagcctgcactacgccggtgcctagtagtagtagcaccgctccggctccactgttgaacgttgaacggaagccagaccggcccgcaccttgatgcccgctcctatggcggcttccaccttccccgtcgccccgctgcacgcgccgccgctggtgcgcccccgggtcgtccctccttcccccaccttcggctgctgctgccgctgctccgctccgcgcggggggctcaccttgcgcccgcaggcttgcgctccacgccgccgctgcaaccccgcgatccgcccggtgaggttctgtgcggaagttggttcggtgtggcccgtggtgctcactcgatcgatcagaagggggtttcaaaagggtataagtgtcgcaagggtggatgacaatgctgctggtcaagtcagtttaggtgatgacaacgaggatttagaccatatcaccaacgaaacccttcgtaccacaataaggaaaagcaaggaagtgctggcaaggcacaagatcataatgaatcagatatcagaaaagaagcagctcatctcaactatactagacagttccattcataatgagcaagagccactcagtggtcagagtgatggttccttatcaaacctgaatgcaattgcaaagggcacagagattggttatgaccatcagacataccataataggtctttacagcaatatgaatttgacaccacttatggagaatccatctacgatcagaacacatactatgaaagttcagaagacgacggcactgatttcagtgagaattatcagtataaaagttttcctagagctactcgtagtgtgtatgaactagaagaagataatggtatgaaacaaggctatgtggtacaactaagtcaagcaagtggacatgagcagtcagttaacgagggaacaaatgacaatgcgtctgaagttgatgttatgaatgtcatattggtagccgcagagtgtgctccttggtccaaaacaggtgggcttggggatgttgctggagctttgcctaaggctttggccaagagaggtcatcgtgtcatggtagtagttccaaaatacggtgactatgaggaaccacaagagataggagagccaaggagctaccacgttgcagggcaggatatggaagtaaagtattatcatgcatacatagatggtgtggattttgttttcattgacaatcctgtcttccactatgttcaaagtgaaatttatggacatctggaaacgaatggttttgttgtgcaaagcagctgtagaggttcaatggtatgttccatgtggtggcttctgctacggtgatggaaatcttgtgtttattgcaaatgattggcatactgcacttctacctgtttatttaaaggcatactatcgtgacaatggttttatgccatatgcccgttcagttcttgtgatacacaatatagcacatcagggccgtggcccgatagatgatttcaggtacctggatttgcctggtcattacatggatcagttcaaactttatgatccattcggaggtgatcatctaaacatttttgcagctggtattagagctgctgatcgtttgcttaccgttagtcatggttatgcatgggagctcaaaacacctgatggcggctggggccttcatagtatcattaatgaaaacgattggaaattccagggtattgtaaatggtattgatactgctgattggaatcctaggcatgatgtccatctacaatctgatgggtacaccaactattctctagaaaccgttcagactggtaaagcacagtgcaaggaagcactacagaaagagcttggactccctgttcgtggcgatgttccggtcattgcttttattggacggctggaccatcaaaaaggtgtagatctgatagcagaggcaatgccgtggattgctggtcaggatgtacaattaattatgttgggtactggaagacaagaccttgaagatacattgaggaggcttgagagccagcattatgacagggtccggggctgggttgggttctctgtccggttggctcatcggatgacagcaggggctgatatactattgatgccatcaaggtttgagccatgtgggctgaaccagctatatgccatgatgtacgggactgttcctgtagttcatgctgttggtggtctccgcgacacagtccaacattataatccctatgaggaggttggagttggatggacttttgagaaagcagaggcaaacagaatgatcgatgccctagggcactgcttgaacacatacagaaattactggagcagttgggaaggtatccaacgtagagggatgatgcaggacctaagctgggataacgctgctaaactctacgaggaagttcttcttgccgccaaatatcagtggtgactgttgttgaactgtccaaggaactgttgatatttgtcattcatagacctgaaggctttctgtcgcatagaagtcaccgactgtttcaattcttttggtgactgcttcacacagctgctgcatgctttgtcctgaattttgcaggacggtgtgcgtcgcaacagccaaattttttttgttgttgccagttcctaataatcgcatcagatgtgaatgtgaattctgagtctacctcctggacaaacacagtggatgaggcttttgctggaaacaggttaatgctggaggaaagattgaggggaagcgtcgtgcactttttgcaagtgtttacgaattcatttgttctacagggagagctcatttagacgctttggtacaggagggtggtagatagcagagaaactgatgctttgtatcttgagtagttttgttgtatctctaaattaggatacttgttacaatgttcagttcttcatatttttttccgtgcatatcctgtagatgatttagtgttccggtcttccgaatgatcgtaaaaaaggggtttgcaggttgttgagaataatatataattatgaaagggcatcggaatccctgaacaatactgaagttctctgaaagaaccgaggccatgaatgtatgtttcggaagtctacgactcacctagggttgccgtgcaagtttt

SEQ ID NO: 53154 - DNA, 3350 bp, Zea Mays
aagctagcaacggcacgagttggctcgaaccgaggcctccggcagtccggcccactcggccactcccgtcgcggctcgcgaggagagagaagagtaaaagagcaccttcttctccgcgtccccatcccaccacacctccggatcagcagcgaagtagcctgcactacgccggtgcctagtagtagtagcaccgctccggctccactgttgaacgttgaacggaagccagaccggcccgcaccttgatgcccgctcctatggcggcttccaccttccccgtcgccccgctgcacgcgccgccgctggtgcgcccccgggtcgtccctccttcccccaccttcggctgctgctgccgctgctccgctccgcgcggggggctcaccttgcgcccgcaggcttgcgctccacgccgccgctgcaaccccgcgatccgcccggtgaggttctgtgcggaagttggttcggtgtggcccgtggtgctcactcgatcgatcagaagggggtttcaaaagggtataagtgtcgcaagggtggatgacaatgctgctggtcaagtcagtttaggtgatgacaacgaggatttagaccatatcaccaacgaaacccttcgtaccacaataaggaaaagcaaggaagtgctggcaaggcacaagatcataatgaatcagatatcagaaaagaagcagctcatctcaactatactagacagttccattcataatgagcaagagccactcagtggtcagagtgatggttccttatcaaacctgaatgcaattgcaaagggcacagagattggttatgaccatcagacataccataataggtctttacagcaatatgaatttgacaccacttatggagaatccatctacgatcagaacacatactatgaaagttcagaagacgacggcactgatttcagtgagaattatcagtataaaagttttcctagagctactcgtagtgtgtatgaactagaagaagataatggtatgaaacaaggctatgtggtacaactaagtcaagcaagtggacatgagcagtcagttaacgagggaacaaatgacaatgcgtctgaagttgatgttatgaatgtcatattggtagccgcagagtgtgctccttggtccaaaacaggtgggcttggggatgttgctggagctttgcctaaggctttggccaagagaggtcatcgtgtcatggtgtgccttttgtgagctattgtgtctgaaagagatttaactaagctcctactagttggaagtggtgcaagttaacatggaagataaacaggatggtagtagttccaaaatacggtgactatgaggaaccacaagagataggagagccaaggagctaccacgttgcagggcaggatatggaagtaaagtattatcatgcatacatagatggtgtggattttgttttcattgacaatcctgtcttccactatgttcaaagtgaaatttatggtggggaccaaactgacatctggaaacgaatggttttgttgtgcaaagcagctgtagaggttcaatggtatgttccatgtggtggcttctgctacggtgatggaaatcttgtgtttattgcaaatgattggcatactgcacttctacctgtttatttaaaggcatactatcgtgacaatggttttatgccatatgcccgttcagttcttgtgatacacaatatagcacatcagggccgtggcccgatagatgatttcaggtacctggatttgcctggtcattacatggatcagttcaaactttatgatccattcggaggtgatcatctaaacatttttgcagctggtattagagctgctgatcgtttgcttaccgttagtcatggttatgcatgggagctcaaaacacctgatggcggctggggccttcatagtatcattaatgaaaacgattggaaattccagggtattgtaaatggtattgatactgctgattggaatcctaggcatgatgtccatctacaatctgatgggtacaccaactattctctagaaaccgttcagactggtaaagcacagtgcaaggaagcactacagaaagagcttggactccctgttcgtggcgatgttccggtcattgcttttattggacggctggaccatcaaaaaggtgtagatctgatagcagaggcaatgccgtggattgctggtcaggatgtacaattaattatgttgggtactggaagacaagaccttgaagatacattgaggaggcttgagagccagcattatgacagggtccggggctgggttgggttctctgtccggttggctcatcggatgacagcaggggctgatatactattgatgccatcaaggtttgagccatgtgggctgaaccagctatatgccatgatgtacgggactgttcctgtagttcatgctgttggtggtctccgcgacacagtccaacattataatccctatgaggaggttggagttggatggacttttgagaaagcagaggcaaacagaatgatcgatgccctagggcactgcttgaacacatacagaaattactggagcagttgggaaggtatccaacgtagagggatgatgcaggacctaagctgggataacgctgctaaactctacgaggaagttcttcttgccgccaaatatcagtggtgactgttgttgaactgtccaaggaactgttgatatttgtcattcatagacctgaaggctttctgtcgcatagaagtcaccgactgtttcaattcttttggtgactgcttcacacagctgctgcatgctttgtcctgaattttgcaggacggtgtgcgtcgcaacagccaaattttttttgttgttgccagttcctaataatcgcatcagatgtgaatgtgaattctgagtctacctcctggacaaacacagtggatgaggcttttgctggaaacaggttaatgctggaggaaagattgaggggaagcgtcgtgcactttttgcaagtgtttacgaattcatttgttctacagggagagctcatttagacgctttggtacaggagggtggtagatagcagagaaactgatgctttgtatcttgagtagttttgttgtatctctaaattaggatacttgttacaatgttcagttcttcatatttttttccgtgcatatcctgtagatgatttagtgttccggtcttccgaatgatcgtaaaaaaggggtttgcaggttgttgagaataatatataattatgaaagggcatcggaatccctgaacaatactgaagttctctgaaagaaccgaggccatgaatgtatgtttcggaagtctacgactcacctagggttgccgtgcaagtttt

SEQ ID NO: 53155 - DNA, 3190 bp, Zea Mays
aagctagcaacggcacgagttggctcgaaccgaggcctccggcagtccggcccactcggccactcccgtcgcggctcgcgaggagagagaagagtaaaagagcaccttcttctccgcgtccccatcccaccacacctccggatcagcagcgaagtagcctgcactacgccggtgcctagtagtagtagcaccgctccggctccactgttgaacgttgaacggaagccagaccggcccgcaccttgatgcccgctcctatggcggcttccaccttccccgtcgccccgctgcacgcgccgccgctggtgcgcccccgggtcgtccctccttcccccaccttcggctgctgctgccgctgctccgctccgcgcggggggctcaccttgcgcccgcaggcttgcgctccacgccgccgctgcaaccccgcgatccgcccggtgaggttctgtgcggaagttggttcggtgtggcccgtggtgctcactcgatcgatcagaagggggtttcaaaagggtataagtgtcgcaagggtggatgacaatgctgctggtcaagtcagtttaggtgatgacaacgaggatttagaccatatcaccaacgaaacccttcgtaccacaataaggaaaagcaaggaagtgctggcaaggcacaagatcataatgaatcagatatcagaaaagaagcagctcatctcaactatactagacagttccattcataatgagcaagagccactcagtggtcagagtgatggttccttatcaaacctgaatgcaattgcaaagggcacagagattggttatgaccatcagacataccataataggtctttacagcaatatgaatttgacaccacttatggagaatccatctacgatcagaacacatactatgaaagttcagaagacgacggcactgatttcagtgagaattatcagtataaaagttttcctagagctactcgtagtgtgtatgaactagaagaagataatggtatgaaacaaggctatgtggtacaactaagtcaagcaagtggacatgagcagtcagttaacgagggaacaaatgacaatgcgtctgaagttgatgttatgaatgtcatattggtagccgcagagtgtgctccttggtccaaaacaggtagtagttccaaaatacggtgactatgaggaaccacaagagataggagagccaaggagctaccacgttgcagggcaggatatggaagtaaagtattatcatgcatacatagatggtgtggattttgttttcattgacaatcctgtcttccactatgttcaaagtgaaatttatggtggggaccaaactgacatctggaaacgaatggttttgttgtgcaaagcagctgtagaggttcaatggtatgttccatgtggtggcttctgctacggtgatggaaatcttgtgtttattgcaaatgattggcatactgcacttctacctgtttatttaaaggcatactatcgtgacaatggttttatgccatatgcccgttcagttcttgtgatacacaatatagcacatcagggccgtggcccgatagatgatttcaggtacctggatttgcctggtcattacatggatcagttcaaactttatgatccattcggaggtgatcatctaaacatttttgcagctggtattagagctgctgatcgtttgcttaccgttagtcatggttatgcatgggagctcaaaacacctgatggcggctggggccttcatagtatcattaatgaaaacgattggaaattccagggtattgtaaatggtattgatactgctgattggaatcctaggcatgatgtccatctacaatctgatgggtacaccaactattctctagaaaccgttcagactggtaaagcacagtgcaaggaagcactacagaaagagcttggactccctgttcgtggcgatgttccggtcattgcttttattggacggctggaccatcaaaaaggtgtagatctgatagcagaggcaatgccgtggattgctggtcaggatgtacaattaattatgttgggtactggaagacaagaccttgaagatacattgaggaggcttgagagccagcattatgacagggtccggggctgggttgggttctctgtccggttggctcatcggatgacagcaggggctgatatactattgatgccatcaaggtttgagccatgtgggctgaaccagctatatgccatgatgtacgggactgttcctgtagttcatgctgttggtggtctccgcgacacagtccaacattataatccctatgaggaggttggagttggatggacttttgagaaagcagaggcaaacagaatgatcgatgccctagggcactgcttgaacacatacagaaattactggagcagttgggaaggtatccaacgtagagggatgatgcaggacctaagctgggataacgctgctaaactctacgaggaagttcttcttgccgccaaatatcagtggtgactgttgttgaactgtccaaggaactgttgatatttgtcattcatagacctgaaggctttctgtcgcatagaagtcaccgactgtttcaattcttttggtgactgcttcacacagctgctgcatgctttgtcctgaattttgcaggacggtgtgcgtcgcaacagccaaattttttttgttgttgccagttcctaataatcgcatcagatgtgaatgtgaattctgagtctacctcctggacaaacacagtggatgaggcttttgctggaaacaggttaatgctggaggaaagattgaggggaagcgtcgtgcactttttgcaagtgtttacgaattcatttgttctacagggagagctcatttagacgctttggtacaggagggtggtagatagcagagaaactgatgctttgtatcttgagtagttttgttgtatctctaaattaggatacttgttacaatgttcagttcttcatatttttttccgtgcatatcctgtagatgatttagtgttccggtcttccgaatgatcgtaaaaaaggggtttgcaggttgttgagaataatatataattatgaaagggcatcggaatccctgaacaatactgaagttctctgaaagaaccgaggccatgaatgtatgtttcggaagtctacgactcacctagggttgccgtgcaagtttt

SEQ ID NO: 53156 - DNA, 2640 bp, Zea Mays
aagctagcaacggcacgagttggctcgaaccgaggcctccggcagtccggcccactcggccactcccgtcgcggctcgcgaggagagagaagagtaaaagagcaccttcttctccgcgtccccatcccaccacacctccggatcagcagcgaagtagcctgcactacgccggtgcctagtagtagtagcaccgctccggctccactgttgaacgttgaacggaagccagaccggcccgcaccttgatgcccgctcctatggcggcttccaccttccccgtcgccccgctgcacgcgccgccgctggtgcgcccccgggtcgtccctccttcccccaccttcggctgctgctgccgctgctccgctccgcgcggggggctcaccttgcgcccgcaggcttgcgctccacgccgccgctgcaaccccgcgatccgcccggtgaggttctgtgcggaagttggttcggtgtggcccgtggtgctcactcgatcgatcagaagggggtttcaaaagggtataagtgtcgcaagggtggatgacaatgctgctggtcaagtcagtttaggtgatgacaacgaggatttagaccatatcaccaacgaaacccttcgtaccacaataaggaaaagcaaggaagtgctggcaaggcacaagatcataatgaatcagatatcagaaaagaagcagctcatctcaactatactagacagttccattcataatgagcaagagccactcagtggtcagagtgatggttccttatcaaacctgaatgcaattgcaaagggcacagagattggttatgaccatcagacataccataataggtctttacagcaatatgaatttgacaccacttatggagaatccatctacgatcagaacacatactatgaaagttcagaagacgacggcactgatttcagtgagaattatcagtataaaagttttcctagagctactcgtagtgtgtatgaactagaagaagataatggtatgaaacaaggctatgtggtacaactaagtcaagcaagtggacatgagcagtcagttaacgagggaacaaatgacaatgcgtctgaagttgatgttatgaatgtcatattggtagccgcagagtgtgctccttggtccaaaacaggtgggcttggggatgttgctggagctttgcctaaggctttggccaagagaggtcatcgtgtcatggtgtgccttttgtgagctattgtgtctgaaagagatttaactaagctcctactagttggaagtggtgcaagttaacatggaagataaacaggatggttgtaaagtccataaaatcactcattcatcctgtagatggttgcaaaaagatttttttgaaaatgcaggagacgtgtttttttatattaagaacaaaaaaagggataagaacccttacacacaccaacacaaaatcagttcagttcacatggttacagagatcaccaatcctaagccttctactgttccccatccggcacaagggaaaatcactttagttcaactaaagaggattgacaattaagtttgtataggtacctgacattgtggccactataaaaccatattgagtggacaaccataattaaccagctgtgcgagtcatgtgctctatggcctccttatacaaagtgggttttcacaaaagactaagatctattcatgatatgttcagcagaactcatatacgtttgggccaaaaatatttgagctatatagaagcatttttctgcagctcaagttgcctaaattctaagcagtgtacctggatattctgtttttcagttttagggctagattgcaatgttgtgctctgctaccttcactgtgcaatctagttaattgtgggagcctactattctattaaacttttgctttatggttccagtaaaaacataccttcatataattgttatgtccaacattaaaaagtacgctcttgaaaagccacaataccaataggcacagtagtttttctaaaaagtaggagctgtattgttaatcttggttagtgcctcatatgggaataactcatgcagtacattccaaagcaaaccagtgttcttatttgagagaacataggctatgtttctgtgatttttggttagaacaaaactaaattttcaatagctacagttggagaagcatttaaatactaaacacataatcattttttatattttttgttaggtagtagttccaaaatacggtgactatgaggaaccacaagagataggagagccaaggagctaccacgttgcagggcaggatatggaagtaaagtattatcatgcatacatagatggtgtggattttgttttcattgacaatcctgtcttccactatgttcaaagtgaaatttatggtggggaccaaactgacatctggaaacgaatggttttgttgtgcaaagcagctgtagaggttcaatggtatgttccatgtggtggcttctgctacggtgatggaaatcttgtgtttattgcaaatgattggcatactgcacttctacctgtttatttaaaggcatactatcgtgacaatggttttatgccatatgcccgttcagttcttgtgatacacaatatagcacatcagtgtccaggctccaaggattagg

SEQ ID NO: 53157 - DNA, 1683 bp, Zea Mays
aagctagcaacggcacgagttggctcgaaccgaggcctccggcagtccggcccactcggccactcccgtcgcggctcgcgaggagagagaagagtaaaagagcaccttcttctccgcgtccccatcccaccacacctccggatcagcagcgaagtagcctgcactacgccggtgcctagtagtagtagcaccgctccggctccactgttgaacgttgaacggaagccagaccggcccgcaccttgatgcccgctcctatggcggcttccaccttccccgtcgccccgctgcacgcgccgccgctggtgcgcccccgggtcgtccctccttcccccaccttcggctgctgctgccgctgctccgctccgcgcggggggctcaccttgcgcccgcaggcttgcgctccacgccgccgctgcaaccccgcgatccgcccggtgaggttctgtgcggaagttggttcggtgtggcccgtggtgctcactcgatcgatcagaagggggtttcaaaagggtataagtgtcgcaagggtggatgacaatgctgctggtcaagtcagtttaggtgatgacaacgaggatttagaccatatcaccaacgaaacccttcgtaccacaataaggaaaagcaaggaagtgctggcaaggcacaagatcataatgaatcagatatcagaaaagaagcagctcatctcaactatactagacagttccattcataatgagcaagagccactcagtggtcagagtgatggttccttatcaaacctgaatgcaattgcaaagggcacagagattggttatgaccatcagacataccataataggtctttacagcaatatgaatttgacaccacttatggagaatccatctacgatcagaacacatactatgaaagttcagaagacgacggcactgatttcagtgagaattatcagtataaaagttttcctagagctactcgtagtgtgtatgaactagaagaagataatggtatgaaacaaggctatgtggtacaactaagtcaagcaagtggacatgagcagtcagttaacgagggaacaaatgacaatgcgtctgaagttgatgttatgaatgtcatattggtagccgcagagtgtgctccttggtccaaaacaggtgggcttggggatgttgctggagctttgcctaaggctttggccaagagaggtcatcgtgtcatggtagtagttccaaaatacggtgactatgaggaaccacaagagataggagagccaaggagctaccacgttgcagggcaggatatggaagtaaagtattatcatgcatacatagatggtgtggattttgttttcattgacaatcctgtcttccactatgttcaaagtgaaatttatggtggggaccaaactgacatctggaaacgaatggttttgttgtgcaaagcagctgtagaggttcaatggtatgttccatgtggtggcttctgctacggtgatggaaatcttgtgtttattgcaaatgattggcatactgcacttctacctgtttatttaaaggcatactatcgtgacaatggttttatgccatatgcccgttcagttcttgtgatacacaatatagcacatcaggagaactgtgcatcattatattaagaagaatgaaagaaaaaacaagatggaccagtacaactgacacaac

SEQ ID NO: 53158 - DNA, 1429 bp, Zea Mays
aagctagcaacggcacgagttggctcgaaccgaggcctccggcagtccggcccactcggccactcccgtcgcggctcgcgaggagagagaagagtaaaagagcaccttcttctccgcgtccccatcccaccacacctccggatcagcagcgaagtagcctgcactacgccggtgcctagtagtagtagcaccgctccggctccactgttgaacgttgaacggaagccagaccggcccgcaccttgatgcccgctcctatggcggcttccaccttccccgtcgccccgctgcacgcgccgccgctggtgcgcccccgggtcgtccctccttcccccaccttcggctgctgctgccgctgctccgctccgcgcggggggctcaccttgcgcccgcaggcttgcgctccacgccgccgctgcaaccccgcgatccgcccggtgaggttctgtgcggaagttggttcggtgtggcccgtggtgctcactcgatcgatcagaagggggtttcaaaagggtataagtgtcgcaagggtggatgacaatgctgctggtcaagtcagtttaggtgatgacaacgaggatttagaccatatcaccaacgaaacccttcgtaccacaataaggaaaagcaaggaagtgctggcaaggcacaagatcataatgaatcagatatcagaaaagaagcagctcatctcaactatactagacagttccattcataatgagcaagagccactcagtggtcagagtgatggttccttatcaaacctgaatgcaattgcaaagggcacagagattggttatgaccatcagacataccataataggtctttacagcaatatgaatttgacaccacttatggagaatccatctacgatcagaacacatactatgaaagttcagaagacgacggcactgatttcagtgagaattatcagtataaaagttttcctagagctactcgtagtgtgtatgaactagaagaagataatggtatgaaacaaggctatgtggtacaactaagtcaagcaagtggacatgagcagtcagttaacgagggaacaaatgacaatgcgtctgaagttgatgttatgaatgtcatattggtagccgcagagtgtgctccttggtccaaaacaggacatctggaaacgaatggttttgttgtgcaaagcagctgtagaggttcaatggtatgttccatgtggtggcttctgctacggtgatggaaatcttgtgtttattgcaaatgattggcatactgcacttctacctgtttatttaaaggcatactatcgtgacaatggttttatgccatatgcccgttcagttcttgtgatacacaatatagcacatcaggagaactgtgcatcattatattaagaagaatgaaagaaaaaacaagatggaccagtacaactgacacaac

SEQ ID NO: 53159 - DNA, 2688 bp, Zea Mays
aagctagcaacggcacgagttggctcgaaccgaggcctccggcagtccggcccactcggccactcccgtcgcggctcgcgaggagagagaagagtaaaagagcaccttcttctccgcgtccccatcccaccacacctccggatcagcagcgaagtagcctgcactacgccggtgcctagtagtagtagcaccgctccggctccactgttgaacgttgaacggaagccagaccggcccgcaccttgatgcccgctcctatggcggcttccaccttccccgtcgccccgctgcacgcgccgccgctggtgcgcccccgggtcgtccctccttcccccaccttcggctgctgctgccgctgctccgctccgcgcggggggctcaccttgcgcccgcaggcttgcgctccacgccgccgctgcaaccccgcgatccgcccggtgaggttctgtgcggaagttggttcggtgtggcccgtggtgctcactcgatcgatcagaagggggtttcaaaagggtataagtgtcgcaagggtggatgacaatgctgctggtcaagtcagtttaggtgatgacaacgaggatttagaccatatcaccaacgaaacccttcgtaccacaataaggaaaagcaaggaagtgctggcaaggcacaagatcataatgaatcagatatcagaaaagaagcagctcatctcaactatactagacagttccattcataatgagcaagagccactcagtggtcagagtgatggttccttatcaaacctgaatgcaattgcaaagggcacagagattggttatgaccatcagacataccataataggtctttacagcaatatgaatttgacaccacttatggagaatccatctacgatcagaacacatactatgaaagttcagaagacgacggcactgatttcagtgagaattatcagtataaaagttttcctagagctactcgtagtgtgtatgaactagaagaagataatggtatgaaacaaggctatgtggtacaactaagtcaagcaagtggacatgagcagtcagttaacgagggaacaaatgacaatgcgtctgaagttgatgttatgaatgtcatattggtagccgcagagtgtgctccttggtccaaaacaggtgggcttggggatgttgctggagctttgcctaaggctttggccaagagaggtcatcgtgtcatggtgtgccttttgtgagctattgtgtctgaaagagatttaactaagctcctactagttggaagtggtgcaagttaacatggaagataaacaggatggttgtaaagtccataaaatcactcattcatcctgtagatggttgcaaaaagatttttttgaaaatgcaggagacgtgtttttttatattaagaacaaaaaaagggataagaacccttacacacaccaacacaaaatcagttcagttcacatggttacagagatcaccaatcctaagccttctactgttccccatccggcacaagggaaaatcactttagttcaactaaagaggattgacaattaagtttgtataggtacctgacattgtggccactataaaaccatattgagtggacaaccataattaaccagctgtgcgagtcatgtgctctatggcctccttatacaaagtgggttttcacaaaagactaagatctattcatgatatgttcagcagaactcatatacgtttgggccaaaaatatttgagctatatagaagcatttttctgcagctcaagttgcctaaattctaagcagtgtacctggatattctgtttttcagttttagggctagattgcaatgttgtgctctgctaccttcactgtgcaatctagttaattgtgggagcctactattctattaaacttttgctttatggttccagtaaaaacataccttcatataattgttatgtccaacattaaaaagtacgctcttgaaaagccacaataccaataggcacagtagtttttctaaaaagtaggagctgtattgttaatcttggttagtgcctcatatgggaataactcatgcagtacattccaaagcaaaccagtgttcttatttgagagaacataggctatgtttctgtgatttttggttagaacaaaactaaattttcaatagctacagttggagaagcatttaaatactaaacacataatcattttttatattttttgttaggtagtagttccaaaatacggtgactatgaggaaccacaagagataggagagccaaggagctaccacgttgcagggcaggatatggaagtaaagtattatcatgcatacatagatggtgtggattttgttttcattgacaatcctgtcttccactatgttcaaagtgaaatttatggtggggaccaaactgacatctggaaacgaatggttttgttgtgcaaagcagctgtagaggttcaatggtatgttccatgtggtggcttctgctacggtgatggaaatcttgtgtttattgcaaatgattggcatactgcacttctacctgtttatttaaaggcatactatcgtgacaatggttttatgccatatgcccgttcagttcttgtgatacacaatatagcacatcaggagaactgtgcatcattatattaagaagaatgaaagaaaaaacaagatggaccagtacaactgacacaac

SEQ ID NO: 53160 - DNA, 985 bp, Zea Mays
ccttaaacaaagaggcatttttgtccacgacgccctgcctcgcggcctgagctggcacatctccactcctcgccctctctactgtcctgtctcctcactccaccggtccaacccaacaaccagccccgccgaattccaaggtctattcttctgcccctcgggcgttcccgagatcgcatttccgagttcctgatcacgggaaacccttctggggacccgggaattcctccctcagatccgcgctttccttggaggcgtcgctgaatagctcggttctttgcgcaggtttcccgcgtgcggcggcgagcggggcgggacgtgccggggacggtggttgggttggattggattggatcggatcggtgccgcccgttgaccagagcgtaaaccagagatgggcaagggcggcggctgcgtccccagcaagaagcgccagccgccggccgccgcgccttcttcgtcgtccgccgcggcggcggtgccgcgcgaggcgcccgaggaggaggcggccgccgcggtcgggcgaaagctgcggctctacatcgtgttctactcgatgtacgggcacgtggagtccctggcacggcgcgcagcggctggcgccggcgcagtggacggcctggaggccgtgctgcggcgggtccccgagacgctcccgccggaggtgctggagaagatgcaggcgccggtcaaggaccccgcggtccccgtgatcgcgtcggccgcggagctgcaggaggctgacggagtgttgtttggcttcccgacgaggtacggcgccatggctgcgcaaatgaaggccttcttcgactccaccggctcgctctgggaggcgcagaagctcgctgggaagcccgccgggttcttcgtcagcaccggaacgcagggcggggggcaggagaccacggcgtgtttaactgaaatacatatctatggcgatactataaccctgatcagttaactggcattaaggatttgtaacgtt

SEQ ID NO: 53161 - DNA, 772 bp, Zea Mays
gaggactgctgttcaccccctcgcagttgcttctagaggacgcaaccacgcgcgcgctctagaagaaacgaccggatccatttccctcgactgcgttgtgtcgcgccgccgctatccaatccaacaccgatgttgtgccgtgccgccgccatcgggagtcgggacgacgtccgccgagtggctgtggcaaggcgacgacccagcgcatgacaagtagaggaggcgaggagcagccgccgaccgccgtctgccgaggcaatcgccgccatcggaagtcgggaccgcgtccgccgagtggctgtggcaacgacccaacgcaggatgagcaccgtcgaccgccgttcaccgaggcaacgacacaaccatgcagagtcattgcttcatcactgaaaagaagtttgaacggtgtgaactcaatggattaggagactatagtgttgtgactccacacaacctttgtcagttcttttaccaaattttcctttgacaaactgatcaaggatttgaagatgctaagtagaatgattttgtttgctctttccaccagaccgttagactcaggtgccttatatatatgcaaagtgtacaattgttcccacttagccacaaaaacagtataaatattttagagtcaatctggatgccattgtcaatgttaaagctttggatactccaaagtaacacatgatattttactagaagaacttatggatcattgctaaagttattatggctaagaccttcacttcaatccatttggtgaatccatttg

SEQ ID NO: 53162 - DNA, 2097 bp, Zea Mays
attgagcccaatgccatcaaagggtccgagcctccgagggaagaaaggtccacacaggacactcctccttcgtctttctccttcctcgccgctctctgctgcattcgcgaacacgcatcgaccctacgactacgagtagcgagagaggattgatggcggcgcagctgcggaggtgatccaagatctgtactacgccttgaggacaaagggaggtttgacccccaaggaggaggagacgctcctggcttgcaatttacttcctggtgtttatttcatcgtgggttcagtactgggcactttcgcgatgttgttgggttcccacaaaggactcaaattgcttgggcgtccacctaattctccattaagatctttgactgtttatggtaaatctcaaggatatttgacctggtggtgatccctgtacaataattcatgcaaaggcatatccaagctatgtttagatgagagacaaattaataatttctgcatcattaatagtgaatgtggctcttttgtattgatggcaggatgagtgagtcaacatgattaggaaatacctacaatgaaacctacacagttaacaatgatgataattattcacatatctaatttctatctaacattgtgctggtaggccccagatgaacagttagccataaacaatactgctatagtactattggaatgtaataccttttttataaacattcaatacttatacatcttaaaagaggaaacacaggtagtatgtagaatacaatgacattaaatgtatgttactgattcattatgtatgatagtttttatgttcaaagtaatttgttgccactatttgctcatgaagttataacagatccatgctgtagttgaaagcaaacagatagcttgttaggttaacagagcagtagatggaaccatttggcataaaatattggatgcatcgacccttcaacattgatacgttgctgaagaatattttttttcatcctttcattgcaaatgtgaatttattgaagctacttctcaggctacggttttattgtcggaaaggcctgtgctaatgaaacctggcatcaattgcctgaactgcttttagacagggaagaaggacgcatgaagacagagctagctaaaataatactcaataagcatagtgatgacatatacctggttgaagttgtgagaagacacttttttgtcgagcatctgttcgatgatctgcatcaaggtcaaccacttttcaggtggcgcctacgacatacgtatgttgacagcacctttgtagaaagaacgaaggaagttgaagccagcaactctgatgatgtggctagatcaatttcaagagagacaattacaaacactacaccatttggagaaatgatggaggattcactggcttgtatactgggttctcccggatgcaacatggaaagcaacaatcccccagaaaagacagctaatgtcctgacgcgaagtgatctgcgagctcgcagaagaggtcgcaggcatcatcggcatgctgatgactagtttcctattgtgaatgttgtgtagaagtgctgtggaataccctagaccattaccattttatttgggcctcatgccccacagttaatctgctgtgcctggtcaaaatttctaggctggacaagagctgcttttgtaagctgggcaatcctgtatcgtgatgtatcccatggcccctgcattcttcacaaagcaaccaataagacggtatagacaagcgaaacgacgctgggtggtgtgatgtttgcagttcgtggtccacaggctgccggagcatacagcagttcattttcaattcttattatcatatattatggaagaagaaatgaacatcttcaggattgaacagtgtcgcgaaattgtagatgatggttccacaatcccaatgggaccgacagacaaagagacatgctgcttcctgctgtgagttttgtattgcagacgacactgtttatgtggagtttgaattctgttgtgagttttgcacggtagacgacactgtttatgtggagcttgagatgtgagaaggatgagtaagctattagagatagtttaacaccattaatttct

SEQ ID NO: 53163 - DNA, 2924 bp, Zea Mays
attgagcccaatgccatcaaagggtccgagcctccgagggaagaaaggtccacacaggacactcctccttcgtctttctccttcctcgccgctctctgctgcattcgcgaacacgcatcgaccctacgactacgagtagcgagagaggattgatggcggcgcagctgcggaggtgatccaagatctgtactacgccttgaggacaaagggaggtttgacccccaaggaggaggagacgctcctggcttgcaatttacttcctggtgtttatttcatcgtgggttcagtactgggcactttcgcgatgttgttgggttcccacaaaggttgctcactccctcagctctcgatttaatatttgataatgttaaagcatgccattcctgagaaagcgataatattgtgtcaacaatctgcgagcaccaaattgtgttaaaaaacatgccaggagcatgactgcggccttgtatatcaaggttaaaacctaaaatagtattcaatagccatactcgtgcaaaccatccaggatggggattggggaggacagtatctctagataaagttcaaagaaccgtgggtcatctggcaagcaacattattccattattatggctgtattttgtgagctccttccctaaatgttgcaccatggatgctgttgttatgctgctatcaagtgggcacaccagggtaaacgaattatattctgcttttgttattgctcctacttttcaaggatatttgtatgcttaccctgcgccggcattctgccattgttattactgttaaaggatatctgtatgtccctaccctatccttttactagccacggtgaatatgttacttttggagcaatttggcttaatttatgtttacaaatctcgctatgctactgtgcatttgatgcatgtatgcaggcacagctccctcacatttgagtgtagccttgggccattcaaagtgctggtgcctcccgtgatttgttcctgagtgcaggcatgcttgagttgtagagcttgctgtagcaatattatataaatagtggtgcttgaacattatagttaatgttttcctaatcagtaaaacaagtctctatatggtcaatgcatttattggagagggacaatgcaagtcatcagattttgactgttgattcaattaagtgtcgtataaacaaaccgcaaaactgtcatttttaaatttttcttgcagacaatagctattggtaccaaatgcatgcttacgaaattctgttgtgcaggactcaaattgcttgggcgtccacctaattctccattaagatctttgactgtttatggtaaatctcaaggatatttgacctggtggtgatccctgtacaataattcatgcaaaggcatatccaagctatgtttagatgagagacaaattaataatttctgcatcattaatagtgaatgtggctcttttgtattgatggcaggatgagtgagtcaacatgattaggaaatacctacaatgaaacctacacagttaacaatgatgataattattcacatatctaatttctatctaacattgtgctggtaggccccagatgaacagttagccataaacaatactgctatagtactattggaatgtaataccttttttataaacattcaatacttatacatcttaaaagaggaaacacaggtagtatgtagaatacaatgacattaaatgtatgttactgattcattatgtatgatagtttttatgttcaaagtaatttgttgccactatttgctcatgaagttataacagatccatgctgtagttgaaagcaaacagatagcttgttaggttaacagagcagtagatggaaccatttggcataaaatattggatgcatcgacccttcaacattgatacgttgctgaagaatattttttttcatcctttcattgcaaatgtgaatttattgaagctacttctcaggctacggttttattgtcggaaaggcctgtgctaatgaaacctggcatcaattgcctgaactgcttttagacagggaagaaggacgcatgaagacagagctagctaaaatgtggcgcctacgacatacgtatgttgacagcacctttgtagaaagaacgaaggaagttgaagccagcaactctgatgatgtggctagatcaatttcaagagagacaattacaaacactacaccatttggagaaatgatggaggattcactggcttgtatactgggttctcccggatgcaacatggaaagcaacaatcccccagaaaagacagctaatgtcctgacgcgaagtgatctgcgagctcgcagaagaggtcgcaggcatcatcggcatgctgatgactagtttcctattgtgaatgttgtgtagaagtgctgtggaataccctagaccattaccattttatttgggcctcatgccccacagttaatctgctgtgcctggtcaaaatttctaggctggacaagagctgcttttgtaagctgggcaatcctgtatcgtgatgtatcccatggcccctgcattcttcacaaagcaaccaataagacggtatagacaagcgaaacgacgctgggtggtgtgatgtttgcagttcgtggtccacaggctgccggagcatacagcagttcattttcaattcttattatcatatattatggaagaagaaatgaacatcttcaggattgaacagtgtcgcgaaattgtagatgatggttccacaatcccaatgggaccgacagacaaagagacatgctgcttcctgctgtgagttttgtattgcagacgacactgtttatgtggagtttgaattctgttgtgagttttgcacggtagacgacactgtttatgtggagcttgagatgtgagaaggatgagtaagctattagagatagtttaacaccattaatttct

SEQ ID NO: 53164 - DNA, 3056 bp, Zea Mays
aaacgaaagccttatcagtaaccgattgagcccaatgccatcaaagggtccgagcctccgagggaagaaaggtccacacaggacactcctccttcgtctttctccttcctcgccgctctctgctgcattcgcgaacacgcatcgaccctacgactacgagtagcgagagaggattgatggcggcgcagctgcggaggtgatccaagatctgtactacgccttgaggacaaagggaggtttgacccccaaggaggaggagacgctcctggcttgcaatttacttcctggtgtttatttcatcgtgggttcagtactgggcactttcgcgatgttgttgggttcccacaaaggttgctcactccctcagctctcgatttaatatttgataatgttaaagcatgccattcctgagaaagcgataatattgtgtcaacaatctgcgagcaccaaattgtgttaaaaaacatgccaggagcatgactgcggccttgtatatcaaggttaaaacctaaaatagtattcaatagccatactcgtgcaaaccatccaggatggggattggggaggacagtatctctagataaagttcaaagaaccgtgggtcatctggcaagcaacattattccattattatggctgtattttgtgagctccttccctaaatgttgcaccatggatgctgttgttatgctgctatcaagtgggcacaccagggtaaacgaattatattctgcttttgttattgctcctacttttcaaggatatttgtatgcttaccctgcgccggcattctgccattgttattactgttaaaggatatctgtatgtccctaccctatccttttactagccacggtgaatatgttacttttggagcaatttggcttaatttatgtttacaaatctcgctatgctactgtgcatttgatgcatgtatgcaggcacagctccctcacatttgagtgtagccttgggccattcaaagtgctggtgcctcccgtgatttgttcctgagtgcaggcatgcttgagttgtagagcttgctgtagcaatattatataaatagtggtgcttgaacattatagttaatgttttcctaatcagtaaaacaagtctctatatggtcaatgcatttattggagagggacaatgcaagtcatcagattttgactgttgattcaattaagtgtcgtataaacaaaccgcaaaactgtcatttttaaatttttcttgcagacaatagctattggtaccaaatgcatgcttacgaaattctgttgtgcaggactcaaattgcttgggcgtccacctaattctccattaagatctttgactgtttatggtaaatctcaaggatatttgacctggtggtgatccctgtacaataattcatgcaaaggcatatccaagctatgtttagatgagagacaaattaataatttctgcatcattaatagtgaatgtggctcttttgtattgatggcaggatgagtgagtcaacatgattaggaaatacctacaatgaaacctacacagttaacaatgatgataattattcacatatctaatttctatctaacattgtgctggtaggccccagatgaacagttagccataaacaatactgctatagtactattggaatgtaataccttttttataaacattcaatacttatacatcttaaaagaggaaacacaggtagtatgtagaatacaatgacattaaatgtatgttactgattcattatgtatgatagtttttatgttcaaagtaatttgttgccactatttgctcatgaagttataacagatccatgctgtagttgaaagcaaacagatagcttgttaggttaacagagcagtagatggaaccatttggcataaaatattggatgcatcgacccttcaacattgatacgttgctgaagaatattttttttcatcctttcattgcaaatgtgaatttattgaagctacttctcaggctacggttttattgtcggaaaggcctgtgctaatgaaacctggcatcaattgcctgaactgcttttagacagggaagaaggacgcatgaagacagagctagctaaaataatactcaataagcatagtgatgacatatacctggttgaagttgtgagaagacacttttttgtcgagcatctgttcgatgatctgcatcaaggtcaaccacttttcaggtggcgcctacgacatacgtatgttgacagcacctttgtagaaagaacgaaggaagttgaagccagcaactctgatgatgtggctagatcaatttcaagagagacaattacaaacactacaccatttggagaaatgatggaggattcactggcttgtatactgggttctcccggatgcaacatggaaagcaacaatcccccagaaaagacagctaatgtcctgacgcgaagtgatctgcgagctcgcagaagaggtcgcaggcatcatcggcatgctgatgactagtttcctattgtgaatgttgtgtagaagtgctgtggaataccctagaccattaccattttatttgggcctcatgccccacagttaatctgctgtgcctggtcaaaatttctaggctggacaagagctgcttttgtaagctgggcaatcctgtatcgtgatgtatcccatggcccctgcattcttcacaaagcaaccaataagacggtatagacaagcgaaacgacgctgggtggtgtgatgtttgcagttcgtggtccacaggctgccggagcatacagcagttcattttcaattcttattatcatatattatggaagaagaaatgaacatcttcaggattgaacagtgtcgcgaaattgtagatgatggttccacaatcccaatgggaccgacagacaaagagacatgctgcttcctgctgtgagttttgtattgcagacgacactgtttatgtggagtttgaattctgttgtgagttttgcacggtagacgacactgtttatgtggagcttgagatgtgagaaggatgagtaagctattagagatagtttaacaccattaatttct

SEQ ID NO: 53165 - DNA, 7273 bp, Zea Mays
gagagagagagagagagagagagagagagagagagagagcacgggatgggttgaggaacgagatggagggagaaagtgggcagcctgctggatcttggcatctcgccgccgccgctcacttccgctccacctgtttggtgcagtgtgggctagttatctactagacttgccactgggtgcagattccgttgatcccacatctgaaaagcaggggagtcgacgaccctcatggttttgaggataatatattgcatctctgcactgttctaagcgtgaggaagtaaagcattatttattggttggagtagtttctgttgctatccggcaccaatggcgactttggttcgtcatgattcaaggcagtactcttggtggtgggttagccatatcagccccaagaactcgaaatggctccaggaaaatctcagcgacatggacacaaaggttaaagcaatgatcaaacttatcaatgaagatgctgattcttttgcaaggagagcagagatgtactacaagaaacgtccagagctaatgaaatttgtggaggaattctatcgagcataccgtgcgctggcagaaagatacgatcaggccactggggcacttcgtcaggctcacagaacaatttctgaagcatttccaaatcaaatgccgtcaatgtcagacgagtcaccctcttctttcagccaagagatggagcctcatactccagatatgtctacttttacacgtgcggcatttgattctgatgatcttcagaaggatggagttggtatgtcaccacagcgtttcacctccaagagaaatggtacacaccctgaggaaacaagtgcattgtcaagtagaaaaggtctaaagctgttcaatgatttgtcatcgagtagtgaaaatgctcctcgtgctggttttgatgggaaagtacggaaaggcctaacctttgaaagcccagaagttaaagggaaagatggtatcagcaatgagatggcaaatttgcagcaagaagttgcaagactattatccgagagccagaatctgaaacagcagatgctgtcagaatccgagcgggcaaacaaagctgaaaatgagatgcaaatgctcaaggcaacagtattgcaattaagtgctgataaagacacatcacttacgcaatataatcattcctctgagcgaatatctacgttggagtccgagctcttgaaggcgcaggctgacctcaagaagttaactgatgaaatggctgcagatgtccagaagctaattaatgctgaaacactcaatattgctatactgtctgaggctgagggtttggatcagaagatgaagatgcaacaacaagaactagaacaaaagcttaaggaattggagagtttccgctcaagcttccaggaggagcatgaaaagcgtatgcaggctgaaagtgctctactttcccaggggaaggaacttgctcaatctcatgaagaagtacagaggttgactatagaaataaagatggcgaatgaaaagttgaatgagctcaagcagaccaaggaggaccttcatgacactgtttgtgagctgaagagggatgttgagcgccttacagaacaaaaccagtcatctgaggtgcttatacgggaacttggtgacgagataaatacactcaaggattcaaaaaatgaactccaaagtgaaataaaaagccttaagagcaccatttcacagctaaacactgagaagaatgcagctgcgcttcaacaccagcagtctgtggagcaggtttcggtaatcgaatctcagctgtcaaagctacagtcagagctagatgagactgagcagaaagtacagttgctgacacaagatcttgaaaagaaaaaagaagaagcggagaatatccatttcaagctgcaagatgaatgccataggcgtatgcaaattgaagcaactcttctcatgacagagggtctacattcccagttgcaagaagaaatgaaaacactgacacaagattttgacggatcaacaaagaagcttagtgagttagaaaataataagttagacctggagagcacactgaaagaactgaataacaccattttaggtttgaactcggagaaggatgcagcactccttcaacaacagcagtctttagacaaagtatctgatttggaattagaactctcaaagatgcagttggaaatggagaagtctgagcaaaaaattctcttactggagcaagaaattgcacggaagactgaaagtgtcgacagcttggagataagttttaaagatgaatgtgagaagaggctacaagcccaaacatcgcttgtgtcattggagaaaatgtattgccagtcacaagaagatgttagaaggttgcagatagagattgagaagcagaatgacaagttgaatgagttggagaacttgtcatctgaacttaacaacaccatcctacttgtaaacactgagaaagatgcaaccctccatgagaaccagcagtccttagcgagaatattggatcttgaatctgaactcatggtcttgaaaactgaactggagaatgttgaaaggaaagttcacatgatagagcaagaactcatatataagaaagaagaagcggataacctccaaattagcctacaagatgaaactcaaaaacgggttgatggtgaaacatctcttcttatgatgaaaaatcttcattcggagtcacaaaatgaagtgagagggttggcactggaactcgagaagctgaatggtaatttaagacaggtggagaacagtaaggttgatcttgaaaacattgtaaccaagcatacggaggaaatccatatccttcgtgaacagaatctttctactgagcttatgataaaggacctccatcttgaattggatgtattgaaggatttgaatgtgaaacttcaagcagaaatggatttacacaaaggtgaaaaagaagtacttcagagagagtttacttctcaaagggaagagaaggaaaatctagaggggatacaccacactctggtggatgagatggataccctaaaaactactacaacaatgaaccagaagttgattgaggaattgcaaatcacaaacttaaaactgaaggaagtgtgtgcaaggagtgaagttgagaaggcacttctctcagaaaaactccaagaggtggagaagctatctgaagaatattcactcttggagaactcactttcagatgcaaatgctgaaatggatgcattgagggagaagataaaagcacttgaagcttcagaaagctctctcaaggatataatttcctgtcatgtttctgagaaggctgttcttgtatcagagctagagatccttggtaaaagattatctgatgctttagagaacaaatctatcttggatatctcattatctgatatgaaactagacctagaagatttgagaacaaagctgaaagattctgaagaatcctgtcagtatctccttgcaaataactcagcactttctggtgaactggatgcattgagggagaagataaaagcactacaggcctcagaaaggtctctgaaggatgaaatttcctgttatgtttctgaaaaggttgttcttgcatcagaggtagagatccttggtaaaagtttatctgaggtttcagagaagaattctatcttggatacctcattatgtgatatgaaaactgagttagatgaattgagaacaaagctgaacgattctgaagaatcctgccagactcaccttacaaataattcagctctttctgctgaaaagaacaatctgttctctcagctggagagcattacattggccatgaaagcactagaaggtatgcacaccaatctggaacagatgcactcctctgtatcaagagagaaggattttgcatatgatcaagtaagggaactgcaggatcagttgagaattaagaatgaggaatttgaagtgttagcaaagtcacatcaattgcaagcaaacagctatgagatacaaatttcttctctgcaagagaaaaaccattatatggaggaggtgcttgaacaggaacagcagaaaaacgtaaatgcttctattagtacagttattttggagaactgtttggtcgatgagcaagacaagaaggctgctcttttcactgaatgccaaaagtatgctgtggaaaatcattcagccaatatgttggtttcacagttgatgggggaagctagatatcatggggaggagagaaaaacattgctaaagcacaatgaaaaactgaggcaagggatttcaaagcaaatgaaggttctgaatatctgcaaagatctagcacctgctgatttagctgaggacgaagttctgttgcagactgttttagatgaaaccattaacactctgagacttaaggatgaaactgaagatgtgaataggctcatgaacactgagttctcagttctctcagtagttttgttgcaattagggatggagctcagagatctgcacttacagaagtgtgccattgagaaagaagtggagagtggagaaacagagttgctttgtttgcaaaacaaaaaccaacagatgttggaacagaatgaacaactaaggaatggattacaggaaagcagtgaaagggaggaggtgctgaaaactgaagtattcatcacacaagagaaactatcttgcttgagagagtcctaccagacatcacaagatgtaattttcaacctgaccgaaaaaaatgagtccttgtctaaggaataccagtccttgagtgagaagtacaattccttggaagatgagaatgatactgttcttgaagaatgcatgatgctcgagaacctgtgcctgttctttaggggacataataatgagattgcatctgcattggcttctcttaccaatgagatggctttgttgagtttggctaagagcgatcttgatcttcaagttgatgagctgagcagaaggtcagtggcgcatgaatcagaaaatagtcacttaaaggagtacatcatatgcttggtagagattctcagaactcgattagtcctttcagagtttgatttggacaccaatcaaagtgtctgccaggagttggttgttaaacttgagaattgcatgacacagctggcgcagaaggatggtgagctaatggaagcagaggaggaagttcaactattgcaagaaaagaaccaggaactctgtggagttgttagatctctacaagttgcaactgaaggtgctaaagtggtggaaggagaactggagaagaaaatcacaagactgattgaacagtgttcttgcaaggatgtcgaaattttacttcttcaccaagacaatgaggcattgcaatcagaagttgagcaatgtgagagggaatttgttgttctgatggatgatgcaattacctcttcagtgaattctgcggtgtatgaagaaacagcattcaagcttatgatgaatggtaaagctacagagaatagagcaatatccctaaaggagttgctaatgaaggaggtctcttcccgagatgctcacattgaggagttgcagaaaaagttggctggcattcaggacgaacatgcagaactaaaagctgagttgaacacacatctagctctcgtagcatcattggctgatcatgtcagtgtgttggaagaagattgccgttctctgtcaaaaccctgtagtacagaagacaaagaggaaaccgcatgtgtacatcatgttcaagagggcaatgatgggctggaatctcattgcttacccaaaggaactccagagttacaagggttgattgcaagaatagaagcacttcaagtagttgtatcaaatgctaaagatcgtcaagatcaggagtcagctgagtctgcagctaaattggcggcagtaagtgcagaaattcaagaccttaaagcaagaggtggctcacgcatggagggaaaagaaatatattctgatcatgagaaacaagatgttgagatctccaaagggaagcaagtccagatcatgaaggatattgagctggaccaaatatccacttgtccaccatatggtgctcgagctgccctctatccgcttggaactggtgcaaatgccgaactcgatgacgatatgcttcagctgtgggaggctgcagagaggagctgcaagaaccaaacggccaagtcctcgtcatctgagcacgacatacaagccgtcgaggatctgaagagtgagcacccttcgtctgagctagcaaggggaagagaccttggaatcaataagctagaagcgtcgaagggagctgcagagcctcatgaggcgtggagcaagaacgtacttgagaggctcacttctgatgctcagaggctgttgagcatccaagcgagcattgaagagctgaagcagaaaatggaggggcagtcaaagggaaaatcccctatgaactctgagtacagcagtgtgagcgctcaggtgcatgagacagagggccatgtcttggaacagatcaatctgaacaacaaattgactaggacggctgagaactaccccacactgtcagataatatgagcaccgagcgagaagggtattccagcaggaggaagatctccgagcaggtgcagaaagggtcggagaatgtggcaaggttggaactggagcttcagaagattcagtatgtcttgctgaagcttgaggaagagcacgagtacagaaggctcaaagtctctgataagcgcactcgcgtgcttttgagggactatctgtatgggaggaaggaccgcggtggcgggcagaagaaaaagaagagggtcccgttctgtggttgtgttcgtccgaaatcaagaacagagccgtagcctttctttttgttcgacctgcacctccaagtggtagccgtagtccgaaatcaagaaataaaacaaaatcgacctgcacctccaagtggttggctaagtgtcgcctgtgcattggaagaggaggtggtgttcctaggatccctttgtaattgagttagcattttagtatcttttttcttttatttttgaaactagcattatagtatcctgatgaagaagcttatgtactaaattttttgttttcctgtctaaatgaggccattctggctagtttaatgcgttaatactgtcgtatatcaaggcgttctctttccatctataatagcttcgtgtttacagcccaagcagtgcattttgcttccaggttcagactgcagaagcaaagcaccgggactagtaagtcatttctttaatattgatgaataatctcataaggtataacgtcatctctttctttaat

SEQ ID NO: 53166 - DNA, 7230 bp, Zea Mays
gagagagagagagagagagagagagagagagagagagagcacgggatgggttgaggaacgagatggagggagaaagtgggcagcctgctggatcttggcatctcgccgccgccgctcacttccgctccacctggtgcagattccgttgatcccacatctgaaaagcaggggagtcgacgaccctcatggttttgaggataatatattgcatctctgcactgttctaagcgtgaggaagtaaagcattatttattggttggagtagtttctgttgctatccggcaccaatggcgactttggttcgtcatgattcaaggcagtactcttggtggtgggttagccatatcagccccaagaactcgaaatggctccaggaaaatctcagcgacatggacacaaaggttaaagcaatgatcaaacttatcaatgaagatgctgattcttttgcaaggagagcagagatgtactacaagaaacgtccagagctaatgaaatttgtggaggaattctatcgagcataccgtgcgctggcagaaagatacgatcaggccactggggcacttcgtcaggctcacagaacaatttctgaagcatttccaaatcaaatgccgtcaatgtcagacgagtcaccctcttctttcagccaagagatggagcctcatactccagatatgtctacttttacacgtgcggcatttgattctgatgatcttcagaaggatggagttggtatgtcaccacagcgtttcacctccaagagaaatggtacacaccctgaggaaacaagtgcattgtcaagtagaaaaggtctaaagctgttcaatgatttgtcatcgagtagtgaaaatgctcctcgtgctggttttgatgggaaagtacggaaaggcctaacctttgaaagcccagaagttaaagggaaagatggtatcagcaatgagatggcaaatttgcagcaagaagttgcaagactattatccgagagccagaatctgaaacagcagatgctgtcagaatccgagcgggcaaacaaagctgaaaatgagatgcaaatgctcaaggcaacagtattgcaattaagtgctgataaagacacatcacttacgcaatataatcattcctctgagcgaatatctacgttggagtccgagctcttgaaggcgcaggctgacctcaagaagttaactgatgaaatggctgcagatgtccagaagctaattaatgctgaaacactcaatattgctatactgtctgaggctgagggtttggatcagaagatgaagatgcaacaacaagaactagaacaaaagcttaaggaattggagagtttccgctcaagcttccaggaggagcatgaaaagcgtatgcaggctgaaagtgctctactttcccaggggaaggaacttgctcaatctcatgaagaagtacagaggttgactatagaaataaagatggcgaatgaaaagttgaatgagctcaagcagaccaaggaggaccttcatgacactgtttgtgagctgaagagggatgttgagcgccttacagaacaaaaccagtcatctgaggtgcttatacgggaacttggtgacgagataaatacactcaaggattcaaaaaatgaactccaaagtgaaataaaaagccttaagagcaccatttcacagctaaacactgagaagaatgcagctgcgcttcaacaccagcagtctgtggagcaggtttcggtaatcgaatctcagctgtcaaagctacagtcagagctagatgagactgagcagaaagtacagttgctgacacaagatcttgaaaagaaaaaagaagaagcggagaatatccatttcaagctgcaagatgaatgccataggcgtatgcaaattgaagcaactcttctcatgacagagggtctacattcccagttgcaagaagaaatgaaaacactgacacaagattttgacggatcaacaaagaagcttagtgagttagaaaataataagttagacctggagagcacactgaaagaactgaataacaccattttaggtttgaactcggagaaggatgcagcactccttcaacaacagcagtctttagacaaagtatctgatttggaattagaactctcaaagatgcagttggaaatggagaagtctgagcaaaaaattctcttactggagcaagaaattgcacggaagactgaaagtgtcgacagcttggagataagttttaaagatgaatgtgagaagaggctacaagcccaaacatcgcttgtgtcattggagaaaatgtattgccagtcacaagaagatgttagaaggttgcagatagagattgagaagcagaatgacaagttgaatgagttggagaacttgtcatctgaacttaacaacaccatcctacttgtaaacactgagaaagatgcaaccctccatgagaaccagcagtccttagcgagaatattggatcttgaatctgaactcatggtcttgaaaactgaactggagaatgttgaaaggaaagttcacatgatagagcaagaactcatatataagaaagaagaagcggataacctccaaattagcctacaagatgaaactcaaaaacgggttgatggtgaaacatctcttcttatgatgaaaaatcttcattcggagtcacaaaatgaagtgagagggttggcactggaactcgagaagctgaatggtaatttaagacaggtggagaacagtaaggttgatcttgaaaacattgtaaccaagcatacggaggaaatccatatccttcgtgaacagaatctttctactgagcttatgataaaggacctccatcttgaattggatgtattgaaggatttgaatgtgaaacttcaagcagaaatggatttacacaaaggtgaaaaagaagtacttcagagagagtttacttctcaaagggaagagaaggaaaatctagaggggatacaccacactctggtggatgagatggataccctaaaaactactacaacaatgaaccagaagttgattgaggaattgcaaatcacaaacttaaaactgaaggaagtgtgtgcaaggagtgaagttgagaaggcacttctctcagaaaaactccaagaggtggagaagctatctgaagaatattcactcttggagaactcactttcagatgcaaatgctgaaatggatgcattgagggagaagataaaagcacttgaagcttcagaaagctctctcaaggatataatttcctgtcatgtttctgagaaggctgttcttgtatcagagctagagatccttggtaaaagattatctgatgctttagagaacaaatctatcttggatatctcattatctgatatgaaactagacctagaagatttgagaacaaagctgaaagattctgaagaatcctgtcagtatctccttgcaaataactcagcactttctggtgaactggatgcattgagggagaagataaaagcactacaggcctcagaaaggtctctgaaggatgaaatttcctgttatgtttctgaaaaggttgttcttgcatcagaggtagagatccttggtaaaagtttatctgaggtttcagagaagaattctatcttggatacctcattatgtgatatgaaaactgagttagatgaattgagaacaaagctgaacgattctgaagaatcctgccagactcaccttacaaataattcagctctttctgctgaaaagaacaatctgttctctcagctggagagcattacattggccatgaaagcactagaaggtatgcacaccaatctggaacagatgcactcctctgtatcaagagagaaggattttgcatatgatcaagtaagggaactgcaggatcagttgagaattaagaatgaggaatttgaagtgttagcaaagtcacatcaattgcaagcaaacagctatgagatacaaatttcttctctgcaagagaaaaaccattatatggaggaggtgcttgaacaggaacagcagaaaaacgtaaatgcttctattagtacagttattttggagaactgtttggtcgatgagcaagacaagaaggctgctcttttcactgaatgccaaaagtatgctgtggaaaatcattcagccaatatgttggtttcacagttgatgggggaagctagatatcatggggaggagagaaaaacattgctaaagcacaatgaaaaactgaggcaagggatttcaaagcaaatgaaggttctgaatatctgcaaagatctagcacctgctgatttagctgaggacgaagttctgttgcagactgttttagatgaaaccattaacactctgagacttaaggatgaaactgaagatgtgaataggctcatgaacactgagttctcagttctctcagtagttttgttgcaattagggatggagctcagagatctgcacttacagaagtgtgccattgagaaagaagtggagagtggagaaacagagttgctttgtttgcaaaacaaaaaccaacagatgttggaacagaatgaacaactaaggaatggattacaggaaagcagtgaaagggaggaggtgctgaaaactgaagtattcatcacacaagagaaactatcttgcttgagagagtcctaccagacatcacaagatgtaattttcaacctgaccgaaaaaaatgagtccttgtctaaggaataccagtccttgagtgagaagtacaattccttggaagatgagaatgatactgttcttgaagaatgcatgatgctcgagaacctgtgcctgttctttaggggacataataatgagattgcatctgcattggcttctcttaccaatgagatggctttgttgagtttggctaagagcgatcttgatcttcaagttgatgagctgagcagaaggtcagtggcgcatgaatcagaaaatagtcacttaaaggagtacatcatatgcttggtagagattctcagaactcgattagtcctttcagagtttgatttggacaccaatcaaagtgtctgccaggagttggttgttaaacttgagaattgcatgacacagctggcgcagaaggatggtgagctaatggaagcagaggaggaagttcaactattgcaagaaaagaaccaggaactctgtggagttgttagatctctacaagttgcaactgaaggtgctaaagtggtggaaggagaactggagaagaaaatcacaagactgattgaacagtgttcttgcaaggatgtcgaaattttacttcttcaccaagacaatgaggcattgcaatcagaagttgagcaatgtgagagggaatttgttgttctgatggatgatgcaattacctcttcagtgaattctgcggtgtatgaagaaacagcattcaagcttatgatgaatggtaaagctacagagaatagagcaatatccctaaaggagttgctaatgaaggaggtctcttcccgagatgctcacattgaggagttgcagaaaaagttggctggcattcaggacgaacatgcagaactaaaagctgagttgaacacacatctagctctcgtagcatcattggctgatcatgtcagtgtgttggaagaagattgccgttctctgtcaaaaccctgtagtacagaagacaaagaggaaaccgcatgtgtacatcatgttcaagagggcaatgatgggctggaatctcattgcttacccaaaggaactccagagttacaagggttgattgcaagaatagaagcacttcaagtagttgtatcaaatgctaaagatcgtcaagatcaggagtcagctgagtctgcagctaaattggcggcagtaagtgcagaaattcaagaccttaaagcaagaggtggctcacgcatggagggaaaagaaatatattctgatcatgagaaacaagatgttgagatctccaaagggaagcaagtccagatcatgaaggatattgagctggaccaaatatccacttgtccaccatatggtgctcgagctgccctctatccgcttggaactggtgcaaatgccgaactcgatgacgatatgcttcagctgtgggaggctgcagagaggagctgcaagaaccaaacggccaagtcctcgtcatctgagcacgacatacaagccgtcgaggatctgaagagtgagcacccttcgtctgagctagcaaggggaagagaccttggaatcaataagctagaagcgtcgaagggagctgcagagcctcatgaggcgtggagcaagaacgtacttgagaggctcacttctgatgctcagaggctgttgagcatccaagcgagcattgaagagctgaagcagaaaatggaggggcagtcaaagggaaaatcccctatgaactctgagtacagcagtgtgagcgctcaggtgcatgagacagagggccatgtcttggaacagatcaatctgaacaacaaattgactaggacggctgagaactaccccacactgtcagataatatgagcaccgagcgagaagggtattccagcaggaggaagatctccgagcaggtgcagaaagggtcggagaatgtggcaaggttggaactggagcttcagaagattcagtatgtcttgctgaagcttgaggaagagcacgagtacagaaggctcaaagtctctgataagcgcactcgcgtgcttttgagggactatctgtatgggaggaaggaccgcggtggcgggcagaagaaaaagaagagggtcccgttctgtggttgtgttcgtccgaaatcaagaacagagccgtagcctttctttttgttcgacctgcacctccaagtggtagccgtagtccgaaatcaagaaataaaacaaaatcgacctgcacctccaagtggttggctaagtgtcgcctgtgcattggaagaggaggtggtgttcctaggatccctttgtaattgagttagcattttagtatcttttttcttttatttttgaaactagcattatagtatcctgatgaagaagcttatgtactaaattttttgttttcctgtctaaatgaggccattctggctagtttaatgcgttaatactgtcgtatatcaaggcgttctctttccatctataatagcttcgtgtttacagcccaagcagtgcattttgcttccaggttcagactgcagaagcaaagcaccgggactagtaagtcatttctttaatattgatgaataatctcataaggtataacgtcatctctttctttaat

SEQ ID NO: 53167 - DNA, 7457 bp, Zea Mays
cgcgagtagtctctatccccttcctgtattgtccgtttggggtggggtccgcctcctactgtgctgaagcagcctttcttcttggcactacgcccgcccgcccaccggaccctgcagcagagtccactgtccacggccaaaggcgagagagagagagagagagagagagagagagagagagagagagcacgggatgggttgaggaacgagatggagggagaaagtgggcagcctgctggatcttggcatctcgccgccgccgctcacttccgctccacctgttactgaaggtcggtgttatattttcttaaactccagtttggtgcagtgtgggctagttatctactagacttgccactggtgcagattccgttgatcccacatctgaaaagcaggggagtcgacgaccctcatggttttgaggataatatattgcatctctgcactgttctaagcgtgaggaagtaaagcattatttattggttggagtagtttctgttgctatccggcaccaatggcgactttggttcgtcatgattcaaggcagtactcttggtggtgggttagccatatcagccccaagaactcgaaatggctccaggaaaatctcagcgacatggacacaaaggttaaagcaatgatcaaacttatcaatgaagatgctgattcttttgcaaggagagcagagatgtactacaagaaacgtccagagctaatgaaatttgtggaggaattctatcgagcataccgtgcgctggcagaaagatacgatcaggccactggggcacttcgtcaggctcacagaacaatttctgaagcatttccaaatcaaatgccgtcaatgtcagacgagtcaccctcttctttcagccaagagatggagcctcatactccagatatgtctacttttacacgtgcggcatttgattctgatgatcttcagaaggatggagttggtatgtcaccacagcgtttcacctccaagagaaatggtacacaccctgaggaaacaagtgcattgtcaagtagaaaaggtctaaagctgttcaatgatttgtcatcgagtagtgaaaatgctcctcgtgctggttttgatgggaaagtacggaaaggcctaacctttgaaagcccagaagttaaagggaaagatggtatcagcaatgagatggcaaatttgcagcaagaagttgcaagactattatccgagagccagaatctgaaacagcagatgctgtcagaatccgagcgggcaaacaaagctgaaaatgagatgcaaatgctcaaggcaacagtattgcaattaagtgctgataaagacacatcacttacgcaatataatcattcctctgagcgaatatctacgttggagtccgagctcttgaaggcgcaggctgacctcaagaagttaactgatgaaatggctgcagatgtccagaagctaattaatgctgaaacactcaatattgctatactgtctgaggctgagggtttggatcagaagatgaagatgcaacaacaagaactagaacaaaagcttaaggaattggagagtttccgctcaagcttccaggaggagcatgaaaagcgtatgcaggctgaaagtgctctactttcccaggggaaggaacttgctcaatctcatgaagaagtacagaggttgactatagaaataaagatggcgaatgaaaagttgaatgagctcaagcagaccaaggaggaccttcatgacactgtttgtgagctgaagagggatgttgagcgccttacagaacaaaaccagtcatctgaggtgcttatacgggaacttggtgacgagataaatacactcaaggattcaaaaaatgaactccaaagtgaaataaaaagccttaagagcaccatttcacagctaaacactgagaagaatgcagctgcgcttcaacaccagcagtctgtggagcaggtttcggtaatcgaatctcagctgtcaaagctacagtcagagctagatgagactgagcagaaagtacagttgctgacacaagatcttgaaaagaaaaaagaagaagcggagaatatccatttcaagctgcaagatgaatgccataggcgtatgcaaattgaagcaactcttctcatgacagagggtctacattcccagttgcaagaagaaatgaaaacactgacacaagattttgacggatcaacaaagaagcttagtgagttagaaaataataagttagacctggagagcacactgaaagaactgaataacaccattttaggtttgaactcggagaaggatgcagcactccttcaacaacagcagtctttagacaaagtatctgatttggaattagaactctcaaagatgcagttggaaatggagaagtctgagcaaaaaattctcttactggagcaagaaattgcacggaagactgaaagtgtcgacagcttggagataagttttaaagatgaatgtgagaagaggctacaagcccaaacatcgcttgtgtcattggagaaaatgtattgccagtcacaagaagatgttagaaggttgcagatagagattgagaagcagaatgacaagttgaatgagttggagaacttgtcatctgaacttaacaacaccatcctacttgtaaacactgagaaagatgcaaccctccatgagaaccagcagtccttagcgagaatattggatcttgaatctgaactcatggtcttgaaaactgaactggagaatgttgaaaggaaagttcacatgatagagcaagaactcatatataagaaagaagaagcggataacctccaaattagcctacaagatgaaactcaaaaacgggttgatggtgaaacatctcttcttatgatgaaaaatcttcattcggagtcacaaaatgaagtgagagggttggcactggaactcgagaagctgaatggtaatttaagacaggtggagaacagtaaggttgatcttgaaaacattgtaaccaagcatacggaggaaatccatatccttcgtgaacagaatctttctactgagcttatgataaaggacctccatcttgaattggatgtattgaaggatttgaatgtgaaacttcaagcagaaatggatttacacaaaggtgaaaaagaagtacttcagagagagtttacttctcaaagggaagagaaggaaaatctagaggggatacaccacactctggtggatgagatggataccctaaaaactactacaacaatgaaccagaagttgattgaggaattgcaaatcacaaacttaaaactgaaggaagtgtgtgcaaggagtgaagttgagaaggcacttctctcagaaaaactccaagaggtggagaagctatctgaagaatattcactcttggagaactcactttcagatgcaaatgctgaaatggatgcattgagggagaagataaaagcacttgaagcttcagaaagctctctcaaggatataatttcctgtcatgtttctgagaaggctgttcttgtatcagagctagagatccttggtaaaagattatctgatgctttagagaacaaatctatcttggatatctcattatctgatatgaaactagacctagaagatttgagaacaaagctgaaagattctgaagaatcctgtcagtatctccttgcaaataactcagcactttctggtgaactggatgcattgagggagaagataaaagcactacaggcctcagaaaggtctctgaaggatgaaatttcctgttatgtttctgaaaaggttgttcttgcatcagaggtagagatccttggtaaaagtttatctgaggtttcagagaagaattctatcttggatacctcattatgtgatatgaaaactgagttagatgaattgagaacaaagctgaacgattctgaagaatcctgccagactcaccttacaaataattcagctctttctgctgaaaagaacaatctgttctctcagctggagagcattacattggccatgaaagcactagaaggtatgcacaccaatctggaacagatgcactcctctgtatcaagagagaaggattttgcatatgatcaagtaagggaactgcaggatcagttgagaattaagaatgaggaatttgaagtgttagcaaagtcacatcaattgcaagcaaacagctatgagatacaaatttcttctctgcaagagaaaaaccattatatggaggaggtgcttgaacaggaacagcagaaaaacgtaaatgcttctattagtacagttattttggagaactgtttggtcgatgagcaagacaagaaggctgctcttttcactgaatgccaaaagtatgctgtggaaaatcattcagccaatatgttggtttcacagttgatgggggaagctagatatcatggggaggagagaaaaacattgctaaagcacaatgaaaaactgaggcaagggatttcaaagcaaatgaaggttctgaatatctgcaaagatctagcacctgctgatttagctgaggacgaagttctgttgcagactgttttagatgaaaccattaacactctgagacttaaggatgaaactgaagatgtgaataggctcatgaacactgagttctcagttctctcagtagttttgttgcaattagggatggagctcagagatctgcacttacagaagtgtgccattgagaaagaagtggagagtggagaaacagagttgctttgtttgcaaaacaaaaaccaacagatgttggaacagaatgaacaactaaggaatggattacaggaaagcagtgaaagggaggaggtgctgaaaactgaagtattcatcacacaagagaaactatcttgcttgagagagtcctaccagacatcacaagatgtaattttcaacctgaccgaaaaaaatgagtccttgtctaaggaataccagtccttgagtgagaagtacaattccttggaagatgagaatgatactgttcttgaagaatgcatgatgctcgagaacctgtgcctgttctttaggggacataataatgagattgcatctgcattggcttctcttaccaatgagatggctttgttgagtttggctaagagcgatcttgatcttcaagttgatgagctgagcagaaggtcagtggcgcatgaatcagaaaatagtcacttaaaggagtacatcatatgcttggtagagattctcagaactcgattagtcctttcagagtttgatttggacaccaatcaaagtgtctgccaggagttggttgttaaacttgagaattgcatgacacagctggcgcagaaggatggtgagctaatggaagcagaggaggaagttcaactattgcaagaaaagaaccaggaactctgtggagttgttagatctctacaagttgcaactgaaggtgctaaagtggtggaaggagaactggagaagaaaatcacaagactgattgaacagtgttcttgcaaggatgtcgaaattttacttcttcaccaagacaatgaggcattgcaatcagaagttgagcaatgtgagagggaatttgttgttctgatggatgatgcaattacctcttcagtgaattctgcggtgtatgaagaaacagcattcaagcttatgatgaatggtaaagctacagagaatagagcaatatccctaaaggagttgctaatgaaggaggtctcttcccgagatgctcacattgaggagttgcagaaaaagttggctggcattcaggacgaacatgcagaactaaaagctgagttgaacacacatctagctctcgtagcatcattggctgatcatgtcagtgtgttggaagaagattgccgttctctgtcaaaaccctgtagtacagaagacaaagaggaaaccgcatgtgtacatcatgttcaagagggcaatgatgggctggaatctcattgcttacccaaaggaactccagagttacaagggttgattgcaagaatagaagcacttcaagtagttgtatcaaatgctaaagatcgtcaagatcaggagtcagctgagtctgcagctaaattggcggcagtaagtgcagaaattcaagaccttaaagcaagaggtggctcacgcatggagggaaaagaaatatattctgatcatgagaaacaagatgttgagatctccaaagggaagcaagtccagatcatgaaggatattgagctggaccaaatatccacttgtccaccatatggtgctcgagctgccctctatccgcttggaactggtgcaaatgccgaactcgatgacgatatgcttcagctgtgggaggctgcagagaggagctgcaagaaccaaacggccaagtcctcgtcatctgagcacgacatacaagccgtcgaggatctgaagagtgagcacccttcgtctgagctagcaaggggaagagaccttggaatcaataagctagaagcgtcgaagggagctgcagagcctcatgaggcgtggagcaagaacgtacttgagaggctcacttctgatgctcagaggctgttgagcatccaagcgagcattgaagagctgaagcagaaaatggaggggcagtcaaagggaaaatcccctatgaactctgagtacagcagtgtgagcgctcaggtgcatgagacagagggccatgtcttggaacagatcaatctgaacaacaaattgactaggacggctgagaactaccccacactgtcagataatatgagcaccgagcgagaagggtattccagcaggaggaagatctccgagcaggtgcagaaagggtcggagaatgtggcaaggttggaactggagcttcagaagattcagtatgtcttgctgaagcttgaggaagagcacgagtacagaaggctcaaagtctctgataagcgcactcgcgtgcttttgagggactatctgtatgggaggaaggaccgcggtggcgggcagaagaaaaagaagagggtcccgttctgtggttgtgttcgtccgaaatcaagaacagagccgtagcctttctttttgttcgacctgcacctccaagtggtagccgtagtccgaaatcaagaaataaaacaaaatcgacctgcacctccaagtggttggctaagtgtcgcctgtgcattggaagaggaggtggtgttcctaggatccctttgtaattgagttagcattttagtatcttttttcttttatttttgaaactagcattatagtatcctgatgaagaagcttatgtactaaattttttgttttcctgtctaaatgaggccattctggctagtttaatgcgttaatactgtcgtatatcaaggcgttctctttccatctataatagcttcgtgtttacagcccaagcagtgcattttgcttccaggttcagactgcagaagcaaagcaccgggactagtaagtcatttctttaatattgatgaataatctcataaggtataacgtcatctctttctttaat

SEQ ID NO: 53168 - DNA, 7478 bp, Zea Mays
gcccgtctggcttcaaaggctgatcgcgagtagtctctatccccttcctgtattgtccgtttggggtggggtccgcctcctactgtgctgaagcagcctttcttcttggcactacgcccgcccgcccaccggaccctgcagcagagtccactgtccacggccaaaggcgagagagagagagagagagagagagagagagagagagagagagcacgggatgggttgaggaacgagatggagggagaaagtgggcagcctgctggatcttggcatctcgccgccgccgctcacttccgctccacctgtttggtgcagtgtgggctagttatctactagacttgccactgtttcaagtcgtttctgtttgtaataactatgcaggtgcagattccgttgatcccacatctgaaaagcaggggagtcgacgaccctcatggttttgaggataatatattgcatctctgcactgttctaagcgtgaggaagtaaagcattatttattggttggagtagtttctgttgctatccggcaccaatggcgactttggttcgtcatgattcaaggcagtactcttggtggtgggttagccatatcagccccaagaactcgaaatggctccaggaaaatctcagcgacatggacacaaaggttaaagcaatgatcaaacttatcaatgaagatgctgattcttttgcaaggagagcagagatgtactacaagaaacgtccagagctaatgaaatttgtggaggaattctatcgagcataccgtgcgctggcagaaagatacgatcaggccactggggcacttcgtcaggctcacagaacaatttctgaagcatttccaaatcaaatgccgtcaatgtcagacgagtcaccctcttctttcagccaagagatggagcctcatactccagatatgtctacttttacacgtgcggcatttgattctgatgatcttcagaaggatggagttggtatgtcaccacagcgtttcacctccaagagaaatggtacacaccctgaggaaacaagtgcattgtcaagtagaaaaggtctaaagctgttcaatgatttgtcatcgagtagtgaaaatgctcctcgtgctggttttgatgggaaagtacggaaaggcctaacctttgaaagcccagaagttaaagggaaagatggtatcagcaatgagatggcaaatttgcagcaagaagttgcaagactattatccgagagccagaatctgaaacagcagatgctgtcagaatccgagcgggcaaacaaagctgaaaatgagatgcaaatgctcaaggcaacagtattgcaattaagtgctgataaagacacatcacttacgcaatataatcattcctctgagcgaatatctacgttggagtccgagctcttgaaggcgcaggctgacctcaagaagttaactgatgaaatggctgcagatgtccagaagctaattaatgctgaaacactcaatattgctatactgtctgaggctgagggtttggatcagaagatgaagatgcaacaacaagaactagaacaaaagcttaaggaattggagagtttccgctcaagcttccaggaggagcatgaaaagcgtatgcaggctgaaagtgctctactttcccaggggaaggaacttgctcaatctcatgaagaagtacagaggttgactatagaaataaagatggcgaatgaaaagttgaatgagctcaagcagaccaaggaggaccttcatgacactgtttgtgagctgaagagggatgttgagcgccttacagaacaaaaccagtcatctgaggtgcttatacgggaacttggtgacgagataaatacactcaaggattcaaaaaatgaactccaaagtgaaataaaaagccttaagagcaccatttcacagctaaacactgagaagaatgcagctgcgcttcaacaccagcagtctgtggagcaggtttcggtaatcgaatctcagctgtcaaagctacagtcagagctagatgagactgagcagaaagtacagttgctgacacaagatcttgaaaagaaaaaagaagaagcggagaatatccatttcaagctgcaagatgaatgccataggcgtatgcaaattgaagcaactcttctcatgacagagggtctacattcccagttgcaagaagaaatgaaaacactgacacaagattttgacggatcaacaaagaagcttagtgagttagaaaataataagttagacctggagagcacactgaaagaactgaataacaccattttaggtttgaactcggagaaggatgcagcactccttcaacaacagcagtctttagacaaagtatctgatttggaattagaactctcaaagatgcagttggaaatggagaagtctgagcaaaaaattctcttactggagcaagaaattgcacggaagactgaaagtgtcgacagcttggagataagttttaaagatgaatgtgagaagaggctacaagcccaaacatcgcttgtgtcattggagaaaatgtattgccagtcacaagaagatgttagaaggttgcagatagagattgagaagcagaatgacaagttgaatgagttggagaacttgtcatctgaacttaacaacaccatcctacttgtaaacactgagaaagatgcaaccctccatgagaaccagcagtccttagcgagaatattggatcttgaatctgaactcatggtcttgaaaactgaactggagaatgttgaaaggaaagttcacatgatagagcaagaactcatatataagaaagaagaagcggataacctccaaattagcctacaagatgaaactcaaaaacgggttgatggtgaaacatctcttcttatgatgaaaaatcttcattcggagtcacaaaatgaagtgagagggttggcactggaactcgagaagctgaatggtaatttaagacaggtggagaacagtaaggttgatcttgaaaacattgtaaccaagcatacggaggaaatccatatccttcgtgaacagaatctttctactgagcttatgataaaggacctccatcttgaattggatgtattgaaggatttgaatgtgaaacttcaagcagaaatggatttacacaaaggtgaaaaagaagtacttcagagagagtttacttctcaaagggaagagaaggaaaatctagaggggatacaccacactctggtggatgagatggataccctaaaaactactacaacaatgaaccagaagttgattgaggaattgcaaatcacaaacttaaaactgaaggaagtgtgtgcaaggagtgaagttgagaaggcacttctctcagaaaaactccaagaggtggagaagctatctgaagaatattcactcttggagaactcactttcagatgcaaatgctgaaatggatgcattgagggagaagataaaagcacttgaagcttcagaaagctctctcaaggatataatttcctgtcatgtttctgagaaggctgttcttgtatcagagctagagatccttggtaaaagattatctgatgctttagagaacaaatctatcttggatatctcattatctgatatgaaactagacctagaagatttgagaacaaagctgaaagattctgaagaatcctgtcagtatctccttgcaaataactcagcactttctggtgaactggatgcattgagggagaagataaaagcactacaggcctcagaaaggtctctgaaggatgaaatttcctgttatgtttctgaaaaggttgttcttgcatcagaggtagagatccttggtaaaagtttatctgaggtttcagagaagaattctatcttggatacctcattatgtgatatgaaaactgagttagatgaattgagaacaaagctgaacgattctgaagaatcctgccagactcaccttacaaataattcagctctttctgctgaaaagaacaatctgttctctcagctggagagcattacattggccatgaaagcactagaaggtatgcacaccaatctggaacagatgcactcctctgtatcaagagagaaggattttgcatatgatcaagtaagggaactgcaggatcagttgagaattaagaatgaggaatttgaagtgttagcaaagtcacatcaattgcaagcaaacagctatgagatacaaatttcttctctgcaagagaaaaaccattatatggaggaggtgcttgaacaggaacagcagaaaaacgtaaatgcttctattagtacagttattttggagaactgtttggtcgatgagcaagacaagaaggctgctcttttcactgaatgccaaaagtatgctgtggaaaatcattcagccaatatgttggtttcacagttgatgggggaagctagatatcatggggaggagagaaaaacattgctaaagcacaatgaaaaactgaggcaagggatttcaaagcaaatgaaggttctgaatatctgcaaagatctagcacctgctgatttagctgaggacgaagttctgttgcagactgttttagatgaaaccattaacactctgagacttaaggatgaaactgaagatgtgaataggctcatgaacactgagttctcagttctctcagtagttttgttgcaattagggatggagctcagagatctgcacttacagaagtgtgccattgagaaagaagtggagagtggagaaacagagttgctttgtttgcaaaacaaaaaccaacagatgttggaacagaatgaacaactaaggaatggattacaggaaagcagtgaaagggaggaggtgctgaaaactgaagtattcatcacacaagagaaactatcttgcttgagagagtcctaccagacatcacaagatgtaattttcaacctgaccgaaaaaaatgagtccttgtctaaggaataccagtccttgagtgagaagtacaattccttggaagatgagaatgatactgttcttgaagaatgcatgatgctcgagaacctgtgcctgttctttaggggacataataatgagattgcatctgcattggcttctcttaccaatgagatggctttgttgagtttggctaagagcgatcttgatcttcaagttgatgagctgagcagaaggtcagtggcgcatgaatcagaaaatagtcacttaaaggagtacatcatatgcttggtagagattctcagaactcgattagtcctttcagagtttgatttggacaccaatcaaagtgtctgccaggagttggttgttaaacttgagaattgcatgacacagctggcgcagaaggatggtgagctaatggaagcagaggaggaagttcaactattgcaagaaaagaaccaggaactctgtggagttgttagatctctacaagttgcaactgaaggtgctaaagtggtggaaggagaactggagaagaaaatcacaagactgattgaacagtgttcttgcaaggatgtcgaaattttacttcttcaccaagacaatgaggcattgcaatcagaagttgagcaatgtgagagggaatttgttgttctgatggatgatgcaattacctcttcagtgaattctgcggtgtatgaagaaacagcattcaagcttatgatgaatggtaaagctacagagaatagagcaatatccctaaaggagttgctaatgaaggaggtctcttcccgagatgctcacattgaggagttgcagaaaaagttggctggcattcaggacgaacatgcagaactaaaagctgagttgaacacacatctagctctcgtagcatcattggctgatcatgtcagtgtgttggaagaagattgccgttctctgtcaaaaccctgtagtacagaagacaaagaggaaaccgcatgtgtacatcatgttcaagagggcaatgatgggctggaatctcattgcttacccaaaggaactccagagttacaagggttgattgcaagaatagaagcacttcaagtagttgtatcaaatgctaaagatcgtcaagatcaggagtcagctgagtctgcagctaaattggcggcagtaagtgcagaaattcaagaccttaaagcaagaggtggctcacgcatggagggaaaagaaatatattctgatcatgagaaacaagatgttgagatctccaaagggaagcaagtccagatcatgaaggatattgagctggaccaaatatccacttgtccaccatatggtgctcgagctgccctctatccgcttggaactggtgcaaatgccgaactcgatgacgatatgcttcagctgtgggaggctgcagagaggagctgcaagaaccaaacggccaagtcctcgtcatctgagcacgacatacaagccgtcgaggatctgaagagtgagcacccttcgtctgagctagcaaggggaagagaccttggaatcaataagctagaagcgtcgaagggagctgcagagcctcatgaggcgtggagcaagaacgtacttgagaggctcacttctgatgctcagaggctgttgagcatccaagcgagcattgaagagctgaagcagaaaatggaggggcagtcaaagggaaaatcccctatgaactctgagtacagcagtgtgagcgctcaggtgcatgagacagagggccatgtcttggaacagatcaatctgaacaacaaattgactaggacggctgagaactaccccacactgtcagataatatgagcaccgagcgagaagggtattccagcaggaggaagatctccgagcaggtgcagaaagggtcggagaatgtggcaaggttggaactggagcttcagaagattcagtatgtcttgctgaagcttgaggaagagcacgagtacagaaggctcaaagtctctgataagcgcactcgcgtgcttttgagggactatctgtatgggaggaaggaccgcggtggcgggcagaagaaaaagaagagggtcccgttctgtggttgtgttcgtccgaaatcaagaacagagccgtagcctttctttttgttcgacctgcacctccaagtggtagccgtagtccgaaatcaagaaataaaacaaaatcgacctgcacctccaagtggttggctaagtgtcgcctgtgcattggaagaggaggtggtgttcctaggatccctttgtaattgagttagcattttagtatcttttttcttttatttttgaaactagcattatagtatcctgatgaagaagcttatgtactaaattttttgttttcctgtctaaatgaggccattctggctagtttaatgcgttaatactgtcgtatatcaaggcgttctctttccatctataatagcttcgtgtttacagcccaagcagtgcattttgcttccaggttcagactgcagaagcaaagcaccgggactagtaagtcatttctttaatattgatgaataatctcataaggtataacgtcatctctttctttaat

SEQ ID NO: 53169 - DNA, 7523 bp, Zea Mays
cccaaattgtgcgccatccaatttattgaggcccgaaacaccagctcagggtcatgtatgtgctcatggcatcaccttcgcccgtctggcttcaaaggctgatcgcgagtagtctctatccccttcctgtattgtccgtttggggtggggtccgcctcctactgtgctgaagcagcctttcttcttggcactacgcccgcccgcccaccggaccctgcagcagagtccactgtccacggccaaaggcgagagagagagagagagagagagagagagagagagagagagagcacgggatgggttgaggaacgagatggagggagaaagtgggcagcctgctggatcttggcatctcgccgccgccgctcacttccgctccacctgtttggtgcagtgtgggctagttatctactagacttgccactggtgcagattccgttgatcccacatctgaaaagcaggggagtcgacgaccctcatggttttgaggataatatattgcatctctgcactgttctaagcgtgaggaagtaaagcattatttattggttggagtagtttctgttgctatccggcaccaatggcgactttggttcgtcatgattcaaggcagtactcttggtggtgggttagccatatcagccccaagaactcgaaatggctccaggaaaatctcagcgacatggacacaaaggttaaagcaatgatcaaacttatcaatgaagatgctgattcttttgcaaggagagcagagatgtactacaagaaacgtccagagctaatgaaatttgtggaggaattctatcgagcataccgtgcgctggcagaaagatacgatcaggccactggggcacttcgtcaggctcacagaacaatttctgaagcatttccaaatcaaatgccgtcaatgtcagacgagtcaccctcttctttcagccaagagatggagcctcatactccagatatgtctacttttacacgtgcggcatttgattctgatgatcttcagaaggatggagttggtatgtcaccacagcgtttcacctccaagagaaatggtacacaccctgaggaaacaagtgcattgtcaagtagaaaaggtctaaagctgttcaatgatttgtcatcgagtagtgaaaatgctcctcgtgctggttttgatgggaaagtacggaaaggcctaacctttgaaagcccagaagttaaagggaaagatggtatcagcaatgagatggcaaatttgcagcaagaagttgcaagactattatccgagagccagaatctgaaacagcagatgctgtcagaatccgagcgggcaaacaaagctgaaaatgagatgcaaatgctcaaggcaacagtattgcaattaagtgctgataaagacacatcacttacgcaatataatcattcctctgagcgaatatctacgttggagtccgagctcttgaaggcgcaggctgacctcaagaagttaactgatgaaatggctgcagatgtccagaagctaattaatgctgaaacactcaatattgctatactgtctgaggctgagggtttggatcagaagatgaagatgcaacaacaagaactagaacaaaagcttaaggaattggagagtttccgctcaagcttccaggaggagcatgaaaagcgtatgcaggctgaaagtgctctactttcccaggggaaggaacttgctcaatctcatgaagaagtacagaggttgactatagaaataaagatggcgaatgaaaagttgaatgagctcaagcagaccaaggaggaccttcatgacactgtttgtgagctgaagagggatgttgagcgccttacagaacaaaaccagtcatctgaggtgcttatacgggaacttggtgacgagataaatacactcaaggattcaaaaaatgaactccaaagtgaaataaaaagccttaagagcaccatttcacagctaaacactgagaagaatgcagctgcgcttcaacaccagcagtctgtggagcaggtttcggtaatcgaatctcagctgtcaaagctacagtcagagctagatgagactgagcagaaagtacagttgctgacacaagatcttgaaaagaaaaaagaagaagcggagaatatccatttcaagctgcaagatgaatgccataggcgtatgcaaattgaagcaactcttctcatgacagagggtctacattcccagttgcaagaagaaatgaaaacactgacacaagattttgacggatcaacaaagaagcttagtgagttagaaaataataagttagacctggagagcacactgaaagaactgaataacaccattttaggtttgaactcggagaaggatgcagcactccttcaacaacagcagtctttagacaaagtatctgatttggaattagaactctcaaagatgcagttggaaatggagaagtctgagcaaaaaattctcttactggagcaagaaattgcacggaagactgaaagtgtcgacagcttggagataagttttaaagatgaatgtgagaagaggctacaagcccaaacatcgcttgtgtcattggagaaaatgtattgccagtcacaagaagatgttagaaggttgcagatagagattgagaagcagaatgacaagttgaatgagttggagaacttgtcatctgaacttaacaacaccatcctacttgtaaacactgagaaagatgcaaccctccatgagaaccagcagtccttagcgagaatattggatcttgaatctgaactcatggtcttgaaaactgaactggagaatgttgaaaggaaagttcacatgatagagcaagaactcatatataagaaagaagaagcggataacctccaaattagcctacaagatgaaactcaaaaacgggttgatggtgaaacatctcttcttatgatgaaaaatcttcattcggagtcacaaaatgaagtgagagggttggcactggaactcgagaagctgaatggtaatttaagacaggtggagaacagtaaggttgatcttgaaaacattgtaaccaagcatacggaggaaatccatatccttcgtgaacagaatctttctactgagcttatgataaaggacctccatcttgaattggatgtattgaaggatttgaatgtgaaacttcaagcagaaatggatttacacaaaggtgaaaaagaagtacttcagagagagtttacttctcaaagggaagagaaggaaaatctagaggggatacaccacactctggtggatgagatggataccctaaaaactactacaacaatgaaccagaagttgattgaggaattgcaaatcacaaacttaaaactgaaggaagtgtgtgcaaggagtgaagttgagaaggcacttctctcagaaaaactccaagaggtggagaagctatctgaagaatattcactcttggagaactcactttcagatgcaaatgctgaaatggatgcattgagggagaagataaaagcacttgaagcttcagaaagctctctcaaggatataatttcctgtcatgtttctgagaaggctgttcttgtatcagagctagagatccttggtaaaagattatctgatgctttagagaacaaatctatcttggatatctcattatctgatatgaaactagacctagaagatttgagaacaaagctgaaagattctgaagaatcctgtcagtatctccttgcaaataactcagcactttctggtgaactggatgcattgagggagaagataaaagcactacaggcctcagaaaggtctctgaaggatgaaatttcctgttatgtttctgaaaaggttgttcttgcatcagaggtagagatccttggtaaaagtttatctgaggtttcagagaagaattctatcttggatacctcattatgtgatatgaaaactgagttagatgaattgagaacaaagctgaacgattctgaagaatcctgccagactcaccttacaaataattcagctctttctgctgaaaagaacaatctgttctctcagctggagagcattacattggccatgaaagcactagaaggtatgcacaccaatctggaacagatgcactcctctgtatcaagagagaaggattttgcatatgatcaagtaagggaactgcaggatcagttgagaattaagaatgaggaatttgaagtgttagcaaagtcacatcaattgcaagcaaacagctatgagatacaaatttcttctctgcaagagaaaaaccattatatggaggaggtgcttgaacaggaacagcagaaaaacgtaaatgcttctattagtacagttattttggagaactgtttggtcgatgagcaagacaagaaggctgctcttttcactgaatgccaaaagtatgctgtggaaaatcattcagccaatatgttggtttcacagttgatgggggaagctagatatcatggggaggagagaaaaacattgctaaagcacaatgaaaaactgaggcaagggatttcaaagcaaatgaaggttctgaatatctgcaaagatctagcacctgctgatttagctgaggacgaagttctgttgcagactgttttagatgaaaccattaacactctgagacttaaggatgaaactgaagatgtgaataggctcatgaacactgagttctcagttctctcagtagttttgttgcaattagggatggagctcagagatctgcacttacagaagtgtgccattgagaaagaagtggagagtggagaaacagagttgctttgtttgcaaaacaaaaaccaacagatgttggaacagaatgaacaactaaggaatggattacaggaaagcagtgaaagggaggaggtgctgaaaactgaagtattcatcacacaagagaaactatcttgcttgagagagtcctaccagacatcacaagatgtaattttcaacctgaccgaaaaaaatgagtccttgtctaaggaataccagtccttgagtgagaagtacaattccttggaagatgagaatgatactgttcttgaagaatgcatgatgctcgagaacctgtgcctgttctttaggggacataataatgagattgcatctgcattggcttctcttaccaatgagatggctttgttgagtttggctaagagcgatcttgatcttcaagttgatgagctgagcagaaggtcagtggcgcatgaatcagaaaatagtcacttaaaggagtacatcatatgcttggtagagattctcagaactcgattagtcctttcagagtttgatttggacaccaatcaaagtgtctgccaggagttggttgttaaacttgagaattgcatgacacagctggcgcagaaggatggtgagctaatggaagcagaggaggaagttcaactattgcaagaaaagaaccaggaactctgtggagttgttagatctctacaagttgcaactgaaggtgctaaagtggtggaaggagaactggagaagaaaatcacaagactgattgaacagtgttcttgcaaggatgtcgaaattttacttcttcaccaagacaatgaggcattgcaatcagaagttgagcaatgtgagagggaatttgttgttctgatggatgatgcaattacctcttcagtgaattctgcggtgtatgaagaaacagcattcaagcttatgatgaatggtaaagctacagagaatagagcaatatccctaaaggagttgctaatgaaggaggtctcttcccgagatgctcacattgaggagttgcagaaaaagttggctggcattcaggacgaacatgcagaactaaaagctgagttgaacacacatctagctctcgtagcatcattggctgatcatgtcagtgtgttggaagaagattgccgttctctgtcaaaaccctgtagtacagaagacaaagaggaaaccgcatgtgtacatcatgttcaagagggcaatgatgggctggaatctcattgcttacccaaaggaactccagagttacaagggttgattgcaagaatagaagcacttcaagtagttgtatcaaatgctaaagatcgtcaagatcaggagtcagctgagtctgcagctaaattggcggcagtaagtgcagaaattcaagaccttaaagcaagaggtggctcacgcatggagggaaaagaaatatattctgatcatgagaaacaagatgttgagatctccaaagggaagcaagtccagatcatgaaggatattgagctggaccaaatatccacttgtccaccatatggtgctcgagctgccctctatccgcttggaactggtgcaaatgccgaactcgatgacgatatgcttcagctgtgggaggctgcagagaggagctgcaagaaccaaacggccaagtcctcgtcatctgagcacgacatacaagccgtcgaggatctgaagagtgagcacccttcgtctgagctagcaaggggaagagaccttggaatcaataagctagaagcgtcgaagggagctgcagagcctcatgaggcgtggagcaagaacgtacttgagaggctcacttctgatgctcagaggctgttgagcatccaagcgagcattgaagagctgaagcagaaaatggaggggcagtcaaagggaaaatcccctatgaactctgagtacagcagtgtgagcgctcaggtgcatgagacagagggccatgtcttggaacagatcaatctgaacaacaaattgactaggacggctgagaactaccccacactgtcagataatatgagcaccgagcgagaagggtattccagcaggaggaagatctccgagcaggtgcagaaagggtcggagaatgtggcaaggttggaactggagcttcagaagattcagtatgtcttgctgaagcttgaggaagagcacgagtacagaaggctcaaagtctctgataagcgcactcgcgtgcttttgagggactatctgtatgggaggaaggaccgcggtggcgggcagaagaaaaagaagagggtcccgttctgtggttgtgttcgtccgaaatcaagaacagagccgtagcctttctttttgttcgacctgcacctccaagtggtagccgtagtccgaaatcaagaaataaaacaaaatcgacctgcacctccaagtggttggctaagtgtcgcctgtgcattggaagaggaggtggtgttcctaggatccctttgtaattgagttagcattttagtatcttttttcttttatttttgaaactagcattatagtatcctgatgaagaagcttatgtactaaattttttgttttcctgtctaaatgaggccattctggctagtttaatgcgttaatactgtcgtatatcaaggcgttctctttccatctataatagcttcgtgtttacagcccaagcagtgcattttgcttccaggttcagactgcagaagcaaagcaccgggactagtaagtcatttctttaatattgatgaataatctcataaggtataacgtcatctctttctttaat

SEQ ID NO: 53170 - DNA, 808 bp, Zea Mays
ctcagccatctccctgctctcgcacaccccggagcgcccttgtcaagccgacgacgtccgtccatcgccgtcgttgtgctcccatcgtccctcttgcgccggcccgctgagattcgtcgtcgccatgtcgaagttgcagtcgcgccccgttgtcgaggacgaggagtgaactccgagctttgcctcaccgacaccaaacactcgccagagggataggctcaggagttgacctgaattcaaggaccgtgggaatacatgaatacatgatgctgcctgtcccagccagaaagccaagaccaaaatgcatgcttccatttccgtgcagttggttctcgtggagaaatggaacttggcaaattaaatatctctacatcgctcctagatctcactcattcctgcccggtggctgcaattgccgaatgctctcatctagccttcatggcaaaaaaaatatgccagccttggtttgacacccacccacactggaacgccaagcctagtcggcgtgaagtagtttttaattaagtcaatattagaagcccaatttagaacaatcccttgggtctttcgatccttatgagcgcttttctagttaagtattacagatctgtagcattaaaacattgttcctcttattctttgtatctcttgtaggtattagacttgtcgcaaacattgttcatcctattcttcttgggtccggtgtacatggcactttggtgcatatattaaatcatgtccatctattctagatttaatgtctctcgccttcaagcgtagaagtggatgttagtggtagaggtttttt

SEQ ID NO: 53171 - DNA, 781 bp, Zea Mays
gtcatccgtccttcaagtaggaagacccggagccccgtgcgcatcccgctccccattcgtgcagttgctcagccatctccctgctctcgcacaccccggagcgcccttgtcaagccgacgacgtccgtccatcgccgtcgttgtgctcccatcgtccctcttgcgccgaaacactcgccagagggataggctcaggagttgacctgaattcaaggaccgtgggaatacatgaatacatgatgctgcctgtcccagccagaaagccaagaccaaaatgcatgcttccatttccgtgcagttggttctcgtggagaaatggaacttggcaaattaaatatctctacatcgctcctagatctcactcattcctgcccggtggctgcaattgccgaatgctctcatctagccttcatggcaaaaaaaatatgccagccttggtttgacacccacccacactggaacgccaagcctagtcggcgtgaagtagtttttaattaagtcaatattagaagcccaatttagaacaatcccttgggtctttcgatccttatgagcgcttttctagttaagtattacagatctgtagcattaaaacattgttcctcttattctttgtatctcttgtaggtattagacttgtcgcaaacattgttcatcctattcttcttgggtccggtgtacatggcactttggtgcatatattaaatcatgtccatctattctagatttaatgtctctcgccttcaagcgtagaagtggatgttagtggtagaggtttttt

SEQ ID NO: 53172 - DNA, 3289 bp, Zea Mays
tccgctccctctcccactcgcgctcggcaggcaggctcggcggcgtcgtcactggctgcccctcctacccgaaaatgctttgtgttggaagaatttgttcaagatattatgcaggacatgctgtatcttcattacttgtgggtatacgatgtttgtttgctcctcaaagcccacaccatgtcggctccaagtatcatgggactcaccaaagtagggacagtagtaccaaaaccttgaaaccagagctaaatattggtagatgtggcgcttgcttttccactgtcacaggaaccattctagtccaagctcatgatccatctcagctagcaatggagatagagaatgcaattgatcagcagagatttgatgatgcatggagggcttatgagaagcatgttcacatggatggacttccaagaaagtctgttttgagcaagctcatcactggcttagcagagagctgtgatcatcactggcttaagcagtcctacaatgtggtcagtcatgcatttgaagagaagcaagaattgttggataaggaacccctaatttacctatccctcattcttgcacactgtgctctgcctaatcttgctttaaatgttgtgaggaagttggtaaagatggaagcatacccacctgttgcagcatggtcggcaattttagctcatatgtgtcaaactaacactggtgcatttctcggtgcagaccttgtaatggagcttggttatcttttccaaaataatagagttgatccacggaagaagagtaaccgtcctttgctatcaatgaaacccaattcatttacattcaacatagttttgaccgcttccctcgtgtttggcactacaagaaaagctgagcagcttctcgaactaatgccgaggataggcgtgaagcctgaagtcaacttgttgattgttatggcccacatatatgaaaggaatggtcgcagagatgagattcggaaattaaagaggcatgttgatgaagcttatggtcttagtgaatcagaggttaggcagttttatgattgcttgctctcctgtcatttgaaatttggggattttgattatgcagttgatatggtactggatatgattaggaaaggtaagaatgcaaagcggtcattggaagcagctaaagcagttcttgaagctgttgaaaatagaaaattttattttccttatgagaaagctgatgctgaaaacccacgctcttgtagtagccaaatgctaagtcacgcttcattcttcaaagacaacagctttgggagacttgaattggacgcaagagaatcagtcaggctattgacagataagctgcaggaacaggttggactggttaaatctgagcatggcattctccatccaactgaaacaatgtatgccaagcttgttaaagcttttctggaagcagataagatcagtgcattggcatcgtttcttgtgaaagcaagcaaagaagattctcctgtatctgttgaaagctcctttgttgttcaagtgataaatgcatgcatttctcttggcttattagagcaagcacatgatcttctggatgaaatgagattttctggaattagggttggttcatccatttattcatcactcctaaaagcctattgcaaagagggacaacatgaagatgacataactgcacttttgaaggatgctcaacaagctggcattcagcttgattcaagctgctatgaggatttgatacaatctagggtgaatcacagtaacaccacaggtgctctccatctttttaaagaattgaagaatttgaatgttctgaaagctggtcacatggaatttcagagaatagtgcaaggctctgatgacaatgaagctgctttgatgaccaagctagtggaggaagtcaggagtgatcatacagttgatcatgctgttcatgaatggaataatgttatccatttcttctgcaagaagagattgatgcatgatgctcacagagcactgaacaagatgcgagcttccggccatgtgccaaatgcacaaacttttcattctttaataactgcttatgctgccattggtggcaaatatgtggaagtgacagatttgtggggtgaaatgaaacttctggctagtctaagttctatgaaatttgatcaggagctcttagactctctgttgtattgttttgtgagaggtggtttcttccttcgagccatggaagttatagagatgatggagaaaagagagatgtttatagacaaatataaatacaagtccttgtggctcaagtaccacagaacattgtacaaaggtaaggctcccaaggtgcaaacagaagcacaactaaaaagaagagaagcagcaatacgtttcaagaaatggattgggttgacatgagagcaagaagttcaactcaagctatatgaactgatcaggaattctttgattatctgctgtatggatggatctttacaaattctgtaaaatcgtagttgcgaagtttgttagaagccaacacttacaatataatggtgttgcatggcattaagaaagggggcatggcattaagaaaggggtcttggagcatttgagcgcgtttgggagtcttggacatcttcaaagtgcagtttcttcctttggcttgtcatgcacaacagatgctggaccgcagactgtcttactaaaagaggactaccccaccccagtgcgtgtcccctttgcgaccaagaaggggaaacaatacaacatcttctcatcttttgcgtctttgcaagacagttctggtacttcttgttgcgcaggtctgggttgcctaatctttcaccagacaatgcttcttgcagccttgatgactggtggagcagcgctgtggagaaggttccccgtgatctccaatcaggcttcaattctctagttattcttggcgcttggagcctctggcgtcatcgcaacgactatgtgttcaatgggaggtcgtcgagcctagcgagtactctcaccctcgctggcgatgagctcaggatgtggtgtagtgccggggcgaaagggttgaacctgctttcaactcttgtgtttatgcttgacccaggggatagtcttgtgtcttgttcagagtggttgtgtgtggtggctgtgttgcgtcttgtgtgtcttgttgtgtcatgtgtgttgtgttgtaccttcttatatctattaatggaatgatacgcagatctcctgcgtgttcgagaaaaaaaagaaaaggggcttggtgcattttcaaggaatacaatagacacctcatgattactgagagttggatttag

SEQ ID NO: 53173 - DNA, 3322 bp, Zea Mays
ccggcttcttcaatcttcatcttccgctccctctcccactcgcgctcggcaggcaggctcggcggcgtcgtcactggctgcccctcctacccgaaaatgctttgtgttggaagaatttgttcaagatattatgcaggacatgctgtatcttcattacttgtgggtatacgatgtttgtttgctcctcaaagcccacaccatgtcggctccaagtatcatgggactcaccaaagtagggacagtagtaccaaaaccttgaaaccagagctaaatattggtagatgtggcgcttgcttttccactgtcacaggaaccattctagtccaagctcatgatccatctcagctagcaatggagatagagaatgcaattgatcagcagagatttgatgatgcatggagggcttatgagaagcatgttcacatggatggacttccaagaaagtctgttttgagcaagctcatcactggcttagcagagagctgtgatcatcactggcttaagcagtcctacaatgtggtcagtcatgcatttgaagagaagcaagaattgttggataaggaacccctaatttacctatccctcattcttgcacactgtgctctgcctaatcttgctttaaatgttgtgaggaagttggtaaagatggaagcatacccacctgttgcagcatggtcggcaattttagctcatatgtgtcaaactaacactggtgcatttctcggtgcagaccttgtaatggagcttggttatcttttccaaaataatagagttgatccacggaagaagagtaaccgtcctttgctatcaatgaaacccaattcatttacattcaacatagttttgaccgcttccctcgtgtttggcactacaagaaaagctgagcagcttctcgaactaatgccgaggataggcgtgaagcctgaagtcaacttgttgattgttatggcccacatatatgaaaggaatggtcgcagagatgagattcggaaattaaagaggcatgttgatgaagcttatggtcttagtgaatcagaggttaggcagttttatgattgcttgctctcctgtcatttgaaatttggggattttgattatgcagttgatatggtactggatatgattaggaaaggtaagaatgcaaagcggtcattggaagcagctaaagcagttcttgaagctgttgaaaatagaaaattttattttccttatgagaaagctgatgctgaaaacccacgctcttgtagtagccaaatgctaagtcacgcttcattcttcaaagacaacagctttgggagacttgaattggacgcaagagaatcagtcaggctattgacagataagctgcaggaacaggttggactggttaaatctgagcatggcattctccatccaactgaaacaatgtatgccaagcttgttaaagcttttctggaagcagataagatcagtgcattggcatcgtttcttgtgaaagcaagcaaagaagattctcctgtatctgttgaaagctcctttgttgttcaagtgataaatgcatgcatttctcttggcttattagagcaagcacatgatcttctggatgaaatgagattttctggaattagggttggttcatccatttattcatcactcctaaaagcctattgcaaagagggacaacatgaagatgacataactgcacttttgaaggatgctcaacaagctggcattcagcttgattcaagctgctatgaggatttgatacaatctagggtgaatcacagtaacaccacaggtgctctccatctttttaaagaattgaagaatttgaatgttctgaaagctggtcacatggaatttcagagaatagtgcaaggctctgatgacaatgaagctgctttgatgaccaagctagtggaggaagtcaggagtgatcatacagttgatcatgctgttcatgaatggaataatgttatccatttcttctgcaagaagagattgatgcatgatgctcacagagcactgaacaagatgcgagcttccggccatgtgccaaatgcacaaacttttcattctttaataactgcttatgctgccattggtggcaaatatgtggaagtgacagatttgtggggtgaaatgaaacttctggctagtctaagttctatgaaatttgatcaggagctcttagactctctgttgtattgttttgtgagaggtggtttcttccttcgagccatggaagttatagagatgatggagaaaagagagatgtttatagacaaatataaatacaagtccttgtggctcaagtaccacagaacattgtacaaaggtaaggctcccaaggtgcaaacagaagcacaactaaaaagaagagaagcagcaatacgtttcaagaaatggattgggttgacatgagagcaagaagttcaactcaagctatatgaactgatcaggaattctttgattatctgctgtatggatggatctttacaaattctgtaaaatcgtagttgcgaagtttgttagaagaaatgcttcagccaacacttacaatataatggtgttgcatggcattaagaaagggggcatggcattaagaaaggggtcttggagcatttgagcgcgtttgggagtcttggacatcttcaaagtgcagtttcttcctttggcttgtcatgcacaacagatgctggaccgcagactgtcttactaaaagaggactaccccaccccagtgcgtgtcccctttgcgaccaagaaggggaaacaatacaacatcttctcatcttttgcgtctttgcaagacagttctggtacttcttgttgcgcaggtctgggttgcctaatctttcaccagacaatgcttcttgcagccttgatgactggtggagcagcgctgtggagaaggttccccgtgatctccaatcaggcttcaattctctagttattcttggcgcttggagcctctggcgtcatcgcaacgactatgtgttcaatgggaggtcgtcgagcctagcgagtactctcaccctcgctggcgatgagctcaggatgtggtgtagtgccggggcgaaagggttgaacctgctttcaactcttgtgtttatgcttgacccaggggatagtcttgtgtcttgttcagagtggttgtgtgtggtggctgtgttgcgtcttgtgtgtcttgttgtgtcatgtgtgttgtgttgtaccttcttatatctattaatggaatgatacgcagatctcctgcgtgttcgagaaaaaaaagaaaaggggcttggtgcattttcaaggaatacaatagacacctcatgattactgagagttggatttag

SEQ ID NO: 53174 - DNA, 3144 bp, Zea Mays
cttaaatccactgcttataaaaaagccaaaaaagtaagaaaagaaaagaataatacgaacttttatttagtggcccgtctaggagcccattaactcacataaaaacccacgttcaaccacactcacacggttttttttttctctaaccttttcactgctccagcgccggcttcttcaatcttcatcttccgctccctctcccactcgcgctcggcaggcaggctcggcggcgtcgtcactggctgcccctcctacccgaaaatgctttgtgttggaagaatttgttcaagatattatgcaggacatgctgtatcttcattacttgtgggtatacgatgtttgtttgctcctcaaagcccacaccatgtcggctccaagtatcatgggactcaccaaagtagggacagtagtaccaaaaccttgaaaccagagctaaatattggtagatgtggcgcttgcttttccactgtcacaggaaccattctagtccaagctcatgatccatctcagctagcaatggagatagagaatgcaattgatcagcagagatttgatgatgcatggagggcttatgagaagcatgttcacatggatggacttccaagaaagtctgttttgagcaagctcatcactggcttagcagagagctgtgatcatcactggcttaagcagtcctacaatgtggtcagtcatgcatttgaagagaagcaagaattgttggataaggaacccctaatttacctatccctcattcttgcacactgtgctctgcctaatcttgctttaaatgttgtgaggaagttggtaaagatggaagcatacccacctgttgcagcatggtcggcaattttagctcatatgtgtcaaactaacactggtgcatttctcggtgcagaccttgtaatggagcttggttatcttttccaaaataatagagttgatccacggaagaagagtaaccgtcctttgctatcaatgaaacccaattcatttacattcaacatagttttgaccgcttccctcgtgtttggcactacaagaaaagctgagcagcttctcgaactaatgccgaggataggcgtgaagcctgaagtcaacttgttgattgttatggcccacatatatgaaaggaatggtcgcagagatgagattcggaaattaaagaggcatgttgatgaagcttatggtcttagtgaatcagaggttaggcagttttatgattgcttgctctcctgtcatttgaaatttggggattttgattatgcagttgatatggtactggatatgattaggaaaggtaagaatgcaaagcggtcattggaagcagctaaagcagttcttgaagctgttgaaaatagaaaattttattttccttatgagaaagctgatgctgaaaacccacgctcttgtagtagccaaatgctaagtcacgcttcattcttcaaagacaacagctttgggagacttgaattggacgcaagagaatcagtcaggctattgacagataagctgcaggaacaggttggactggttaaatctgagcatggcattctccatccaactgaaacaatgtatgccaagcttgttaaagcttttctggaagcagataagatcagtgcattggcatcgtttcttgtgaaagcaagcaaagaagattctcctgtatctgttgaaagctcctttgttgttcaagtgataaatgcatgcatttctcttggcttattagagcaagcacatgatcttctggatgaaatgagattttctggaattagggttggttcatccatttattcatcactcctaaaagcctattgcaaagagggacaacatgaagatgacataactgcacttttgaaggatgctcaacaagctggcattcagcttgattcaagctgctatgaggatttgatacaatctagggtgaatcacagtaacaccacaggtgctctccatctttttaaagaattgaagaatttgaatgttctgaaagctggtcacatggaatttcagagaatagtgcaaggctctgatgacaatgaagctgctttgatgaccaagctagtggaggaagtcaggagtgatcatacagttgatcatgctgttcatgaatggaataatgttatccatttcttctgcaagaagagattgatgcatgatgctcacagagcactgaacaagatgcgagcttccggccatgtgccaaatgcacaaacttttcattctttaataactgcttatgctgccattggtggcaaatatgtggaagtgacagatttgtggggtgaaatgaaacttctggctagtctaagttctatgaaatttgatcaggagctcttagactctctgttgtattgttttgtgagaggtggtttcttccttcgagccatggaagttatagagatgatggagaaaagagagatgtttatagacaaatataaatacaagtccttgtggctcaagtaccacagaacattgtacaaaggtaaggctcccaaggtgcaaacagaagcacaactaaaaagaagagaagcagcaatacgtttcaagaaatggattgggttgacatgagagcaagaagttcaactcaagctatatgaactgatcaggaattctttgattatctgctgtatggatggatctttacaaattctgtaaaatcgtagttgcgaagtttgttagaagccttgatgactggtggagcagcgctgtggagaaggttccccgtgatctccaatcaggcttcaattctctagttattcttggcgcttggagcctctggcgtcatcgcaacgactatgtgttcaatgggaggtcgtcgagcctagcgagtactctcaccctcgctggcgatgagctcaggatgtggtgtagtgccggggcgaaagggttgaacctgctttcaactcttgtgtttatgcttgacccaggggatagtcttgtgtcttgttcagagtggttgtgtgtggtggctgtgttgcgtcttgtgtgtcttgttgtgtcatgtgtgttgtgttgtaccttcttatatctattaatggaatgatacgcagatctcctgcgtgttcgagaaaaaaaagaaaaggggcttggtgcattttcaaggaatacaatagacacctcatgattactgagagttggatttag

SEQ ID NO: 53175 - DNA, 2785 bp, Zea Mays
gtcagttacagatctgacgctaccttccgttcgattcccttcgcgtctttcttcctctgctggactcaagtactgcaaattagagcagaaaatcctgtgtaagcaatttccattcgcgctgtcatctcttcctcgatcgaaggtttgctgtgaatttgtagattgcggttttgatgttgtggacaattttgtggctacatacggttgcttcgtccatctgtacttggcttaattaacccaatcatctgctaggtctagatcaagatgagcccatgtctacttcgatcagtttagcctagtcagtgtagaactgtttggcttccgagttcagtgggtcatcaaggtgtgcatgtgtcctgggagagagagaagaaaatccagtctgcaggatggatgcaatggcacctgaagaatatgcctcgcaatccaagctactgcaagaattcaccaacgtcccaagcatcgacagtgcttccatcctcaaaaccaacgatgaggacagatccagagcgatgttctccattagccagccagacttactggcgaacaccaacaggaaatacgttttgtattctcatattacgacgagagccggcaccggcaccacctctccggatttccagtggtctcctttccccactgaaacaaccggagtgtccgccaccgttccgtccccttccgggtcgaagctcctcgtagtgcgaaacggggagagaggatgccccaccaagctcgaaatcgtttgtcagtcacatgtggagaaggagatacacgtagcaggttctgtgcacggtcctctctacacggatgaatggtttcatggtgtttcttggaatcaagaagagaccttggtagcatacgtcgctgaagctccagccacaccaagaccagctttcaatcgttccggatacacgagggaagaaggttgttccgagggagactgcagtgcctggaaagggcagggcgtgtgggaggaggactggggtgaaacgtactccaagaaaggaagaccctcactgtttgttcttgacattcccagaggagaagtggtagcggctaaaggtgtcccaacatcgttgagcgttgggcaggttgtttgggctccggaatcaccaggtggcaggcacaagtatctggttttcgttggatggtcagagcgcaacgggttcttccagaacactgctagaaaactcggcatcaagtactgctccaacaggccatgtgctctctatgcagccccttgccctatccaaggaccagagccgcctggcaatccaccggctacgaccagtgatggtaaatcaggctccggcggtgcggtggcgcgcaacctaaccccaggcttcagcagtgcattgtttccacggttcagccgggatggaaggcttctggtcttcctgtcttcaaaacaagccgtggacagcggtgcacacaacgcaacggattccctgcatgtgatcaactggccttcggactggaaaatggatgaacaactcgatgttactcaagtggtacctgttgtaatgtgccctgaagacgacgacggcggctgttttccaggcctctactgttcatccgtgctacccgatccttggctctccgacggacgtacagtgatattgacatcttcctggagaagtgccgaagtgatactatcggttgatgtgttaagtggcaaagtggcaagaataactccggaagactcgtgctactcgtggcgtgctcttgcgttagatggcaccaatgttcttgctgtgtcaagtagtcccatcgaccctccttccatcagctatggacgacgtctcgccgtgacaccagctgagggtgaagcacgtagatggacctgggatgaagttactagtccattcatggcatccaacagcaaggttaagtccttgttgctgcatcacagcgtcagcatacttaaaatccctgtccctagcccatctgctgacctctctgacggtggcaagcttccactcgaggccatattcgtgtcctgcagctgcaagggtagctcgcgcagtccaactgttgtggtccttcacggcggcccacactcggtgtccgtatcaagctactcaaaatcctcggcgttccttgcttcgcttggattcaacctgcttgttgtaaactaccgaggcacgccaggttatggagaggaagccttgcagtcgctccctggaaaagttggatcccagtacgcaaggagcctgatagaaagaggaggcgatgtcaaaatcatgatgttcccagaggacatacacgaaatcaatttaccgcggtccgatttcgaaagcttcctcaacattggggtatggttcaagaaacatctgaatgcagtggcatgaagcagatccggcttggtggttcatctaggcgaccatgtacagcattgctactttaagtttgtcaagaattcaaacttttttgtgaaaaaataaatgctcattcatactggtttcatacgacgttctagtgagtgttccaaagacatcgcctagccgtccagtcatatctagctgactagcttgtcttggagaacaatggcgccttgtagcctaacctgacatgtacaatgatgtttaatatagggtctcttaagttgtttaaaatggacattccgtgaagagacgtctctgactcgcaacccaagtaacaacagatgtctcacttttcgctgtacgaattcgtcgtctgatctattgatccgatgttgtacatgtacatttacttttgtatttattaatagactacgattatagacacttcgttatataataga

SEQ ID NO: 53176 - DNA, 2668 bp, Zea Mays
gtcagttacagatctgacgctaccttccgttcgattcccttcgcgtctttcttcctctgctggactcaagtactgcaaattagagcagaaaatcctgtgtctagatcaagatgagcccatgtctacttcgatcagtttagcctagtcagtgtagaactgtttggcttccgagttcagatatttagctagcatagccaagtgaattttgttcctccagtgggtcatcaaggtgtgcatgtgtcctgggagagagagaagaaaatccagtctgcaggatggatgcaatggcacctgaagaatatgcctcgcaatccaagctactgcaagaattcaccaacgtcccaagcatcgacagtgcttccatcctcaaaaccaacgatgaggacagatccagagcgatgttctccattagccagccagacttactggcgaacaccaacaggaaatacgttttgtattctcatattacgacgagagccggcaccggcaccacctctccggatttccagtggtctcctttccccactgaaacaaccggagtgtccgccaccgttccgtccccttccgggtcgaagctcctcgtagtgcgaaacggggagagaggatgccccaccaagctcgaaatcgtttgtcagtcacatgtggagaaggagatacacgtagcaggttctgtgcacggtcctctctacacggatgaatggtttcatggtgtttcttggaatcaagaagagaccttggtagcatacgtcgctgaagctccagccacaccaagaccagctttcaatcgttccggatacacgagggaagaaggttgttccgagggagactgcagtgcctggaaagggcagggcgtgtgggaggaggactggggtgaaacgtactccaagaaaggaagaccctcactgtttgttcttgacattcccagaggagaagtggtagcggctaaaggtgtcccaacatcgttgagcgttgggcaggttgtttgggctccggaatcaccaggtggcaggcacaagtatctggttttcgttggatggtcagagcgcaacgggttcttccagaacactgctagaaaactcggcatcaagtactgctccaacaggccatgtgctctctatgcagccccttgccctatccaaggaccagagccgcctggcaatccaccggctacgactgatggtaaatcaggctccggcggtgcggtggcgcgcaacctaaccccaggcttcagcagtgcattgtttccacggttcagccgggatggaaggcttctggtcttcctgtcttcaaaacaagccgtggacagcggtgcacacaacgcaacggattccctgcatgtgatcaactggccttcggactggaaaatggatgaacaactcgatgttactcaagtggtacctgttgtaatgtgccctgaagacgacgacggcggctgttttccaggcctctactgttcatccgtgctacccgatccttggctctccgacggacgtacagtgatattgacatcttcctggagaagtgccgaagtgatactatcggttgatgtgttaagtggcaaagtggcaagaataactccggaagactcgtgctactcgtggcgtgctcttgcgttagatggcaccaatgttcttgctgtgtcaagtagtcccatcgaccctccttccatcagctatggacgacgtctcgccgtgacaccagctgagggtgaagcacgtagatggacctgggatgaagttactagtccattcatggcatccaacagcaaggttaagtccttgttgctgcatcacagcgtcagcatacttaaaatccctgtccctagcccatctgctgacctctctgacggtggcaagcttccactcgaggccatattcgtgtcctgcagctgcaagggtagctcgcgcagtccaactgttgtggtccttcacggcggcccacactcggtgtccgtatcaagctactcaaaatcctcggcgttccttgcttcgcttggattcaacctgcttgttgtaaactaccgaggcacgccaggttatggagaggaagccttgcagtcgctccctggaaaagttggatcccagtacgcaaggagcctgatagaaagaggaggcgatgtcaaaatcatgatgttcccagaggacatacacgaaatcaatttaccgcggtccgatttcgaaagcttcctcaacattggggtatggttcaagaaacatctgaatgcagtggcatgaagcagatccggcttggtggttcatctaggcgaccatgtacagcattgctactttaagtttgtcaagaattcaaacttttttgtgaaaaaataaatgctcattcatactggtttcatacgacgttctagtgagtgttccaaagacatcgcctagccgtccagtcatatctagctgactagcttgtcttggagaacaatggcgccttgtagcctaacctgacatgtacaatgatgtttaatatagggtctcttaagttgtttaaaatggacattccgtgaagagacgtctctgactcgcaacccaagtaacaacagatgtctcacttttcgctgtacgaattcgtcgtctgatctattgatccgatgttgtacatgtacatttacttttgtatttattaatagactacgattatagacacttcgttatataataga

SEQ ID NO: 53177 - DNA, 3033 bp, Zea Mays
gtcagttacagatctgacgctaccttccgttcgattcccttcgcgtctttcttcctctgctggactcaagtactgcaaattagagcagaaaatcctgtgtaagcaatttccattcgcgctgtcatctcttcctcgatcgaaggtctagatcaagatgagcccatgtctacttcgatcagtttagcctagtcagtgtagaactgtttggcttccgagttcagatatttagctagcatagccaagtgaattttgttcctccagtgggtcatcaaggtgtgcatgtgtcctgggagagagagaagaaaatccagtctgcaggatggatgcaatggcacctgaagaatatgcctcgcaatccaagctactgcaagaattcaccaacgtcccaagcatcgacagtgcttccatcctcaaaaccaacgatgaggacagatccagagcgatgttctccattagccagccagacttactggcgaacaccaacaggaaatacgttttgtattctcatattacgacgagagccggcaccggcaccacctctccggatttccagtggtctcctttccccactgaaacaaccggagtgtccgccaccgttccgtccccttccgggtcgaagctcctcgtagtgcgaaacggggagagaggatgccccaccaagctcgaaatcgtttgtcagtcacatgtggagaaggagatacacgtagcaggttctgtgcacggtcctctctacacggatgaatggtttcatggtgtttcttggaatcaagaagagaccttggtagcatacgtcgctgaagctccagccacaccaagaccagctttcaatcgttccggatacacgagggaagaaggttgttccgagggagactgcagtgcctggaaagggcagggcgtgtgggaggaggactggggtgaaacgtactccaagaaaggaagaccctcactgtttgttcttgacattcccagaggagaagtggtagcggctaaaggtgtcccaacatcgttgagcgttgggcaggttgtttgggctccggaatcaccaggtggcaggcacaagtatctggttttcgttggatggtcagagcgcaacgggttcttccagaacactgctagaaaactcggcatcaagtactgctccaacaggccatgtgctctctatgcagccccttgccctatccaaggaccagagccgcctggcaatccaccggctacgaccagtgatggtaaatcaggctccggcggtgcggtggcgcgcaacctaaccccaggcttcagcagtgcattgtttccacggttcagccgggatggaaggcttctggtcttcctgtcttcaaaacaagccgtggacagcggtgcacacaacgcaacggattccctgcatgtgatcaactggccttcggactggaaaatggatgaacaactcgatgttactcaagtggtacctgttgtaatgtgccctgaagacgacgacggcggctgttttccaggcctctactgttcatccgtgctacccgatccttggctctccgacggacgtacagtgatattgacatcttcctggagaagtgccgaagtgatactatcggttgatgtgttaagtggcaaagtggcaagaataactccggaagactcgtgctactcgtggcgtgctcttgcgttagatggcaccaatgttcttgctgtgtcaagtagtcccatcgaccctccttccatcagctatggacgacgtctcgccgtgacaccagctgagggtgaagcacgtagatggacctgggatgaagttactagtccattcatggcatccaacagcaaggttaagtccttgttgctgcatcacagcgtcagcatacttaaaatccctgtccctagcccatctgctgacctctctgacggtggcaagcttccactcgaggccatattcgtgtcctgcagctgcaagggtagctcgcgcagtccaactgttgtggtccttcacggcggcccacactcggtgtccgtatcaagctactcaaaatcctcggcgttccttgcttcgcttggattcaacctgcttgttgtaaactaccgaggcacgccaggttatggagaggaagccttgcagtcgctccctggaaaagttggatcccaggatgttgaggactgccttgcagcgctagacttcgccgtcgaggaagagctggctccggacaggttcgccgtggcagctgctcggaaccctgtctgcaacctgtcgctgatggccggcaccaccgacatcccggactggtgttacgtagtggcctgcggaacccaagcgaagcgatacgcctctgaagcgccttcgcccggccatcttcgtctcttctaccagagatcgccgatcgcccatgtctctaaagtcaaagcgccccttcttatgcttcttggcggagctgaccttcgagtgcctgcttctaatggcctacagtacgcaaggagcctgatagaaagaggaggcgatgtcaaaatcatgatgttcccagaggacatacacgaaatcaatttaccgcggtccgatttcgaaagcttcctcaacattggggtatggttcaagaaacatctgaatgcagtggcatgaagcagatccggcttggtggttcatctaggcgaccatgtacagcattgctactttaagtttgtcaagaattcaaacttttttgtgaaaaaataaatgctcattcatactggtttcatacgacgttctagtgagtgttccaaagacatcgcctagccgtccagtcatatctagctgactagcttgtcttggagaacaatggcgccttgtagcctaacctgacatgtacaatgatgtttaatatagggtctcttaagttgtttaaaatggacattccgtgaagagacgtctctgactcgcaacccaagtaacaacagatgtctcacttttcgctgtacgaattcgtcgtctgatctattgatccgatgttgtacatgtacatttacttttgtatttattaatagactacgattatagacacttcgttatataataga

SEQ ID NO: 53178 - DNA, 3122 bp, Zea Mays
gtcagttacagatctgacgctaccttccgttcgattcccttcgcgtctttcttcctctgctggactcaagtactgcaaattagagcagaaaatcctgtgtaagcaatttccattcgcgctgtcatctcttcctcgatcgaaggtctagatcaagatgagcccatgtctacttcgatcagtttagcctagtcagtgtagaactgtttggcttccgagttcagatatttagctagcatagccaagtgaattttgttcctccagtgggtcatcaaggtgtgcatgtgtcctgggagagagagaagaaaatccagtctgcaggatggatgcaatggcacctgaagaatatgcctcgcaatccaagctactgcaagaattcaccaacgtcccaagcatcgacagtgcttccatcctcaaaaccaacgatgaggacagatccagagcgatgttctccattagccagccagacttactggcgaacaccaacaggaaatacgttttgtattctcatattacgacgagagccggcaccggcaccacctctccggatttccagtggtctcctttccccactgaaacaaccggagtgtccgccaccgttccgtccccttccgggtcgaagctcctcgtagtgcgaaacggggagagaggatgccccaccaagctcgaaatcgtttgtcagtcacatgtggagaaggagatacacgtagcaggttctgtgcacggtcctctctacacggatgaatggtttcatggtgtttcttggaatcaagaagagaccttggtagcatacgtcgctgaagctccagccacaccaagaccagctttcaatcgttccggatacacgagggaagaaggttgttccgagggagactgcagtgcctggaaagggcagggcgtgtgggaggaggactggggtgaaacgtactccaagaaaggaagaccctcactgtttgttcttgacattcccagaggagaagtggtagcggctaaaggtgtcccaacatcgttgagcgttgggcaggttgtttgggctccggaatcaccaggtggcaggcacaagtatctggttttcgttggatggtcagagcgcaacgggttcttccagaacactgctagaaaactcggcatcaagtactgctccaacaggccatgtgctctctatgcagccccttgccctatccaaggaccagagccgcctggcaatccaccggctacgactgatggtaaatcaggctccggcggtgcggtggcgcgcaacctaaccccaggcttcagcagtgcattgtttccacggttcagccgggatggaaggcttctggtcttcctgtcttcaaaacaagccgtggacagcggtgcacacaacgcaacggattccctgcatgtgatcaactggccttcggactggaaaatggatgaacaactcgatgttactcaagtgcttgatctgaactgtcccaggtacctgttgtaatgtgccctgaagacgacgacggcggctgttttccaggcctctactgttcatccgtgctacccgatccttggctctccgacggacgtacagtgatattgacatcttcctggagaagtgccgaagtgatactatcggttgatgtgttaagtggcaaagtggcaagaataactccggaagactcgtgctactcgtggcgtgctcttgcgttagatggcaccaatgttcttgctgtgtcaagtagtcccatcgaccctccttccatcagctatggacgacgtctcgccgtgacaccagctgagggtgaagcacgtagatggacctgggatgaagttactagtccattcatggcatccaacagcaaggttaagtccttgttgctgcatcacagcgtcagcatacttaaaatccctgtccctagcccatctgctgacctctctgacggtggcaagcttccactcgaggccatattcgtgtcctgcagctgcaagggtagctcgcgcagtccaactgttgtggtccttcacggcggcccacactcggtgtccgtatcaagctactcaaaatcctcggcgttccttgcttcgcttggattcaacctgcttgttgtaaactaccgaggcacgccaggttatggagaggaagccttgcagtcgctccctggaaaagttggatcccaggatgttgaggactgccttgcagcgctagacttcgccgtcgaggaagagctggtagatgcgtctagagtagctgttgtcgggatctcgcatggtgggttcctgacaacacatctcatcggtcaggctccggacaggttcgccgtggcagctgctcggaaccctgtctgcaacctgtcgctgatggccggcaccaccgacatcccggactggtgttacgtagtggcctgcggaacccaagcgaagcgatacgcctctgaagcgccttcgcccggccatcttcgtctcttctaccagagatcgccgatcgcccatgtctctaaagtcaaagcgccccttcttatgcttcttggcggagctgaccttcgagtgcctgcttctaatggcctacagtacgcaaggagcctgatagaaagaggaggcgatgtcaaaatcatgatgttcccagaggacatacacgaaatcaatttaccgcggtccgatttcgaaagcttcctcaacattggggtatggttcaagaaacatctgaatgcagtggcatgaagcagatccggcttggtggttcatctaggcgaccatgtacagcattgctactttaagtttgtcaagaattcaaacttttttgtgaaaaaataaatgctcattcatactggtttcatacgacgttctagtgagtgttccaaagacatcgcctagccgtccagtcatatctagctgactagcttgtcttggagaacaatggcgccttgtagcctaacctgacatgtacaatgatgtttaatatagggtctcttaagttgtttaaaatggacattccgtgaagagacgtctctgactcgcaacccaagtaacaacagatgtctcacttttcgctgtacgaattcgtcgtctgatctattgatccgatgttgtacatgtacatttacttttgtatttattaatagactacgattatagacacttcgttatataataga

SEQ ID NO: 53179 - DNA, 3118 bp, Zea Mays
aaatggtgtaatcgtctgtccgtacctactccttgtcaagatataaatttacgaggtcgcaatctgtaattcagtattcccatgacgttacctcgttaatcctccagattttaggttctagcagaatggagtgtcagttacagatctgacgctaccttccgttcgattcccttcgcgtctttcttcctctgctggactcaagtactgcaaattagagcagaaaatcctgtgtctagatcaagatgagcccatgtctacttcgatcagtttagcctagtcagtgtagaactgtttggcttccgagttcagatatttagctagcatagccaagtgaattttgttcctccagtgggtcatcaaggtgtgcatgtgtcctgggagagagagaagaaaatccagtctgcaggatggatgcaatggcacctgaagaatatgcctcgcaatccaagctactgcaagaattcaccaacgtcccaagcatcgacagtgcttccatcctcaaaaccaacgatgaggacagatccagagcgatgttctccattagccagccagacttactggcgaacaccaacaggaaatacgttttgtattctcatattacgacgagagccggcaccggcaccacctctccggatttccagtggtctcctttccccactgaaacaaccggagtgtccgccaccgttccgtccccttccgggtcgaagctcctcgtagtgcgaaacggggagagaggatgccccaccaagctcgaaatcgtttgtcagtcacatgtggagaaggagatacacgtagcaggttctgtgcacggtcctctctacacggatgaatggtttcatggtgtttcttggaatcaagaagagaccttggtagcatacgtcgctgaagctccagccacaccaagaccagctttcaatcgttccggatacacgagggaagaaggttgttccgagggagactgcagtgcctggaaagggcagggcgtgtgggaggaggactggggtgaaacgtactccaagaaaggaagaccctcactgtttgttcttgacattcccagaggagaagtggtagcggctaaaggtgtcccaacatcgttgagcgttgggcaggttgtttgggctccggaatcaccaggtggcaggcacaagtatctggttttcgttggatggtcagagcgcaacgggttcttccagaacactgctagaaaactcggcatcaagtactgctccaacaggccatgtgctctctatgcagccccttgccctatccaaggaccagagccgcctggcaatccaccggctacgactgatggtaaatcaggctccggcggtgcggtggcgcgcaacctaaccccaggcttcagcagtgcattgtttccacggttcagccgggatggaaggcttctggtcttcctgtcttcaaaacaagccgtggacagcggtgcacacaacgcaacggattccctgcatgtgatcaactggccttcggactggaaaatggatgaacaactcgatgttactcaagtggtacctgttgtaatgtgccctgaagacgacgacggcggctgttttccaggcctctactgttcatccgtgctacccgatccttggctctccgacggacgtacagtgatattgacatcttcctggagaagtgccgaagtgatactatcggttgatgtgttaagtggcaaagtggcaagaataactccggaagactcgtgctactcgtggcgtgctcttgcgttagatggcaccaatgttcttgctgtgtcaagtagtcccatcgaccctccttccatcagctatggacgacgtctcgccgtgacaccagctgagggtgaagcacgtagatggacctgggatgaagttactagtccattcatggcatccaacagcaaggttaagtccttgttgctgcatcacagcgtcagcatacttaaaatccctgtccctagcccatctgctgacctctctgacggtggcaagcttccactcgaggccatattcgtgtcctgcagctgcaagggtagctcgcgcagtccaactgttgtggtccttcacggcggcccacactcggtgtccgtatcaagctactcaaaatcctcggcgttccttgcttcgcttggattcaacctgcttgttgtaaactaccgaggcacgccaggttatggagaggaagccttgcagtcgctccctggaaaagttggatcccaggatgttgaggactgccttgcagcgctagacttcgccgtcgaggaagagctggctccggacaggttcgccgtggcagctgctcggaaccctgtctgcaacctgtcgctgatggccggcaccaccgacatcccggactggtgttacgtagtggcctgcggaacccaagcgaagcgatacgcctctgaagcgccttcgcccggccatcttcgtctcttctaccagagatcgccgatcgcccatgtctctaaagtcaaagcgccccttcttatgcttcttggcggagctgaccttcgagtgcctgcttctaatggcctacagtacgcaaggagcctgatagaaagaggaggcgatgtcaaaatcatgatgttcccagaggacatacacgaaatcaatttaccgcggtccgatttcgaaagcttcctcaacattggggtatggttcaagaaacatctgaatgcagtggcatgaagcagatccggcttggtggttcatctaggcgaccatgtacagcattgctactttaagtttgtcaagaattcaaacttttttgtgaaaaaataaatgctcattcatactggtttcatacgacgttctagtgagtgttccaaagacatcgcctagccgtccagtcatatctagctgactagcttgtcttggagaacaatggcgccttgtagcctaacctgacatgtacaatgatgtttaatatagggtctcttaagttgtttaaaatggacattccgtgaagagacgtctctgactcgcaacccaagtaacaacagatgtctcacttttcgctgtacgaattcgtcgtctgatctattgatccgatgttgtacatgtacatttacttttgtatttattaatagactacgattatagacacttcgttatataataga

SEQ ID NO: 53180 - DNA, 2647 bp, Zea Mays
gtcagttacagatctgacgctaccttccgttcgattcccttcgcgtctttcttcctctgctggactcaagtactgcaaattagagcagaaaatcctgtgtctagatcaagatgagcccatgtctacttcgatcagtttagcctagtcagtgtagaactgtttggcttccgagttcagtgggtcatcaaggtgtgcatgtgtcctgggagagagagaagaaaatccagtctgcaggatggatgcaatggcacctgaagaatatgcctcgcaatccaagctactgcaagaattcaccaacgtcccaagcatcgacagtgcttccatcctcaaaaccaacgatgaggacagatccagagcgatgttctccattagccagccagacttactggcgaacaccaacaggaaatacgttttgtattctcatattacgacgagagccggcaccggcaccacctctccggatttccagtggtctcctttccccactgaaacaaccggagtgtccgccaccgttccgtccccttccgggtcgaagctcctcgtagtgcgaaacggggagagaggatgccccaccaagctcgaaatcgtttgtcagtcacatgtggagaaggagatacacgtagcaggttctgtgcacggtcctctctacacggatgaatggtttcatggtgtttcttggaatcaagaagagaccttggtagcatacgtcgctgaagctccagccacaccaagaccagctttcaatcgttccggatacacgagggaagaaggttgttccgagggagactgcagtgcctggaaagggcagggcgtgtgggaggaggactggggtgaaacgtactccaagaaaggaagaccctcactgtttgttcttgacattcccagaggagaagtggtagcggctaaaggtgtcccaacatcgttgagcgttgggcaggttgtttgggctccggaatcaccaggtggcaggcacaagtatctggttttcgttggatggtcagagcgcaacgggttcttccagaacactgctagaaaactcggcatcaagtactgctccaacaggccatgtgctctctatgcagccccttgccctatccaaggaccagagccgcctggcaatccaccggctacgaccagtgatggtaaatcaggctccggcggtgcggtggcgcgcaacctaaccccaggcttcagcagtgcattgtttccacggttcagccgggatggaaggcttctggtcttcctgtcttcaaaacaagccgtggacagcggtgcacacaacgcaacggattccctgcatgtgatcaactggccttcggactggaaaatggatgaacaactcgatgttactcaagtggtacctgttgtaatgtgccctgaagacgacgacggcggctgttttccaggcctctactgttcatccgtgctacccgatccttggctctccgacggacgtacagtgatattgacatcttcctggagaagtgccgaagtgatactatcggttgatgtgttaagtggcaaagtggcaagaataactccggaagactcgtgctactcgtggcgtgctcttgcgttagatggcaccaatgttcttgctgtgtcaagtagtcccatcgaccctccttccatcagctatggacgacgtctcgccgtgacaccagctgagggtgaagcacgtagatggacctgggatgaagttactagtccattcatggcatccaacagcaaggttaagtccttgttgctgcatcacagcgtcagcatacttaaaatccctgtccctagcccatctgctgacctctctgacggtggcaagcttccactcgaggccatattcgtgtcctgcagctgcaagggtagctcgcgcagtccaactgttgtggtccttcacggcggcccacactcggtgtccgtatcaagctactcaaaatcctcggcgttccttgcttcgcttggattcaacctgcttgttgtaaactaccgaggcacgccaggttatggagaggaagccttgcagtcgctccctggaaaagttggatcccaggatgttgaggactgccttgcagcgctagacttcgccgtcgaggaagagctggtagatgcgtctagagtagctgttgtcgggatctcgcatggtgggttcctgacaacacatctcatcggtcaggctccggacaggttcgccgtggcagctgctcggaaccctgtctgcaacctgtcgctgatggccggcaccaccgacatcccggactggtgttacgtagtggcctgcggaacccaagcgaagcgatacgcctctgaagcgccttcgcccggccatcttcgtctcttctaccagagatcgccgatcgcccatgtctctaaagtatgctgcttctctccggcctgcctgctcctctcctaccagctggttgatttgattgtcgttttggtggtacgtacggttgatggagctttgctgagtgagagcgtgcaggtcaaagcgccccttcttatgcttcttggcggagctgaccttcgagtgcctgcttctaatggcctacaggtcttcactcgacgtgtaggactttggcatcctctgaccatccgtggtagggcattggacaatccacagttgggtaccagattgtccgcgatgacgtag

SEQ ID NO: 53181 - DNA, 2642 bp, Zea Mays
gtcagttacagatctgacgctaccttccgttcgattcccttcgcgtctttcttcctctgctggactcaagtactgcaaattagagcagaaaatcctgtgtaagcaatttccattcgcgctgtcatctcttcctcgatcgaaggtctagatcaagatgagcccatgtctacttcgatcagtttagcctagtcagtgtagaactgtttggcttccgagttcagtgggtcatcaaggtgtgcatgtgtcctgggagagagagaagaaaatccagtctgcaggatggatgcaatggcacctgaagaatatgcctcgcaatccaagctactgcaagaattcaccaacgtcccaagcatcgacagtgcttccatcctcaaaaccaacgatgaggacagatccagagcgatgttctccattagccagccagacttactggcgaacaccaacaggaaatacgttttgtattctcatattacgacgagagccggcaccggcaccacctctccggatttccagtggtctcctttccccactgaaacaaccggagtgtccgccaccgttccgtccccttccgggtcgaagctcctcgtagtgcgaaacggggagagaggatgccccaccaagctcgaaatcgtttgtcagtcacatgtggagaaggagatacacgtagcaggttctgtgcacggtcctctctacacggatgaatggtttcatggtgtttcttggaatcaagaagagaccttggtagcatacgtcgctgaagctccagccacaccaagaccagctttcaatcgttccggatacacgagggaagaaggttgttccgagggagactgcagtgcctggaaagggcagggcgtgtgggaggaggactggggtgaaacgtactccaagaaaggaagaccctcactgtttgttcttgacattcccagaggagaagtggtagcggctaaaggtgtcccaacatcgttgagcgttgggcaggttgtttgggctccggaatcaccaggtggcaggcacaagtatctggttttcgttggatggtcagagcgcaacgggttcttccagaacactgctagaaaactcggcatcaagtactgctccaacaggccatgtgctctctatgcagccccttgccctatccaaggaccagagccgcctggcaatccaccggctacgaccagtgatggtaaatcaggctccggcggtgcggtggcgcgcaacctaaccccaggcttcagcagtgcattgtttccacggttcagccgggatggaaggcttctggtcttcctgtcttcaaaacaagccgtggacagcggtgcacacaacgcaacggattccctgcatgtgatcaactggccttcggactggaaaatggatgaacaactcgatgttactcaagtggcctctactgttcatccgtgctacccgatccttggctctccgacggacgtacagtgatattgacatcttcctggagaagtgccgaagtgatactatcggttgatgtgttaagtggcaaagtggcaagaataactccggaagactcgtgctactcgtggcgtgctcttgcgttagatggcaccaatgttcttgctgtgtcaagtagtcccatcgaccctccttccatcagctatggacgacgtctcgccgtgacaccagctgagggtgaagcacgtagatggacctgggatgaagttactagtccattcatggcatccaacagcaaggttaagtccttgttgctgcatcacagcgtcagcatacttaaaatccctgtccctagcccatctgctgacctctctgacggtggcaagcttccactcgaggccatattcgtgtcctgcagctgcaagggtagctcgcgcagtccaactgttgtggtccttcacggcggcccacactcggtgtccgtatcaagctactcaaaatcctcggcgttccttgcttcgcttggattcaacctgcttgttgtaaactaccgaggcacgccaggttatggagaggaagccttgcagtcgctccctggaaaagttggatcccaggatgttgaggactgccttgcagcgctagacttcgccgtcgaggaagagctggtagatgcgtctagagtagctgttgtcgggatctcgcatggtgggttcctgacaacacatctcatcggtcaggctccggacaggttcgccgtggcagctgctcggaaccctgtctgcaacctgtcgctgatggccggcaccaccgacatcccggactggtgttacgtagtggcctgcggaacccaagcgaagcgatacgcctctgaagcgccttcgcccggccatcttcgtctcttctaccagagatcgccgatcgcccatgtctctaaagtatgctgcttctctccggcctgcctgctcctctcctaccagctggttgatttgattgtcgttttggtggtacgtacggttgatggagctttgctgagtgagagcgtgcaggtcaaagcgccccttcttatgcttcttggcggagctgaccttcgagtgcctgcttctaatggcctacaggtcttcactcgacgtgtaggactttggcatcctctgaccatccgtggtagggcattggacaatccacagttgggtaccagattgtccgcgatgacgtag

SEQ ID NO: 53182 - DNA, 2684 bp, Zea Mays
gtcagttacagatctgacgctaccttccgttcgattcccttcgcgtctttcttcctctgctggactcaagtactgcaaattagagcagaaaatcctgtgtctagatcaagatgagcccatgtctacttcgatcagtttagcctagtcagtgtagaactgtttggcttccgagttcagatatttagctagcatagccaagtgaattttgttcctccagtgggtcatcaaggtgtgcatgtgtcctgggagagagagaagaaaatccagtctgcaggatggatgcaatggcacctgaagaatatgcctcgcaatccaagctactgcaagaattcaccaacgtcccaagcatcgacagtgcttccatcctcaaaaccaacgatgaggacagatccagagcgatgttctccattagccagccagacttactggcgaacaccaacaggaaatacgttttgtattctcatattacgacgagagccggcaccggcaccacctctccggatttccagtggtctcctttccccactgaaacaaccggagtgtccgccaccgttccgtccccttccgggtcgaagctcctcgtagtgcgaaacggggagagaggatgccccaccaagctcgaaatcgtttgtcagtcacatgtggagaaggagatacacgtagcaggttctgtgcacggtcctctctacacggatgaatggtttcatggtgtttcttggaatcaagaagagaccttggtagcatacgtcgctgaagctccagccacaccaagaccagctttcaatcgttccggatacacgagggaagaaggttgttccgagggagactgcagtgcctggaaagggcagggcgtgtgggaggaggactggggtgaaacgtactccaagaaaggaagaccctcactgtttgttcttgacattcccagaggagaagtggtagcggctaaaggtgtcccaacatcgttgagcgttgggcaggttgtttgggctccggaatcaccaggtggcaggcacaagtatctggttttcgttggatggtcagagcgcaacgggttcttccagaacactgctagaaaactcggcatcaagtactgctccaacaggccatgtgctctctatgcagccccttgccctatccaaggaccagagccgcctggcaatccaccggctacgactgatggtaaatcaggctccggcggtgcggtggcgcgcaacctaaccccaggcttcagcagtgcattgtttccacggttcagccgggatggaaggcttctggtcttcctgtcttcaaaacaagccgtggacagcggtgcacacaacgcaacggattccctgcatgtgatcaactggccttcggactggaaaatggatgaacaactcgatgttactcaagtggtacctgttgtaatgtgccctgaagacgacgacggcggctgttttccaggcctctactgttcatccgtgctacccgatccttggctctccgacggacgtacagtgatattgacatcttcctggagaagtgccgaagtgatactatcggttgatgtgttaagtggcaaagtggcaagaataactccggaagactcgtgctactcgtggcgtgctcttgcgttagatggcaccaatgttcttgctgtgtcaagtagtcccatcgaccctccttccatcagctatggacgacgtctcgccgtgacaccagctgagggtgaagcacgtagatggacctgggatgaagttactagtccattcatggcatccaacagcaaggttaagtccttgttgctgcatcacagcgtcagcatacttaaaatccctgtccctagcccatctgctgacctctctgacggtggcaagcttccactcgaggccatattcgtgtcctgcagctgcaagggtagctcgcgcagtccaactgttgtggtccttcacggcggcccacactcggtgtccgtatcaagctactcaaaatcctcggcgttccttgcttcgcttggattcaacctgcttgttgtaaactaccgaggcacgccaggttatggagaggaagccttgcagtcgctccctggaaaagttggatcccaggatgttgaggactgccttgcagcgctagacttcgccgtcgaggaagagctggtagatgcgtctagagtagctgttgtcgggatctcgcatggtgggttcctgacaacacatctcatcggtcaggctccggacaggttcgccgtggcagctgctcggaaccctgtctgcaacctgtcgctgatggccggcaccaccgacatcccggactggtgttacgtagtggcctgcggaacccaagcgaagcgatacgcctctgaagcgccttcgcccggccatcttcgtctcttctaccagagatcgccgatcgcccatgtctctaaagtatgctgcttctctccggcctgcctgctcctctcctaccagctggttgatttgattgtcgttttggtggtacgtacggttgatggagctttgctgagtgagagcgtgcaggtcaaagcgccccttcttatgcttcttggcggagctgaccttcgagtgcctgcttctaatggcctacaggtcttcactcgacgtgtaggactttggcatcctctgaccatccgtggtagggcattggacaatccacagttgggtaccagattgtccgcgatgacgtag

SEQ ID NO: 53183 - DNA, 2504 bp, Zea Mays
gtcagttacagatctgacgctaccttccgttcgattcccttcgcgtctttcttcctctgctggactcaagtactgcaaattagagcagaaaatcctgtgtctagatcaagatgagcccatgtctacttcgatcagtttagcctagtcagtgtagaactgtttggcttccgagttcagatatttagctagcatagccaagtgaattttgttcctccagtgggtcatcaaggtgtgcatgtgtcctgggagagagagaagaaaatccagtctgcaggatggatgcaatggcacctgaagaatatgcctcgcaatccaagctactgcaagaattcaccaacgtcccaagcatcgacagtgcttccatcctcaaaaccaacgatgaggacagatccagagcgatgttctccattagccagccagacttactggcgaacaccaacaggaaatacgttttgtattctcatattacgacgagagccggcaccggcaccacctctccggatttccagtggtctcctttccccactgaaacaaccggagtgtccgccaccgttccgtccccttccgggtcgaagctcctcgtagtgcgaaacggggagagaggatgccccaccaagctcgaaatcgtttgtcagtcacatgtggagaaggagatacacgtagcaggttctgtgcacggtcctctctacacggatgaatggtttcatggtgtttcttggaatcaagaagagaccttggtagcatacgtcgctgaagctccagccacaccaagaccagctttcaatcgttccggatacacgagggaagaaggttgttccgagggagactgcagtgcctggaaagggcagggcgtgtgggaggaggactggggtgaaacgtactccaagaaaggaagaccctcactgtttgttcttgacattcccagaggagaagtggtagcggctaaaggtgtcccaacatcgttgagcgttgggcaggttgtttgggctccggaatcaccaggtggcaggcacaagtatctggttttcgttggatggtcagagcgcaacgggttcttccagaacactgctagaaaactcggcatcaagtactgctccaacaggccatgtgctctctatgcagccccttgccctatccaaggaccagagccgcctggcaatccaccggctacgaccagtgatggtaaatcaggctccggcggtgcggtggcgcgcaacctaaccccaggcttcagcagtgcattgtttccacggttcagccgggatggaaggcttctggtcttcctgtcttcaaaacaagccgtggacagcggtgcacacaacgcaacggattccctgcatgtgatcaactggccttcggactggaaaatggatgaacaactcgatgttactcaagtggtacctgttgtaatgtgccctgaagacgacgacggcggctgttttccaggcctctactgttcatccgtgctacccgatccttggctctccgacggacgtacagtgatattgacatcttcctggagaagtgccgaagtgatactatcggttgatgtgttaagtggcaaagtggcaagaataactccggaagactcgtgctactcgtggcgtgctcttgcgttagatggcaccaatgttcttgctgtgtcaagtagtcccatcgaccctccttccatcagctatggacgacgtctcgccgtgacaccagctgagggtgaagcacgtagatggacctgggatgaagttactagtccattcatggcatccaacagcaaggttaagtccttgttgctgcatcacagcgtcagcatacttaaaatccctgtccctagcccatctgctgacctctctgacggtggcaagcttccactcgaggccatattcgtgtcctgcagctgcaagggtagctcgcgcagtccaactgttgtggtccttcacggcggcccacactcggtgtccgtatcaagctactcaaaatcctcggcgttccttgcttcgcttggattcaacctgcttgttgtaaactaccgaggcacgccaggttatggagaggaagccttgcagtcgctccctggaaaagttggatcccaggatgttgaggactgccttgcagcgctagacttcgccgtcgaggaagagctggctccggacaggttcgccgtggcagctgctcggaaccctgtctgcaacctgtcgctgatggccggcaccaccgacatcccggactggtgttacgtagtggcctgcggaacccaagcgaagcgatacgcctctgaagcgccttcgcccggccatcttcgtctcttctaccagagatcgccgatcgcccatgtctctaaagtcaaagcgccccttcttatgcttcttggcggagctgaccttcgagtgcctgcttctaatggcctacaggtcttcactcgacgtgtaggactttggcatcctctgaccatccgtggtagggcattggacaatccacagttgggtaccagattgtccgcgatgacgtag

SEQ ID NO: 53184 - DNA, 2620 bp, Zea Mays
gtcagttacagatctgacgctaccttccgttcgattcccttcgcgtctttcttcctctgctggactcaagtactgcaaattagagcagaaaatcctgtgtaagcaatttccattcgcgctgtcatctcttcctcgatcgaaggtctagatcaagatgagcccatgtctacttcgatcagtttagcctagtcagtgtagaactgtttggcttccgagttcagatatttagctagcatagccaagtgaattttgttcctccagtgggtcatcaaggtgtgcatgtgtcctgggagagagagaagaaaatccagtctgcaggatggatgcaatggcacctgaagaatatgcctcgcaatccaagctactgcaagaattcaccaacgtcccaagcatcgacagtgcttccatcctcaaaaccaacgatgaggacagatccagagcgatgttctccattagccagccagacttactggcgaacaccaacaggaaatacgttttgtattctcatattacgacgagagccggcaccggcaccacctctccggatttccagtggtctcctttccccactgaaacaaccggagtgtccgccaccgttccgtccccttccgggtcgaagctcctcgtagtgcgaaacggggagagaggatgccccaccaagctcgaaatcgtttgtcagtcacatgtggagaaggagatacacgtagcaggttctgtgcacggtcctctctacacggatgaatggtttcatggtgtttcttggaatcaagaagagaccttggtagcatacgtcgctgaagctccagccacaccaagaccagctttcaatcgttccggatacacgagggaagaaggttgttccgagggagactgcagtgcctggaaagggcagggcgtgtgggaggaggactggggtgaaacgtactccaagaaaggaagaccctcactgtttgttcttgacattcccagaggagaagtggtagcggctaaaggtgtcccaacatcgttgagcgttgggcaggttgtttgggctccggaatcaccaggtggcaggcacaagtatctggttttcgttggatggtcagagcgcaacgggttcttccagaacactgctagaaaactcggcatcaagtactgctccaacaggccatgtgctctctatgcagccccttgccctatccaaggaccagagccgcctggcaatccaccggctacgaccagtgatggtaaatcaggctccggcggtgcggtggcgcgcaacctaaccccaggcttcagcagtgcattgtttccacggttcagccgggatggaaggcttctggtcttcctgtcttcaaaacaagccgtggacagcggtgcacacaacgcaacggattccctgcatgtgatcaactggccttcggactggaaaatggatgaacaactcgatgttactcaagtggtacctgttgtaatgtgccctgaagacgacgacggcggctgttttccaggcctctactgttcatccgtgctacccgatccttggctctccgacggacgtacagtgatattgacatcttcctggagaagtgccgaagtgatactatcggttgatgtgttaagtggcaaagtggcaagaataactccggaagactcgtgctactcgtggcgtgctcttgcgttagatggcaccaatgttcttgctgtgtcaagtagtcccatcgaccctccttccatcagctatggacgacgtctcgccgtgacaccagctgagggtgaagcacgtagatggacctgggatgaagttactagtccattcatggcatccaacagcaaggttaagtccttgttgctgcatcacagcgtcagcatacttaaaatccctgtccctagcccatctgctgacctctctgacggtggcaagcttccactcgaggccatattcgtgtcctgcagctgcaagggtagctcgcgcagtccaactgttgtggtccttcacggcggcccacactcggtgtccgtatcaagctactcaaaatcctcggcgttccttgcttcgcttggattcaacctgcttgttgtaaactaccgaggcacgccaggttatggagaggaagccttgcagtcgctccctggaaaagttggatcccaggatgttgaggactgccttgcagcgctagacttcgccgtcgaggaagagctggtagatgcgtctagagtagctgttgtcgggatctcgcatggtgggttcctgacaacacatctcatcggtcaggctccggacaggttcgccgtggcagctgctcggaaccctgtctgcaacctgtcgctgatggccggcaccaccgacatcccggactggtgttacgtagtggcctgcggaacccaagcgaagcgatacgcctctgaagcgccttcgcccggccatcttcgtctcttctaccagagatcgccgatcgcccatgtctctaaagtcaaagcgccccttcttatgcttcttggcggagctgaccttcgagtgcctgcttctaatggcctacaggtcttcactcgacgtgtaggactttggcatcctctgaccatccgtggtagggcattggacaatccacagttgggtaccagattgtccgcgatgacgtag

SEQ ID NO: 53185 - DNA, 2781 bp, Zea Mays
gaagaaggcatataaggctcagacttgtcgttcttcacaacttgctaatggtgccagtactggaggttctcaggaaagttgtactgatttagtcactcaagagatgttgatgctccttcgttgccttgttgccttttcactaggtgttgctagttatgtgactctgtctttgactctgctaggttgtgctgttgcttctcagttttctactgagggaccaccttccacatccactatagggaattttattttcctccgctgcaaccggtgcaaacatttcgaatccctccattccattcctctccgtgcaatcggccattcatatgctctttggctgcattgaggcatcggtacgcgaattttgatgtgagctgaccagacatggctgcgaaagacggctcgggatcacaagatctgggggggcacacgttctggcccatgctgtcctacgcttgcggcgagctgtgtgtgatcgtactgctctacgtgtctgccctggcgtcctatgcggccacgaggctggcgcgcgtctgcgggctccggccgccctgcatcctgtgcgggaggctggaccacgccctccacgggaagccatggttctcttcggacttggtctgtgccgcgcatcggtctgagatctcgtctctggctcactgcaagacccatgaccagcttgttgcatgctccggcgatctctctcggcctacgtcggccaggtcaagaaggttgtgttcttgttcggatccactcaagaatgctcgcggcgcgcagaagcattctgaagcagccaatgctgtggagtcttgggatagcagtgtacctgcagatcatccaaatgagaagacttttgtggtgggcattgaggaagtccatgaatcagatggttcgccaggctcgcatggacaatctacaaaggacagcgccccttctgcgaacggtggtggggcagcaaagagcaactacatatcgcccgcaccaacacgcatcgctgtcgaccgcaacggcagtgtgaagaatgcttccgtcgctagggccaacttgacatctcctcggccatcagagatcatctctgccagggacagcaattccacgacccagcaagaagtgaaggcgctcctctctcagatgtcatctgtgcggggcctcgatggttcttccagtgaaggatctcctagccccggtaccagcgctccgaacgaagagagcaaccctgcggcagcgagcaagaggccgtatctcgagaggaactactccgtgctggaaccttcagaagggagccagctcgccgacgacgtggaaggggaaagctctctcgagaacgtgaagaaacagcttgagctcaacaagaaggcaatggccgctctttacaaggagcttgaggaagaacggagcgcttcggcggtcgcggctagccagacgatggccatgatcaataggctgcaggaggagaaggctgcaatgcagatggaggctctgcagtacctgaggatgatggaacagcaggctgaccacgaccacctggcgattcaggacctgcacgatttgcttacggagagggagaaagagttgcttgacttggacgctgagctcgcgcactgcaggaggctcctgcagaacgatccgttcaacggcgacggacgtaataatggcgctgacacagtgaacacaacgattgacggcagaaatccggcggcgatcgaatgcttggatggcgcggaccttgtggggagcgccatgtcgcttttcgaagacgagaaggcgttcattttggagtccttgagcagactggaggaaaaccttggcattttcacaaacaggcttgcttccggtgacgccagaggtagtcaagaagacgtgctgtttgaagagcatgagcatacaacagctgatgggtctccttccaacggtgacaagttgagcggcgtagcgaatcttaaggctgggatttctctgctcaatataagactgagggcacttgaagacgaccaggagtttctcaagcaggtgttgagttccctccaatgcggtagtgatggactgcagtgtatacaggagataagcggccatctagcagagttgcgaagagttgtaactcgctaaggaaaatggttttgccccgagtccacactgttaggtcatcgtgaggtcttctcatgcagcagactaacgagggtgcttccagtgagtgcccacaatcccatctatctgaagatggatgccgttgcaggaaatacccatgctcttcacttctgatcgggctcaacagcagaccaaaattttccatctcttgcacttgagttcctcatcgacatttgcagactactgaagcagatggaactctaaaagaagtgctgaaagagacgaaccatctcttgtatgtgatatggtggttgttgagaaagtaggagcaagcctgtaactgtagatgtaaccaaccttgatggttcctgccaaggaggagttaaattgtacatgatatatgcagttgacgtaaagtcagcgaatatctccttattctgggatgcaaggtgtcatgacaatcaaatttccttgtctccaaccttccaattttccaccggctggcgttctgtagcttaacactccttgtggactaaacatcacctttcactcacatgaaatatatcagtccactaatgttgcaactcaactaccgaaacacaaatgggggtctaaatgcttcgagctttacacctacacgtagaggtggtaatggattgatcccttaattaattttagtttaaaaaaaaatagaaaaataga

SEQ ID NO: 53186 - DNA, 3917 bp, Zea Mays
ttgctttggtcagtcaactgatcttcagtttcgtcgatatgtttgtaatgagaagactcgtttttgtgtggctagtttactgccatcttcttcagtggtggttgctcgttctgcgttctctcgacctgttgttactccattgtctttacctttgtcaacacccctcgacaaggtgggggtggtggtcttcactacaagtactatggtaaagatgatcatgtagaggctttttgctacaaaaagaagaaggcatataaggctcagacttgtcgttcttcacaacttgctaatggtgccagtactggaggttctcaggaaagttgtactgatttagtcactcaagagatgttgatgctccttcgttgccttgttgccttttcactaggtgttgctagttatgtgactctgtctttgactctgctaggttgtgctgttgcttctcagttttctactgagggaccaccttccacatccactataggttcccatgccaatcttgcacatggacatgcctccatgtcactacattgactatcctgagggccctgtgcatccagttagtccaggctatcactctgtatctactgaaaatctccaacatgaacgatggattggcactagctatttgaggggtaggcatcctatgggaaatctacgacatgctgatacatttgaatacagatgggaagcacctacacctttcaggagatatcgatctgttacaccaccaaatcatgctataagtgcatatgggccagaagcatcttcacctacggaagcatatctatcagctccaatgaaatcacgttcacaccacagccttataaatggttggcatgcatctccagttagttcaacagattctgatgaaagaatatgctcccttatatctgtgtatggacaacaagcacagctacagaaacagacatgtcaatcagctaaattgggtaaaaatccacagttcggaatatctttacatggaagtgaaagtgaagcccatccaacaagggtatctccatcagattctaccgaacaacctccatctccatgcttcagaattcatccaccaactactgtggaaaatcttctacactgtcgtgtatctgcatgtggaccagaagcatcactaccactacatctggctgtaacatcatcaactagtcgatcaacagtagttgcttctcaggttaagaaaaagatgcaagtaccaatattctatgctgaagctgtcattggcccaactggtgaaagaattgaatacattcgtcgtaccagcaggtcgagcattttgataagcaattctgagggcacaatgtatattgagatcactggaagtgctgcaacagatgttctaactgcagagcagctgattaagggaattttattttcctccgctgcaaccggtgcaaacatttcgaatccctccattccattcctctccgtgcaatcggccattcatatgctctttggctgcattgaggcatcggtacgcgaattttgatgtgagctgaccagacatggctgcgaaagacggctcgggatcacaagatctgggggggcacacgttctggcccatgctgtcctacgcttgcggcgagctgtgtgtgatcgtactgctctacgtgtctgccctggcgtcctatgcggccacgaggctggcgcgcgtctgcgggctccggccgccctgcatcctgtgcgggaggctggaccacgccctccacgggaagccatggttctcttcggacttggtctgtgccgcgcatcggtctgagatctcgtctctggctcactgcaagacccatgaccagcttgttgcatgctccggcgatctctctcggcctacgtcggccaggtcaagaaggttgtgttcttgttcggatccactcaagaatgctcgcggcgcgcagaagcattctgaagcagccaatgctgtggagtcttgggatagcagtgtacctgcagatcatccaaatgagaagacttttgtggtgggcattgaggaagtccatgaatcagatggttcgccaggctcgcatggacaatctacaaaggacagcgccccttctgcgaacggtggtggggcagcaaagagcaactacatatcgcccgcaccaacacgcatcgctgtcgaccgcaacggcagtgtgaagaatgcttccgtcgctagggccaacttgacatctcctcggccatcagagatcatctctgccagggacagcaattccacgacccagcaagaagtgaaggcgctcctctctcagatgtcatctgtgcggggcctcgatggttcttccagtgaaggatctcctagccccggtaccagcgctccgaacgaagagagcaaccctgcggcagcgagcaagaggccgtatctcgagaggaactactccgtgctggaaccttcagaagggagccagctcgccgacgacgtggaaggggaaagctctctcgagaacgtgaagaaacagcttgagctcaacaagaaggcaatggccgctctttacaaggagcttgaggaagaacggagcgcttcggcggtcgcggctagccagacgatggccatgatcaataggctgcaggaggagaaggctgcaatgcagatggaggctctgcagtacctgaggatgatggaacagcaggctgaccacgaccacctggcgattcaggacctgcacgatttgcttacggagagggagaaagagttgcttgacttggacgctgagctcgcgcactgcaggaggctcctgcagaacgatccgttcaacggcgacggacgtaataatggcgctgacacagtgaacacaacgattgacggcagaaatccggcggcgatcgaatgcttggatggcgcggaccttgtggggagcgccatgtcgcttttcgaagacgagaaggcgttcattttggagtccttgagcagactggaggaaaaccttggcattttcacaaacaggcttgcttccggtgacgccagaggtagtcaagaagacgtgctgtttgaagagcatgagcatacaacagctgatgggtctccttccaacggtgacaagttgagcggcgtagcgaatcttaaggctgggatttctctgctcaatataagactgagggcacttgaagacgaccaggagtttctcaagcaggtgttgagttccctccaatgcggtagtgatggactgcagtgtatacaggagataagcggccatctagcagagttgcgaagagttgtaactcgctaaggaaaatggttttgccccgagtccacactgttaggtcatcgtgaggtcttctcatgcagcagactaacgagggtgcttccagtgagtgcccacaatcccatctatctgaagatggatgccgttgcaggaaatacccatgctcttcacttctgatcgggctcaacagcagaccaaaattttccatctcttgcacttgagttcctcatcgacatttgcagactactgaagcagatggaactctaaaagaagtgctgaaagagacgaaccatctcttgtatgtgatatggtggttgttgagaaagtaggagcaagcctgtaactgtagatgtaaccaaccttgatggttcctgccaaggaggagttaaattgtacatgatatatgcagttgacgtaaagtcagcgaatatctccttattctgggatgcaaggtgtcatgacaatcaaatttccttgtctccaaccttccaattttccaccggctggcgttctgtagcttaacactccttgtggactaaacatcacctttcactcacatgaaatatatcagtccactaatgttgcaactcaactaccgaaacacaaatgggggtctaaatgcttcgagctttacacctacacgtagaggtggtaatggattgatcccttaattaattttagtttaaaaaaaaatagaaaaataga

SEQ ID NO: 53187 - DNA, 1639 bp, Zea Mays
cccagtcttcctttctccacttgatccctcacgtgctcctctgctccgcggctcatagtcgccgccgccgccgccgccattgccgcctcccgcttgtacgcctccccagtccccaccggacccctccctgcggaggttcccatgccaatcttgcacatggacatgcctccatgtcactacattgactatcctgagggccctgtgcatccagttagtccaggctatcactctgtatctactgaaaatctccaacatgaacgatggattggcactagctatttgaggggtaggcatcctatgggaaatctacgacatgctgatacatttgaatacagatgggaagcacctacacctttcaggagatatcgatctgttacaccaccaaatcatgctataagtgcatatgggccagaagcatcttcacctacggaagcatatctatcagctccaatgaaatcacgttcacaccacagccttataaatggttggcatgcatctccagttagttcaacagattctgatgaaagaatatgctcccttatatctgtgtatggacaacaagcacagctacagaaacagacatgtcaatcagctaaattgggtaaaaatccacagttcggaatatctttacatggaagtgaaagtgaagcccatccaacaagggtatctccatcagattctaccgaacaacctccatctccatgcttcagaattcatccaccaactactgtggaaaatcttctacactgtcgtgtatctgcatgtggaccagaagcatcactaccactacatctggctgtaacatcatcaactagtcgatcaacagtagttgcttctcaggttaagaaaaagatgcaagtaccaatattctatgctgaagctgtcattggcccaactggtgaaagaattgaatacattcgtcgtaccagcaggtcgagcattttgataagcaattctgagggcacaatgtatattgagatcactggaagtgctgcaacagatgttctaactgcagagcagctgattaagaactttatggccgaagcagctgccgcctcccctggtcacagttacgacttcattccatcatatttgccagcacccagatctgcccaagctgatatttttgcttcccctgagacaagtgaagtgtccagtttgccagaacggcgcctgcaaatgatttactgaatatccccaacagttttgtttctgcacataccaccaaagatagccaagcaccaataccggcaacacaggaatataccagagagtaaattgagaagatgttttgatatccaccctgagactatgcaagctttacaatttcaaccctttcatctggattacttctagactctttgttttgttgtagccttgattcattccatggattgaaccttagaaactagagcctgagcatatgcttctgtatatggattatggaagcaaagttttggttgattcagcgaaggggtagcacgatatgtgtgccgggatgattgaacggttgcatttcaccgaaacaaattcgtaaacctttgctccatgagatacctattgtttgttgtctgttagctgctctagtgtcacctgttagtatgatgaatatttgctggtttactgggcctggcctggg

SEQ ID NO: 53188 - DNA, 1171 bp, Zea Mays
acaaaggtttgaagtttcaacgggatagtggcagcttctggcgacagaggcagtggaggagagaccgaaggggaaagaaatgatggctgcttgcacataacgtgcctagatgagttcgtgagggtacggacgtacaaccttttttttctcgaacacacaggagagctccgtaactttgtattatagaagaaaaagataacaaggggaaaagaaaaccccaatacaatcagcctcaagcatattcgtccatagggcaaatcggatatgtaattattggaataattgttggagactcaaatgatggatatgcaagcatgataacttatatgttgttctatatctcgaacttttgcttgcattgtattatttggtctacggaactgataacattcgagaatatgcaggattatacacgaaagatccttttttggctctctctttagccctatgtctcttatccctaggaggccttcctccactagtaggtttcttcggaaaactctatctattctggtgtggatggcaagcaggcctatatttcttggtttcaataggactccttacgaacgttctttctatctactattatctaaaaataatcaagttattaatgactggacgaaacctagaaataaccccttatgtgtgaaattatagaagatctcctttaagatcaaacaattccatcgaattgagtatgactgtatgtgtgatagcatctactataccaggaatatcaatgaacccccttcttgcaattgctcaggataccctcttttagctgctaggtcgtaacaataaccagcggaggcgccctcgtggcggtcggtagcaaaatgtggtggcgctaatcagtgcgccattgccgatagctagagatccatatctccttaaaactctactaaaaactctcaacaaactaactgataacctttctagttaatctcaactaatctcaactaatcttctaatcttatctctaactatcattatctaatcccgcttggagggcccatggttgctgctgccgcagcccctccgtgggcctccttaggccctgacactacacccctcctggacaagcagctcgtcctcgagctgcaacatgacgggtgctcaaagatcgagtctacttgacccaaaactagacacctagaagacaagccttttt

SEQ ID NO: 53189 - DNA, 282 bp, Zea Mays
atggcggcgcgggcaaccttcgtcgtctgcgccgcgctcctcgtcctgctctccgccaccggctccctcgcccagtcctcggcggccgtgccggccaaggcgccgcccaagtcctccaaggccacgtcggccgcctcgccgaccgacgcgtccaccccagccgtcgcgcccgcgcccaagtcctcctccaaggccagcccatcggcgctagccgtcgcaccaaccaccccggcacccgtggcggcgccggccacgccaaggcccaaggcccccgcgcccgcc

SEQ ID NO: 53190 - DNA, 113 bp, Zea Mays
gcctgaaaaaactttcctaactgcattttcaataccaccttggtttatctaccaagtatccctacatgatgctttaacagctaagggtatgttcggttacaccaatccagagg

SEQ ID NO: 53191 - DNA, 345 bp, Zea Mays
ggaaactcgataatttggggcgtcgtgcgggctgagcaaattgggaagggaagccgagtcaccgccgccatcgattacacccatacgccaccgacggggtccgtgtgtcgtggtctggagcttctccaagccttcacgaaggcgctcgtggatttcccggggcgtgattggtagtcgagcagtagcaattgctcgccggagcgatggtgccaccgtgtggccgctcgcatatgtgggcagggcacctcgtcgcttcttccgcaggtcaagaacaagtacaacatgatgagaagcatgaaggatgtcacgatggatttgtgagaggtctaggtcgtcatctcccag

SEQ ID NO: 53192 - DNA, 1492 bp, Zea Mays
attttaatcacttcttctcaagatccaactttccatttacaccttttcccattttttaatatcaaacaggagtcttgatgatgttagaatgaaccttgaagttctcaaatactgtgctacagttctgttcctggaggcaagtcttccagaggtgcttactgttgagaatctggttgaacgtgcaatgacaaggagccgagctaatggaactgcatcccctgatttgccaaaacctgaagcgaactctccaccggattcctcaaaaaggcaacggacagtctctccagttgactgtgtgatgcctgcggaaggtaatcaaggaacaagtgatccttctaccaacagggaatctgttgagttggtatcccacattgaagaaatgaagctaaataccaccacacatgtggatgcaagttctagtggttatcctggatttcttgagccagacgatgtttccattgagtgtattaaaatttcagttgctccattacaccaatttggcagaaggtcatctatccagcacagagattgtccactgcagctttgttgtgcaggcttgaaagtacagtttggtgtcagcacgaagtttctagataatgcagggcggccaaagatgagcatagtggttgagatccctgagaacctctgtaaagttttggaattctgcgatgttcttgctagaaagctgtcccaggaatctggtagcagttctgaatggagacccctgattaagaagtatggatacattaatcgtccaactatccgtctgaacatccctcctatttccaacagcgatgcggtggccttctcaactgatatatgccagagagagcctagtggtaacattcagaagcttgctttcggcaatgtgggcgccacggaattggactctctgttcgttaaagggagcaaggtggacgcatttttttcactggagttatacgattaccagcaaaatgctggcattcggctggttgcaaagaggctggttatacactcgaattagcaccaggctcatttattaaaatactagtactagaaactaacccttgcactgattcaggggcctttagaccaccatatgtatttaaccaattgtagtttgtagattatgccgagtgcgtaagatctcgccacaaggaggtattgagctgttgatggtaaattaaaattgaaatgttgcaaaatgttttaacaatctgtgctatttatttgtgaatagaatgcacatttgttgctactacagtctacagattgtgttttcacttggaacttccattgctggtgtcgtgagaaccggcggtgatgatttgtaccttcggttcgaaggcacgcgcggagaagtggagcgacaaactggcggcgaaaagaggccaaattggtggtgaaatcatttaacgctgccggtttgtcaccttgtgccgttgtgcgccacgcaaataccagccggcagcacgaggttcagaaggacacaatgtctgttagaacaatg

SEQ ID NO: 53193 - DNA, 515 bp, Zea Mays
gtcgattttagtgctgcccctggcgctggtcatccccataaatcgtcccgcctgagcgtccttggcgattgtctagctaagagaaagagagagagaggcaggacatatgagtgggagccgccatcaccgtgtgttcgggccgcccctgtggatacccatcattggcgtggttcgggctccaatgtggccatccgagggttgatcagaccgcacagaagctgtgtgagggagtaatcggtgggaagctaactggaaccataggaattcctcaccggagttgggaacccccgccgaactcacgctccgccacgtccaacatcgatcacgctgcgattcacggtcaagaacaggtgctactggatgaggcgcatgaagaatgttgtgataagatcgtgagaggtctaggccgtcgtcttccagtcaactttggttgctggatcattatcttcgtatgatgtaattatttaactatcttgtacagagctccgttatatattaaagatgtgacattcgtt

SEQ ID NO: 53194 - DNA, 1066 bp, Zea Mays
ctcaggttaatttgatgagacctaataggtttccctagcattgtttatccccaccttgcaaacagatgaattattgggtagattttctattgctctatctggttttgggaaactaatgttttattatgatcatgttcaaattatgttgttgtttaattattgtccatgataagatcatattgttaattagaacatggtgaaccacccgggaaaatagtgctaccacaagggtagaatgggacacacttggctaagtaattaggaaagctagggagaaattaccttacctggaaggggcaagcggagaggcgtcgttgctagagtatagggaggtcctcaggtcgaactgtctgtaaagcttttcgaacgagggattcctatgcttccttctttctaaatccgtagcaggttttctcgaactagtggaactttggaaaggcctcgtagttctatcatgcttctcttccttggtagaggtgtatgaggctcgtacaacctcgtggagaatgggtaacacgacttgtgggtaaagatgcacaatctctgcagagtgtaaaactggtatatcagtcatgctcacggtcatgagcggctcggacactcacataattaacttatggaattaaactcaatttatcatgtgcattgcattgtgggtgttgttattaatcttgatctcttacttaattgggttggtatctacttatacctagtaactgctaataaaactttgaccaactctaaaagcaatgctcagctttaaccatctcctttggtaagccttacacttcacatgagctcccaactttggtgagttcatgcatattatttcctacaacttgttgagcgatgaacgtatgtgagctcacacttgctgtacttacatcccccaggtcaagaacaggtgctactggatgaggcgcatgaagaatgttgtgataagatcgtgagaggtctaggccgtcgtcttccagtcaactttggttgctggatcattatcttcgtatgatgtaattatttaactatcttgtacagagctccgttatatattaaagatgtgacattc

SEQ ID NO: 53195 - DNA, 603 bp, Zea Mays
caaaggatttgatctcatccagcaaaagcttacttgtggtggaaacagcggatcgtccagggttactggttgaccttgttaagatcatctcggacatcagcattaatgtccaatctggagagtttgacactgaggggctcctggctaaagcaaaattccatgtcagctacaggggcagaacactgaccgaggctttacaacaggttctttgtaatagcttgcgctatttcttgaggcggccgacaacagaggacgccagcttctagccagatagatgatcatgaagcctcccaactttcttatgtggtggtattcacatgaattgaataccatcgtcaaagcatttgaaacacgcacaataatttgttaagatggggggaattgtacttgatgttatggcaccacaccaattcgaagtattttttgttccaaggcacgggaatctgttgtatccaagtgcagaagattgctattcttaatcatgtaataacacattattattttgctacttgggatacaccgtttggtggtaaataagatggaatattgtgggggcccatcatcccgtgtatcatgcaaataccgtctattgtcagattaatg

SEQ ID NO: 53196 - DNA, 780 bp, Zea Mays
agaggttcactggccgtaaaattgatgatccagagttgttagaagcagttcgactgacgatcattaacaacatgatacagtatcatccagagtccagcagtcaattggctatgggggcaacttttgggccagaagcccctacggaagaggttgatgtggatatagcaacccacatagatatctatgatgatggccctgaaagaagcttacttgtggtggaaacagcggatcgtccagggttactggttgaccttgttaagatcatctcggacatcagcattaatgtccaatctggagagtttgacactgaggggctcctggctaaagcaaaattccatgtcagctacaggggcagaacactgaccgaggctttacaacaggttctttgtaatagcttgcgctatttcttgaggcggccgacaacagaggacgccagcttctagccagatagatgatcatgaagcctcccaactttcttatgtggtggtattcacatgaattgaataccatcgtcaaagcatttgaaacacgcacaataatttgttaagatggggggaattgtacttgatgttatggcaccacaccaattcgaagtattttttgttccaaggcacgggaatctgttgtatccaagtgcagaagattgctattcttaatcatgtaataacacattattattttgctacttgggatacaccgtttggtggtaaataagatggaatattgtgggggcccatcatcccgtgtatcatgcaaataccgtctattgtcagattaatg

SEQ ID NO: 53197 - DNA, 1461 bp, Zea Mays
atcctacccatcccattcccactccgccactcggccactcgacaccaccctccgcgctccgcatccgctcctccctctgctgccgtgccggtgccgctagccatccccacttctcacccgccccctctcctctactgccgccagccgcaacaaagatatggatagagcggccgcgacagccgcagacattatcgtcatgatcccatcgctctcgccttcgcctttgtagcactacctcctcgtccatccgcccccctatttcgtcccactcgggttgctagatcggactggatctctctgcccgtttcttggagcagagatggccgaaatgaccgtgactgtcgcggccgccaaaagcaccctccggacgtgccccggcgcccgccgtgctgcggttcttggtcggtggatgcctcttgcaccagcggcgcccgccaacttgaaattgttctctccagctgtgagggttccaagggctacttcccctgcggcggttgaggatgggagcaacactgatatagtccctatcccgaaagttataatagaccaagactcagatccggatgcaaccattgtagaaataaccttgggtgatcgtcttggcgatctccttgatacgatgagtgcgctaaagaacttggggctaaatgttgttaaagctagtgtctgtctcgattctactggcaagcatatcaagtttgctataactagagcagttgttagaagcagttcgactgacgatcattaacaacatgatacagtatcatccagagtccagcagtcaattggctatgggggcaacttttgggccagaagcccctacggaagaggttgatgtggatatagcaacccacatagatatctatgatgatggccctgaaagaagcttacttgtggtggaaacagcggatcgtccagggttactggttgaccttgttaagatcatctcggacatcagcattaatgtccaatctggagagtttgacactgaggggctcctggctaaagcaaaattccatgtcagctacaggggcagaacactgaccgaggctttacaacaggttctttgtaatagcttgcgctatttcttgaggcggccgacaacagaggacgccagcttctagccagatagatgatcatgaagcctcccaactttcttatgtggtggtattcacatgaattgaataccatcgtcaaagcatttgaaacacgcacaataatttgttaagatggggggaattgtacttgatgttatggcaccacaccaattcgaagtattttttgttccaaggcacgggaatctgttgtatccaagtgcagaagattgctattcttaatcatgtaataacacattattattttgctacttgggatacaccgtttggtggtaaataagatggaatattgtgggggcccatcatcccgtgtatcatgcaaataccgtctattgtcagattaatg

SEQ ID NO: 53198 - DNA, 1453 bp, Zea Mays
atcctacccatcccattcccactccgccactcggccactcgacaccaccctccgcgctccgcatccgctcctccctctgctgccgtgccggtgccgctagccatccccacttctcacccgccccctctcctctactgccgccagccgcaacaaagatatggatagagcggccgcgacagccgcagacattatcgtcatgatcccatcgctctcgccttcgcctttgtagcactacctcctcgtccatccgcccccctatttcgtcccactcgggttgctagatcggactggatctctctgcccgtttcttggagcagagatggccgaaatgaccgtgactgtcgcggccgccaaaagcaccctccggacgtgccccggcgcccgccgtgctgcggttcttggtcggtggatgcctcttgcaccagcggcgcccgccaacttgaaattgttctctccagctgtgagggttccaagggctacttcccctgcggcggttgagttataatagaccaagactcagatccggatgcaaccattgtagaaataaccttgggtgatcgtcttggcgatctccttgatacgatgagtgcgctaaagaacttggggctaaatgttgttaaagctagtgtctgtctcgattctactggcaagcatatcaagtttgctataactagagcgttcactggccgtaaaattgatgatccagagttgttagaagcagttcgactgacgatcattaacaacatgatacagtatcatccagagtccagcagtcaattggctatgggggcaacttttgggccagaagcccctacggaagaggttgatgtggatatagcaacccacatagatatctatgatgatggccctgaaagaagcttacttgtggtggaaacagcggatcgtccagggttactggttgaccttgttaagatcatctcggacatcagcattaatgtccaatctggagagtttgacactgaggggctcctggctaaagcaaaattccatgtcagctacaggggcagaacactgaccgaggctttacaacaggttctttgtaatagcttgcgctatttcttgaggcggccgacaacagaggacgccagcttctagccagatagatgatcatgaagcctcccaactttcttatgtggtggtattcacatgaattgaataccatcgtcaaagcatttgaaacacgcacaataatttgttaagatggggggaattgtacttgatgttatggcaccacaccaattcgaagtattttttgttccaaggcacgggaatctgttgtatccaagtgcagaagattgctattcttaatcatgtaataacacattattattttgctacttgggatacaccgtttggtggtaaataagatggaatattgtgggggcccatcatcccgtgtatcatgcaaataccgtctattgtcagattaatg

SEQ ID NO: 53199 - DNA, 1891 bp, Zea Mays
atcctacccatcccattcccactccgccactcggccactcgacaccaccctccgcgctccgcatccgctcctccctctgctgccgtgccggtgccgctagccatccccacttctcacccgccccctctcctctactgccgccagccgcaacaaagatatggatagagcggccgcgacagccgcagacattatcgtcatgatcccatcgctctcgccttcgcctttgtagcactacctcctcgtccatccgcccccctatttcgtcccactcgggttgctagatcggactggatctctctgcccgtttcttggagcagagatggccgaaatgaccgtgactgtcgcggccgccaaaagcaccctccggacgtgccccggcgcccgccgtgctgcggttcttggtcggtggatgcctcttgcaccagcggcgcccgccaacttgaaattgttctctccagctgtgagggttccaagggctacttcccctgcggcggttgaggatgggagcaacactgatatagtccctatcccgaaagttataatagaccaagactcagatccggatgcaaccattgtagaaataaccttgggtgatcgtcttggcgatctccttgatacgatgagtgcgctaaagaacttggggctaaatgttgttaaagctagtgtctgtctcgattctactggcaagcatatcaagtttgctataactagagcgttcactggccgtaaaattgatgatccagagttgttagaagcagttcgactgacgatcattaacaacatgatacagtatcatccagagtccagcagtcaattggctatgggggcaacttttgggccagaagcccctacggaagaggtattacctaaactatgtcagagacatcttctaaatgcttaacatatggactgaaaacttctcagttctctaaagagatttatgaaaccatcttatttgtctatatctatcgtgagaaagaattagtacacaacggtgtacaaagcacacatatctttaggatctccaagtttgatgtttatttcctttgtctctgcttcattgcaaaacttaatgtatcaaaattcttatctggtattgccttattgctggatcttcttatcatagaacagactttattggtcttcccatggtacaatagtgatcaaattgctgccaagtacatctttagaattatgtatggttctggagacttgaaaaccttcactggatataaacattgttcacttgtacattcgtaggttgatgtggatatagcaacccacatagatatctatgatgatggccctgaaagaagcttacttgtggtggaaacagcggatcgtccagggttactggttgaccttgttaagatcatctcggacatcagcattaatgtccaatctggagagtttgacactgaggggctcctggctaaagcaaaattccatgtcagctacaggggcagaacactgaccgaggctttacaacaggttctttgtaatagcttgcgctatttcttgaggcggccgacaacagaggacgccagcttctagccagatagatgatcatgaagcctcccaactttcttatgtggtggtattcacatgaattgaataccatcgtcaaagcatttgaaacacgcacaataatttgttaagatggggggaattgtacttgatgttatggcaccacaccaattcgaagtattttttgttccaaggcacgggaatctgttgtatccaagtgcagaagattgctattcttaatcatgtaataacacattattattttgctacttgggatacaccgtttggtggtaaataagatggaatattgtgggggcccatcatcccgtgtatcatgcaaataccgtctattgtcagattaatg

SEQ ID NO: 53200 - DNA, 1526 bp, Zea Mays
atcctacccatcccattcccactccgccactcggccactcgacaccaccctccgcgctccgcatccgctcctccctctgctgccgtgccggtgccgctagccatccccacttctcacccgccccctctcctctactgccgccagccgcaacaaagatatggatagagcggccgcgacagccgcagacattatcgtcatgatcccatcgctctcgccttcgcctttgtagcactacctcctcgtccatccgcccccctatttcgtcccactcgggttgctagatcggactggatctctctgcccgtttcttggagcagagatggccgaaatgaccgtgactgtcgcggccgccaaaagcaccctccggacgtgccccggcgcccgccgtgctgcggttcttggtcggtggatgcctcttgcaccagcggcgcccgccaacttgaaattgttctctccagctgtgagggttccaagggctacttcccctgcggcggttgaggatgggagcaacactgatatagtccctatcccgaaagttataatagaccaagactcagatccggatgcaaccattgtagaaataaccttgggtgatcgtcttggcgatctccttgatacgatgagtgcgctaaagaacttggggctaaatgttgttaaagctagtgtctgtctcgattctactggcaagcatatcaagtttgctataactagagcttcttccctagaatgagtgacaggaatgctctacaggttcactggccgtaaaattgatgatccagagttgttagaagcagttcgactgacgatcattaacaacatgatacagtatcatccagagtccagcagtcaattggctatgggggcaacttttgggccagaagcccctacggaagaggttgatgtggatatagcaacccacatagatatctatgatgatggccctgaaagaagcttacttgtggtggaaacagcggatcgtccagggttactggttgaccttgttaagatcatctcggacatcagcattaatgtccaatctggagagtttgacactgaggggctcctggctaaagcaaaattccatgtcagctacaggggcagaacactgaccgaggctttacaacaggttctttgtaatagcttgcgctatttcttgaggcggccgacaacagaggacgccagcttctagccagatagatgatcatgaagcctcccaactttcttatgtggtggtattcacatgaattgaataccatcgtcaaagcatttgaaacacgcacaataatttgttaagatggggggaattgtacttgatgttatggcaccacaccaattcgaagtattttttgttccaaggcacgggaatctgttgtatccaagtgcagaagattgctattcttaatcatgtaataacacattattattttgctacttgggatacaccgtttggtggtaaataagatggaatattgtgggggcccatcatcccgtgtatcatgcaaataccgtctattgtcagattaatg

SEQ ID NO: 53201 - DNA, 475 bp, Zea Mays
cgacactgccttcggccttcctctggtcctaggccctgagacccgagctgtcccgaatccccaaacgccgctagcgccgctagcccgccccactatggtgccacctgcctccccccagctgcttcgtccccagcgctgccaccctagaagtgcaagggttcctcatcaacattgtcttcggtaagagctgcccagggctgcttgtcttcgtcatagaagcaagccttcgacaagctggggctcagcgtcccacaggacccatgttctgtgccgtctcctgccttgaggttgtggagggaaggtgatctatctacctgtccgtgcaagacttcttacagaagaaggaaaatgagaagtttgaggaggctgagaggcagaaaggtcagaaaaggaagaagagggccaagtcttggtaattaattctgacagaaagaggagataaggaagagggccaagtcttggtaatgaacccctt

SEQ ID NO: 53202 - DNA, 735 bp, Zea Mays
cgactagctagtcgagacacctgagcgaccaggcgactaatcgcgattaatcgacgattaggtcgactaatcgggtcctagtcgacctgggcgtccctactggttctcctgcatatttacagatatatagtgaagaagacagatcaaaaatgccacttgagctatcgagtgcactctctcatgaacgggaagttgttgaggattctgaaattcggcagcaggcattagaggctatttatatgatcgtattgcaggatggtggccgaaggtccttttggtcagttaatggcccacgaattctgcaggttggttatgaagatgaaaaggacccgaaagtgatggaagcatatgaacttattggttccctgcttgttgggaagggtgaagatgtacaagataacaagaaggaacaaggagagaagcctcaatgagccccgccgctgataaaaacggtgctgtatttttgtttgtctagaaaacatccctcgccgtgtgcaatagcaatagtatgatatcccaacttgtcaactgttgcaactgcaagagctctgcagtgttgcttttgtaattgacgaatgtatctggaaaatttgcaggtattggccgtcttttccttggttttgagctctctgacaattcttcgttttttttggaatgcatctcttgacgagtctttcacaccgtcgcttcagaacatggatatgcattaaacgggctaccctgtagctttcgctg

SEQ ID NO: 53203 - DNA, 1117 bp, Zea Mays
aaatccattcatcccgctgtgtctgtgtattgtagtatcagccaaaaaaaaaagaagaataccccgaacacgaccagaaggcctactaaaccctgccgccgccgccgccgcgccatggccgacgagctcgacgagctgatcggcttcctctccgaccgcaacccccaggtgcggggcgcggcggcggacatcgtgcgcgggctgacgggtggggaggacggcctccgggcgctcacggcgcgcgccgatagcgcccttccggcgttgctccgcctgctggcctccgcgggcggaagtggctcgggagaggccgcggcggactcgctcgtcaacctcagccaggacgcggccctcgcagcgcgccttgtcgcgctcggggccgtcgatgccgccatggacgtcgtggccaagcgaggcggggagcagccagctctcgcgcgcagactcgtcatgctgctcgttaacctaacccacgttgagtccggcgtcgccgcgctcctccagatatatagtgaagaagacagatcaaaaatgccacttgagctatcgagtgcactctctcatgaacgggaagttgttgaggattctgaaattcggcagcaggcattagaggctatttatatgatcgtattgcaggatggtggccgaaggtccttttggtcagttaatggcccacgaattctgcaggttggttatgaagatgaaaaggacccgaaagtgatggaagcatatgaacttattggttccctgcttgttgggaagggtgaagatgtacaagataacaagaaggaacaaggagagaagcctcaatgagccccgccgctgataaaaacggtgctgtatttttgtttgtctagaaaacatccctcgccgtgtgcaatagcaatagtatgatatcccaacttgtcaactgttgcaactgcaagagctctgcagtgttgcttttgtaattgacgaatgtatctggaaaatttgcaggtattggccgtcttttccttggttttgagctctctgacaattcttcgttttttttggaatgcatctcttgacgagtctttcacaccgtcgcttcagaacatggatatgcattaaacgggctaccctgtagctttcgctg

SEQ ID NO: 53204 - DNA, 1358 bp, Zea Mays
aaatccattcatcccgctgtgtctgtgtattgtagtatcagccaaaaaaaaaagaagaataccccgaacacgaccagaaggcctactaaaccctgccgccgccgccgccgcgccatggccgacgagctcgacgagctgatcggcttcctctccgaccgcaacccccaggtgcggggcgcggcggcggacatcgtgcgcgggctgacgggtggggaggacggcctccgggcgctcacggcgcgcgccgatagcgcccttccggcgttgctccgcctgctggcctccgcgggcggaagtggctcgggagaggccgcggcggactcgctcgtcaacctcagccaggacgcggccctcgcagcgcgccttgtcgcgctcggggccgtcgatgccgccatggacgtcgtggccaagcgaggcggggagcagccagctctcgcgcgcagactcgtcatgctgctcgttaacctaacccacgttgagtccggcgtcgccgcgctcctccaggttggggatgagaaggtgcaaggcttgtatgttgcaaagcttgtgcgatcattctgtaggtcatccagtgattctgaagcagattattcgacaatttgattcaacaaatcaacttagaaagaaaggggttgctggtacaattcgtaactgttgctttgaggctgatactcagcttctgagtttgctttctttagcagaatatctttggccagctctacttttgcctgtagccggaaagaagatatatagtgaagaagacagatcaaaaatgccacttgagctatcgagtgcactctctcatgaacgggaagttgttgaggattctgaaattcggcagcaggcattagaggctatttatatgatcgtattgcaggatggtggccgaaggtccttttggtcagttaatggcccacgaattctgcaggttggttatgaagatgaaaaggacccgaaagtgatggaagcatatgaacttattggttccctgcttgttgggaagggtgaagatgtacaagataacaagaaggaacaaggagagaagcctcaatgagccccgccgctgataaaaacggtgctgtatttttgtttgtctagaaaacatccctcgccgtgtgcaatagcaatagtatgatatcccaacttgtcaactgttgcaactgcaagagctctgcagtgttgcttttgtaattgacgaatgtatctggaaaatttgcaggtattggccgtcttttccttggttttgagctctctgacaattcttcgttttttttggaatgcatctcttgacgagtctttcacaccgtcgcttcagaacatggatatgcattaaacgggctaccctgtagctttcgctg

SEQ ID NO: 53205 - DNA, 1123 bp, Zea Mays
aaatccattcatcccgctgtgtctgtgtattgtagtatcagccaaaaaaaaaagaagaataccccgaacacgaccagaaggcctactaaaccctgccgccgccgccgccgcgccatggccgacgagctcgacgagctgatcggcttcctctccgaccgcaacccccaggttggggatgagaaggtgcaaggcttgtatgttgcaaagcttgtgcgatcattctgtaggtcatccagtgattctgaagaggaagacatttttgagtacgttgcctccacacttgtcaatatatctaaggttgaagctggaaggagaatattgttggagcctaagagaggtcttctgaagcagattattcgacaatttgattcaacaaatcaacttagaaagaaaggggttgctggtacaattcgtaactgttgctttgaggctgatactcagcttctgagtttgctttctttagcagaatatctttggccagctctacttttgcctgtagccggaaagaagatatatagtgaagaagacagatcaaaaatgccacttgagctatcgagtgcactctctcatgaacgggaagttgttgaggattctgaaattcggcagcaggcattagaggctatttatatgatcgtattgcaggatggtggccgaaggtccttttggtcagttaatggcccacgaattctgcaggttggttatgaagatgaaaaggacccgaaagtgatggaagcatatgaacttattggttccctgcttgttgggaagggtgaagatgtacaagataacaagaaggaacaaggagagaagcctcaatgagccccgccgctgataaaaacggtgctgtatttttgtttgtctagaaaacatccctcgccgtgtgcaatagcaatagtatgatatcccaacttgtcaactgttgcaactgcaagagctctgcagtgttgcttttgtaattgacgaatgtatctggaaaatttgcaggtattggccgtcttttccttggttttgagctctctgacaattcttcgttttttttggaatgcatctcttgacgagtctttcacaccgtcgcttcagaacatggatatgcattaaacgggctaccctgtagctttcgctg

SEQ ID NO: 53206 - DNA, 1315 bp, Zea Mays
aaatccattcatcccgctgtgtctgtgtattgtagtatcagccaaaaaaaaaagaagaataccccgaacacgaccagaaggcctactaaaccctgccgccgccgccgccgcgccatggccgacgagctcgacgagctgatcggcttcctctccgaccgcaacccccaggtgcggggcgcggcggcggacatcgtgcgcgggctgacgggtggggaggacggcctccgggcgctcacggcgcgcgccgatagcgcccttccggcgttgctccgcctgctggcctccgcgggcggaagtggctcgggagaggccgcggcggactcgctcgtcaacctcagccaggacgcggccctcgcagcgcgccttgtcgcgctcggggccgtcgatgccgccatggacgtcgtggccaagcgaggcggggagcagccagctctcgcgcgcagactcgtcatgctgctcgttaacctaacccacgttgagtccggcgtcgccgcgctcctccaggttggggatgagaaggtgcaaggcttgtatgttgcaaagcttgtgcgatcattctgtaggtcatccagtgattctgaagaggaagacatttttgagtacgttgcctccacacttgtcaatatatctaaggttgaagctggaaggagaatattgttggagcctaagagaggtcttctgaagcagattattcgacaatttgattcaacaaatcaacttagaaagaaaggggttgctggtacaattcgtaactgttgctttgaggctgatactcagcttctgagtttgctttctttagcagaatatctttggccagctctacttttgcctgtagccggaaagaagatatatagtgaagaagacagatcaaaaatgccacttgagctatcgagtgcactctctcatgaacgggaagttgttgaggattctgaaattcggcagcaggcattagaggctatttatatgatcgtattgcaggatggtggccgaaggtccttttggtcagttaatggcccacgaattctgcaggttggttatgaagatgaaaaggacccgaaagtgatggaagcatatgaacttattggttccctgcttgttgggaagggtgaagatgtacaagataacaagaaggaacaaggagagaagcctcaatgagccccgccgctgataaaaacggtattggccgtcttttccttggttttgagctctctgacaattcttcgttttttttggaatgcatctcttgacgagtctttcacaccgtcgcttcagaacatggatatgcattaaacgggctaccctgtagctttcgctg

SEQ ID NO: 53207 - DNA, 1464 bp, Zea Mays
ccttcatccgctttttatcttaaaataaaccggcgtctcctgccctggctgggacgccgctgctgacagggcacctgatggattgatttcctcgagcagtcagcggcgctaaagagtcacgagcttactggttgtaagcaacgatcgacgaacgaggggtgtagggagtggaaggaagaggctcagcgttcatggagagccgcaaggaggcggcggtggggtggatgacggtgccggcgttcggggagtgggacgtgaagaacggcgccgtgccggactactccatggacttctccaagatccgcgagatgcgcaagcagaacaggcgcgagctgtcccgggccagcctcggcggcggcgacgacgacgacgacgacctactccagaagaagcagcagcagcagcaggaggagggaagcaaggcccagccgcgcaacaagccctccgccgccgtcgcggacgacgcccaccgtcgagcgctgcacgacgactcccctacggggaggaagaatttcctgagctatttccagtgctgtaccagagcgtgaagaaactcccaagacttcttcttcctctgctgcgcaggtagctgcatgtttgggtttccttctgaactccagcagtgtgcgactccgtatccctaaaacgcgcggccgacacattctctctcctctccgtatccggctccgtttccagcaacactccccatcccactccgcatgcagtctatgacacctggggcccgccagcaggcgcgcgcgcccgcgagagagctgcggagaggagagagaaagcgtggaaatggggagtctgggtacacgccgtgcgttttacggagccggatacggagcctgctggactgatgaatagtgtgctagactccgcaaaatacggatacggagccgcatgcggagtgctgctggagatggtctaatgtatgtaaagcatgtctgcgtagttaaagtgtgtgatcctgtcacccatgccatgcatgagagaggggaggaacgcccatggctcacagcttctagtgcagtgtgttctgagaaaaaggattggatctgatgaagaagggtgtggcttgtgtgtgtgcttttttgtatgagattggatgcacttgagatgatgtattgacgattgtccatcttgtttttcctttttcacctctttattcattgtatgcatctcttgatttttttgttgttgtttctatctagaggaacgacgtctctggaatacatgtagctttgccgtagaagcaacaagttctttgacgaatacgactaatgagaataccactttccatgttgaaaaaaataatataaggaattatatagttatttatagctttttgtccacatttgaatggatgataatgaatatagatttacatacaaactaaattcataagttaattaataaatgtatgattagtctaaaacgaattatattttgggatgtagg

SEQ ID NO: 53208 - DNA, 1506 bp, Zea Mays
cttgtccctagaccactatgtgctacaagaccttgtgaacagtgggccttgaatccctaaatctgggaatttgtccaaaattaagtattctgtgcattgaggccccaaatatgtctataatggagctgaagggttgtggtgtgctttccgaggcttccatcaattgccctcgcttgacatctttagatgcctctttctgcaggcagcttgtggatgattcactgacttgtatgaccggggcatgtcctctgattgaacatcttatcctgtcatcatgcctatccattggcatcgatggattgtcttcattgcattgccttcataagttgaccttgcttgacctgtcttatacatttttgatcaacttgaagcctatttttgacagttgtccacagtgaaggtgttaaaactttcagcttgcaagtacctcagtgactcatcattggatgccctttacagagagggtgctcttccattgcttgttgagctagatctgtcctactcacccatcgaacagaatgcaatagaaggtcttcttgcttgttgtagtaatttggttaatgtgaacttcaacggatgtacaaattttcaagaattggtgtgcgaatctggggatagcggttctgtggatatgccagttgactcttgtccacctagttcaccaatcaagaatgaagagatcagaagtggatttgacatgctccaatcttttaacgttaaacttgagcaattgtagctcactggaggtgctgaagcttgattgcccaagattgaccaacctccaacttttggcatgcaccatgttgcaagaggaggaattagaatctgcaatatccctttgttgtgcgttggaggtccttaatgtgcattcttgtccaaagatcaatgctctggattttggccgactccgtttggtttatcccagtctgaagcgcatccagagcagcctcatttcataatgcggaggctactaccatattaaggagtgcaattcatgcaataagcctctgttcaggtttgatgaaagaagcaagtcgggaaaagctctccttgatgctctttgtacatattacccaagcattgccggtatattgcaagccaggggcaacgtggtcctatttatccagtccattcatggttctgtaataagtactttttttttgcaaatttgttttgttgccggagatagcaaaatatctgttcatgtctgtttgtctttgttccttggagtgtaccaatggagctatcagatgtatatgctggtttatatgcatcaataatcttgttttgatctaggatcttggaatcgctttgctaatgcgatctggggtgtagttttgtacaactttaattgttcgcagattttagcgagtgttatgaagcttaactgatctggggtgtagttttgtacgactatgtttaatttttcgcagattttagcgcagtgttatgaagcttaaccaaggctatgcaaggcagatgatgcacgcacaatcttagctagag

SEQ ID NO: 53209 - DNA, 3796 bp, Zea Mays
atccgagccgtccctctcacccttccctgatctacctccctagcctgccgccaccaccgtcgtctctgcgccgcgcagatccgccctgctggtgcggcaccactcgagcatacgtgtacggacgcgacgagacgtagtccccgcccacctcgccgaggactcgttcctgtttcgtgcgcgccagcactaccggtgtccgtgcgtggctgggccaggtcgattcgaccgaatccggtggagttcaccgtaccgtggtgtcaaatcggtgagttccatagtgttacgcgtgggggaggagcgttcgggtctgtctggccggaagtggcgctgggatggctctagggtttggttttgatcttttggcctgagggcatggcgaatgagggccggatgaagggcgtgcagggcgttgggggtggaactggtgacgaggaagatgggaatgaggaggtgcgagaggagctggaactcgcgctatcgctggggtggcgaagctggcacctcccgccgcggcaggagcccgctcccagctcacataactggacggcggttctgccggagtggaaccccgacgccgctggtagctcgcatgatgcgaaaacggccttgggcggacaatctatcccttctctcaggttccgagacatgttgggtggtatcctagacgcctcccatgcgggtggcagtgtggaggttgggtggggcaacctggacgaagaggatgaagacagagacctgcagaataaacggcttagagtacaacactttggcgaagaaggcccactgcattctggtcttctattttgcagagaaagcccacttcattctgaacacgaattggaatttggcttgtcccttttcccaaatgatggtagtgagagcctaagagatgccaataacgagatagtggatgatgcagaaaacccaggtgaaagaaattctgaaggtgttggaataagaatggatctctctgacgatctcctgcatctgatattctctttcttgggccagaaggatttatgcagagcaggtgttacctgcaaacagtggcgatctgctagtgtgcatgatgatttttggaagtgtttgaaatttgaaaacactaggatatcactgcagaactttgttaatatttgccgtcgttacccgagtgtaacagaactcaatttgaatggtgtcataaatgcagaaatgctagttctggaagcaatagtatttttaaggcatctgaagactttgacaatgggcaagggacaactgggaggcccattttttcaagctttatctgagtgcccattattgactgctttaacagtaaacgatgcttctcttgggagtggcatccaagaagcaactattaaacatggtggattgcgtgagcttcatatttttaagtgccgtgcactcagaatatctgtcaggtgttcccaacttcaaatactgtctttgaggcgaactggcatggctcatgtatcactcaattgtcctcagttgcttgagttggacttccaatcctgccataagctttctgataatgcaattcgccaagctgctacagcttgcccgttgttggcgaaactagatatgtcatcttgttcttgtgttactgatgagacactgcgcgacataggtaactcatgtccaagtctgtctgctcttgatgcatcaaactgccccaacatttcatttgagtccgtgaagcttccaatgttagtagacttgagactgctaagttgtgaaggaatcacatctgcttcgatggttgcaatagcttacagccgtctgcttgagcttgataattgcagcctgttgacatcagtgtctttggacttaccacatcttaagaatatgagtctcgtgcatttacgcaagtttgctgaattgaatctgcggagccctgtgctttcttacatcaaagtttccagatgttcagtgctccatcgagttagcataacatcgaccacacttcagaaattggtgcttcagaaacaagagagtttatccagcttgtcattgcaatgccacaacttgattgatgtggatcttagcgactgcgagtcattaacaaatgcgatttgtgaagtatttagtgatggaggtggttgccctaagctaagatcattgattcttgacaattgtgagagtttgagcattgtagaactgaatagcagttctttggtttgtctctctcttgctggttgccgctcgatgacatgcttaagactctcgtgcccaaatttgcaacatgtgaatcttgatggatgtgatcaccttaaaaatgcagcattctgtccagtgggccttgaatccctaaatctgggaatttgtccaaaattaagtattctgtgcattgaggccccaaatatgtctataatggagctgaagggttgtggtgtgctttccgaggcttccatcaattgccctcgcttgacatctttagatgcctctttctgcaggcagcttgtggatgattcactgacttgtatgaccggggcatgtcctctgattgaacatcttatcctgtcatcatgcctatccattggcatcgatggattgtcttcattgcattgccttcataagttgaccttgcttgacctgtcttatacatttttgatcaacttgaagcctatttttgacagttgtccacagtgaaggtgttaaaactttcagcttgcaagtacctcagtgactcatcattggatgccctttacagagagggtgctcttccattgcttgttgagctagatctgtcctactcacccatcgaacagaatgcaatagaaggtcttcttgcttgttgtagtaatttggttaatgtgaacttcaacggatgtacaaattttcaagaattggtgtgcgaatctggggatagcggttctgtggatatgccagttgactcttgtccacctagttcaccaatcaagaatgaagagatcagtgagcaacctggccgtctgcttgaagttctcaattgaagtggatttgacatgctccaatcttttaacgttaaacttgagcaattgtagctcactggaggtgctgaagcttgattgcccaagattgaccaacctccaacttttggcatgcaccatgttgcaagaggaggaattagaatctgcaatatccctttgttgtgcgttggaggtccttaatgtgcattcttgtccaaagatcaatgctctggattttggccgactccgtttggtttatcccagtctgaagcgcatccagagcagcctcatttcataatgcggaggctactaccatattaaggagtgcaattcatgcaataagcctctgttcaggtttgatgaaagaagcaagtcgggaaaagctctccttgatgctctttgtacatattacccaagcattgccggtatattgcaagccaggggcaacgtggtcctatttatccagtccattcatggttctgtaataagtactttttttttgcaaatttgttttgttgccggagatagcaaaatatctgttcatgtctgtttgtctttgttccttggagtgtaccaatggagctatcagatgtatatgctggtttatatgcatcaataatcttgttttgatctaggatcttggaatcgctttgctaatgcgatctggggtgtagttttgtacaactttaattgttcgcagattttagcgagtgttatgaagcttaactgatctggggtgtagttttgtacgactatgtttaatttttcgcagattttagcgcagtgttatgaagcttaaccaaggctatgcaaggcagatgatgcacgcacaatcttagctagag

SEQ ID NO: 53210 - DNA, 1864 bp, Zea Mays
atccgagccgtccctctcacccttccctgatctacctccctagcctgccgccaccaccgtcgtctctgcgccgcgcagatccgccctgctggtgcggcaccactcgagcatacgtgtacggacgcgacgagacgtagtccccgcccacctcgccgaggactcgttcctgtttcgtgcgcgccagcactaccggtgtccgtgcgtggctgggccaggtcgattcgaccgaatccggtggagttcaccgtaccgtggtgtcaaatcggtgggccttgaatccctaaatctgggaatttgtccaaaattaagtattctgtgcattgaggccccaaatatgtctataatggagctgaagggttgtggtgtgctttccgaggcttccatcaattgccctcgcttgacatctttagatgcctctttctgcaggcagcttgtggatgattcactgacttgtatgaccggggcatgtcctctgattgaacatcttatcctgtcatcatgcctatccattggcatcgatggattgtcttcattgcattgccttcataagttgaccttgcttgacctgtcttatacatttttgatcaacttgaagcctatttttgacagttgtccacagtgaaggtgttaaaactttcagcttgcaagtacctcagtgactcatcattggatgccctttacagagagggtgctcttccattgcttgttgagctagatctgtcctactcacccatcgaacagaatgcaatagaaggtcttcttgcttgttgtagtaatttggttaatgtgaacttcaacggatgtacaaattttcaagaattggtgtgcgaatctggggatagcggttctgtggatatgccagttgactcttgtccacctagttcaccaatcaagaatgaagagatcagtgagcaacctggccgtctgcttgaagttctcaattgtactgggtgccctaatattaagaaagttgttattcctttgatagcaaacttttcacatttgtccaaaattaatcttaatctttcaaccaacttgaaggaagtggatttgacatgctccaatcttttaacgttaaacttgagcaattgtagctcactggaggtgctgaagcttgattgcccaagattgaccaacctccaacttttggcatgcaccatgttgcaagaggaggaattagaatctgcaatatccctttgttgtgcgttggaggtccttaatgtgcattcttgtccaaagatcaatgctctggattttggccgactccgtttggtttatcccagtctgaagcgcatccagagcagcctcatttcataatgcggaggctactaccatattaaggagtgcaattcatgcaataagcctctgttcaggtttgatgaaagaagcaagtcgggaaaagctctccttgatgctctttgtacatattacccaagcattgccggtatattgcaagccaggggcaacgtggtcctatttatccagtccattcatggttctgtaataagtactttttttttgcaaatttgttttgttgccggagatagcaaaatatctgttcatgtctgtttgtctttgttccttggagtgtaccaatggagctatcagatgtatatgctggtttatatgcatcaataatcttgttttgatctaggatcttggaatcgctttgctaatgcgatctggggtgtagttttgtacaactttaattgttcgcagattttagcgagtgttatgaagcttaactgatctggggtgtagttttgtacgactatgtttaatttttcgcagattttagcgcagtgttatgaagcttaaccaaggctatgcaaggcagatgatgcacgcacaatcttagctagag

SEQ ID NO: 53211 - DNA, 3412 bp, Zea Mays
gccgcatcaccccctcgatccgagccgtccctctcacccttccctgatctacctccctagcctgccgccaccaccgtcgtctctgcgccgcgcagatccgccctgctggtgcggcaccactcgagcatacgtgtacggacgcgacgagacgtagtccccgcccacctcgccgaggactcgttcctgtttcgtgcgcgccagcactaccggtgtccgtgcgtggctgggccaggtcgattcgaccgaatccggtggagttcaccgtaccgtggtgtcaaatcgagaaggcccactgcattctggtcttctattttgcagagaaagcccacttcattctgaacacgaattggaatttggcttgtcccttttcccaaatgatggtagtgagagcctaagagatgccaataacgagatagtggatgatgcagaaaacccaggtgaaagaaattctgaaggtgttggaataagaatggatctctctgacgatctcctgcatctgatattctctttcttgggccagaaggatttatgcagagcaggtgttacctgcaaacagtggcgatctgctagtgtgcatgatgatttttggaagtgtttgaaatttgaaaacactaggatatcactgcagaactttgttaatatttgccgtcgttacccgagtgtaacagaactcaatttgaatggtgtcataaatgcagaaatgctagttctggaagcaatagtatttttaaggcatctgaagactttgacaatgggcaagggacaactgggaggcccattttttcaagctttatctgagtgcccattattgactgctttaacagtaaacgatgcttctcttgggagtggcatccaagaagcaactattaaacatggtggattgcgtgagcttcatatttttaagtgccgtgcactcagaatatctgtcaggtgttcccaacttcaaatactgtctttgaggcgaactggcatggctcatgtatcactcaattgtcctcagttgcttgagttggacttccaatcctgccataagctttctgataatgcaattcgccaagctgctacagcttgcccgttgttggcgaaactagatatgtcatcttgttcttgtgttactgatgagacactgcgcgacataggtaactcatgtccaagtctgtctgctcttgatgcatcaaactgccccaacatttcatttgagtccgtgaagcttccaatgttagtagacttgagactgctaagttgtgaaggaatcacatctgcttcgatggttgcaatagcttacagccgtctgcttgaggcactacagcttgataattgcagcctgttgacatcagtgtctttggacttaccacatcttaagaatatgagtctcgtgcatttacgcaagtttgctgaattgaatctgcggagccctgtgctttcttacatcaaagtttccagatgttcagtgctccatcgagttagcataacatcgaccacacttcagaaattggtgcttcagaaacaagagagtttatccagcttgtcattgcaatgccacaacttgattgatgtggatcttagcgactgcgagtcattaacaaatgcgatttgtgaagtatttagtgatggaggtggttgccctaagctaagatcattgattcttgacaattgtgagagtttgagcattgtagaactgaatagcagttctttggtttgtctctctcttgctggttgccgctcgatgacatgcttaagactctcgtgcccaaatttgcaacatgtgaatcttgatggatgtgatcaccttaaaaatgcagcattctgtccagtgggccttgaatccctaaatctgggaatttgtccaaaattaagtattctgtgcattgaggccccaaatatgtctataatggagctgaagggttgtggtgtgctttccgaggcttccatcaattgccctcgcttgacatctttagatgcctctttctgcaggcagcttgtggatgattcactgacttgtatgaccggggcatgtcctctgattgaacatcttatcctgtcatcatgcctatccattggcatcgatggattgtcttcattgcattgccttcataagttgaccttgcttgacctgtcttatacatttttgatcaacttgaagcctatttttgacagttgtccacagtgaaggtgttaaaactttcagcttgcaagtacctcagtgactcatcattggatgccctttacagagagggtgctcttccattgcttgttgagctagatctgtcctactcacccatcgaacagaatgcaatagaaggtcttcttgcttgttgtagtaatttggttaatgtgaacttcaacggatgtacaaattttcaagaattggtgtgcgaatctggggatagcggttctgtggatatgccagttgactcttgtccacctagttcaccaatcaagaatgaagagatcagtgagcaacctggccgtctgcttgaagttctcaattgtactgggtgccctaatattaagaaagttgttattcctttgatagcaaacttttcacatttgtccaaaattaatcttaatctttcaaccaacttgaaggaagtggatttgacatgctccaatcttttaacgttaaacttgagcaattgtagctcactggaggtgctgaagcttgattgcccaagattgaccaacctccaacttttggcatgcaccatgttgcaagaggaggaattagaatctgcaatatccctttgttgtgcgttggaggtccttaatgtgcattcttgtccaaagatcaatgctctggattttggccgactccgtttggtttatcccagtctgaagcgcatccagagcagcctcatttcataatgcggaggctactaccatattaaggagtgcaattcatgcaataagcctctgttcaggtttgatgaaagaagcaagtcgggaaaagctctccttgatgctctttgtacatattacccaagcattgccggtatattgcaagccaggggcaacgtggtcctatttatccagtccattcatggttctgtaataagtactttttttttgcaaatttgttttgttgccggagatagcaaaatatctgttcatgtctgtttgtctttgttccttggagtgtaccaatggagctatcagatgtatatgctggtttatatgcatcaataatcttgttttgatctaggatcttggaatcgctttgctaatgcgatctggggtgtagttttgtacaactttaattgttcgcagattttagcgagtgttatgaagcttaactgatctggggtgtagttttgtacgactatgtttaatttttcgcagattttagcgcagtgttatgaagcttaaccaaggctatgcaaggcagatgatgcacgcacaatcttagctagag

SEQ ID NO: 53212 - DNA, 936 bp, Zea Mays
actttctctccaaattcctcaaaaccttgggttcacatttttgtagggctacaatcatggtattatgacaccatgccaagtttcacacctttcggacctcatttggtatttttcttttttttgcactgagagcaagataattcaattaattcataaaaaatggaaaaagggggaagttagattttctcgtgaaacatcaataataattgtatgcccacaagtgtgccagaggacaagcgaaaacaacaaaaaaaatccaatttgccttctatccggtgcaccaccagacagtgaacagcgcgcgatgcccttccttgtttggcgaagccgactgttgcatccaccggccccacggcacaccagaaagtccggtgcggtctggtgaccattggtaaagtccacgtgtctcccgttgatcacgcagccgatcgttggctgggcacgcgactggcacaccaaacagtccggtgaattttagtcgcggcgccctcagctttttccgagagcggtcagttcactgggatgccagcctaggcaccggacattgtccggtgcaccgtaggttggtgcaagtttggcttgccttagccaaacttttccaattcgatttctctcactttgagaagtttcctagcacttaatagaatatagttagtaccaaaaaacaatttactaagtgctagagtcatacctttgtttatccaatttgcttctctttaactctgagctcgtattagatgaaaacaatatgtgttgagcatttaaacaccaaaacaatacagaaatggcgcaaaggcacatttccctttcaccgtgcccgaactggcagtggagttgttggtagtgctgcaacttggaccgtgccgtgccggcccggcacgagcccatcgtgcttcgggcctcagttagtcgggcctatctagcacgaaatagaat

SEQ ID NO: 53213 - DNA, 2252 bp, Zea Mays
gcgacgaggccatggcgggagccaatgctagtgcgcttgctggccgtcgcgacgagcggcccgcacggggacgcaattcctcctccgacgacagatctgagcaatcctacctcacgcccacccgtgaggccaccaacagggcccctgcgcccgacgataggttgatggcgtccgtcgaccaccgtcgacgccagactccggatgaagaaggaggtgtcgagcaggaacggggcggtgccgttgccgacgaggtggaggccatggcggcgcacgaacttcctagagatgagaccggagcagaggctgcaacccagcagccgtggtgcctttgctgatccacttcgtccctggtgatgatgggttcagatggagcatgcatggggtttgctgctactcacggtggcgagcttgtcactggcggacacgctggaggagcaccctgctctgtggctgtcgcagtttccgctcgacgcgtgcgagttcacgtttgatcgtgtgtccgttccgcggatggagctgctcgtcctaggcatcctcgagtggtgggtggtcgtcgacatccctttcccctacatccgctgcttcgtggcgcagtttcggcaggacgagcggcgggcgatctgcgagcgcgccgtgcagcaccactgcaccagctacctcaagcatagaggaggatcgccaactacggccgcttcactgaagaccggcgtaaagagggccagattcattgcctccatcgtcaagggccgcagtggctcactgttccgcgagaagatgatcgtgggtgttggtgctcgctttgtcgtcatcgtcgacgcgtccaagctcgtgtcgcgcctcggctgcacgggcgccaaccccggcgaggtcatccccttcggcgtgcttcacacgctgggacacatccgcggcctcttcgacggcttgcctggattccacgccaggctgaggtctgttccagcgaccgccgccaaggggaaagaagactcgaaacagtccttcgtcaccgacaacgacaactacatcatcgaggacggcatccgcggcgacctgcacgacatcagtgaccgtctgtttcagatcaccggcgtcgtagaacacgacatgttcctagatcctaggctaattttcccacgctgaagaagctggagatgcgaggaagaaggtgcagcttacagaggccgcggagcgttgcttcgacgagttggtcggaagaggcctgctccgtctcacggtcggaagcaatggagccacgggagccaggatgcccccgtcatgatccgctccttcacgaaggacgtgtctgaatgagaacttctgcactgagtcagcagcaaataatattttcgaagtgcggcggctgtccatcgttgagaacaacgaggctgacgatcgcattggtgaggggatgacaatggcagcatggatgacgagcatggaaataacggtgaggttcgaataggccggcgagcacctgtgggtcaagatgggcggccacaaggtgctcaacgtcgacacgtacgacagcatcttcgccaagccaggcggctcattccgcaaccccgatgtgcacgtcgatggctccagcgacttgggcctcattttcatgagcgccatcagcctcgtcgacatgttcatgagctcgagcaagtggacggagttcttccgtgagaagagggcagcgtggcagatggctaggagaaatactgtcacctatagcattttggagcagagagacacatggaaggttcagctcttcaaatccattcatagtggtgctgtttttggctttccgagaatcctgaggaagctgcaagagctaggctcgtgagtggacttatgcaaccatggcctctacctatggagttgagcgattggatttatgcaaggcattcgataacttaacgataaaggtcagcagcttggggacaagccaagcgttggggaatctcagtacagtgtcatgtggtgccatgtgggcccttgaaaagtggcaagtgaggtattctctgctataaaatggagaagctggacacgcgatggttatcaaagaatcaacagagaacctctttattgttcatcttcctccattctctaggctgtttatcttccccaactttatctctcttgtacccggattctcttccactctagtaccttgctagtgttgttaacaggcagtcgccgggcaaggcatcttccggaacatgggcgaagtccggaccgggagctccacgtacgaccacttctcg

SEQ ID NO: 53214 - DNA, 1886 bp, Zea Mays
ggatgcctaaatctccagttatagagttttgaagtgagtagtcgaattccgtccaaatctggacagcattatcatttaatactgattgacttttttaagtgtctaatctcatggtgatgataataccaaagttgtataggatttcttaggctttccagaaaagtcttagttcactatttttggatgaatattttgtgagttgtgaacaaaacaattgactactgtgtgctgtccagaaaatctgcaattgagcacttgattttgttcttgtttggctaagtaggaataattagtttttgattcttgagtgatgaagacttgtggcatttgaaatgtttctccaaatgtcttgttgcatatggttgagttttttctttcttaatgtgtgctctaaacctattagtttgggaagtgatgtgcctgtacttagagggatcatcgtgattttgtgctcgtggtagtatacaacaaaatcatgtgcttttatcttaacgtctgtttggtatatattgtgtgtttttgtgagaaatatattgcaaaatctctctctctatatatatatctacacctgactctgcaatatataggacatcgctcgaattgtttatatgcaggaataggttgtacaaataatttgaaattgacattaaccactaggtggccacccatcattgttttttaccataaggagtctcattttccagttcttactgaatatacaaatttatctgaatttcgattgtttttctgcttgtgaacctttcattggaacgagacaccgaggaggaggctgagttcagagcgaagatgaaagagcaggcaaacgcccctgatgatttgccgcctcagcttctctttgctcatcagggtcagagagacttgaaagaagtgcactggcacccacagatgccgtcgatgatcatatcgacggcaatcgacggcttcaacgtgttgatgcctagcaacatcgatacaaccattcctggcagcacagatacagcaatgccgccagctgagccataggttaggtgtttctggtagctcatgattccaggttcttgcggtggtgagtgtagttgccatttgtcatgtgtcgacagtgctatgctgtcgtgttggagcatgatgggaaaattttgattggctggcgttctatgataatatggttaggatttaatatgtgcatgctatttttagttttaccagcatctaattagatcttgcatgagataaatcttcgcttgacttgagttcatagactgactatttcaagctttcaaccagtctttttaatgtaatatttgcagcaactgcaatgctgcatcttgtatatagtagtatgtgcttcattcgatcaataatacaatctcttttgcaagttgactaagataattttgccttagttgtctcaagacatggttataggttttccctgtgtttttttgttttattcatatttttttcttgttaataacacgtgctctgacagactgaccttccaatctgaaattagttttgtttgattgcatccttgctgagcttgatctgatccacattttttccaggtccctataaaatggccaaaaagtcgtgatgtagtatggaaagcaaacattccacacactcaccttgcaaaagagaagtcagaccagaactggatggttgaagctggtgaaaaaatcaagtttccaggtggtgggacccattttcaccatgaagctgacaaatacatatcaaatattgcaaatatgctaaatttcaaagataacaatataaacaatgaggggatgcttcgtacagttcttgatgttggttgtggagttgctagtttcggaggataccttctttcttctaatgtgatagcaatgtctttggcaccaaacgac

SEQ ID NO: 53215 - DNA, 1368 bp, Zea Mays
ggaaattcttggatcacctgttttggatgcctaaatctccagttatagagttttgaagtgagtagtcgaattccgtccaaatctggacagcattatcatttaatactgattgacttttttaagtgtctaatctcatggtgatgataataccaaagttgtataggatttcttaggctttccagaaaagtcttagttcactatttttggatgaatattttgtgagttgtgaacaaaacaattgactactgtgtgctgtccagaaaatctgcaattgagcacttgattttgttcttgtttggctaagtaggaataattagtttttgattcttgagtgatgaagacttgtggcatttgaaatgtttctccaaatgtcttgttgcatatggttgagttttttctttcttaatgtgtgctctaaacctattagtttgggaagtgatgtgcctgtacttagagggatcatcgtgattttgtgctcgtggtagtatacaacaaaatcatgtgcttttatcttaacgtctgtttggtatatattgtgtgtttttgtgagaaatatattgcaaaatctctctctctatatatatatctacacctgactctgcaatatataggacatcgctcgaattgtttatatgcaggaataggttgtacaaataatttgaaattgacattaaccactaggtggccacccatcattgttttttaccataaggagtctcattttccagttcttactgaatatacaaatttatctgaatttcgattgtttttctgcttgtgaacctttcattggaacgagacaccgaggaggaggctgagttcagagcgaagatgaaagagcaggcaaacgcccctgatgatttgccgcctcagcttctctttgctcatcagggtcagagagacttgaaagaagtgcactggcacccacagatgccgtcgatgatcatatcgacggcaatcgacggcttcaacgtgttgatgcctagcaacatcgatacaaccattcctggcagcacagatacagcaatgccgccagctgagccataggtccctataaaatggccaaaaagtcgtgatgtagtatggaaagcaaacattccacacactcaccttgcaaaagagaagtcagaccagaactggatggttgaagctggtgaaaaaatcaagtttccaggtggtgggacccattttcaccatgaagctgacaaatacatatcaaatattgcaaatatgctaaatttcaaagataacaatataaacaatgaggggatgcttcgtacagttcttgatgttggttgtggagttgctagtttcggaggataccttctttcttctaatgtgatagcaatgtctttggcaccaaacgac

SEQ ID NO: 53216 - DNA, 1212 bp, Zea Mays
ggaaattcttggatcacctgttttggatgcctaaatctccagttatagagttttgaagtgagtagtcgaattccgtccaaatctggacagcattatcatttaatactgattgacttttttaagtgtctaatctcatggtgatgataataccaaagttgtataggatttcttaggctttccagaaaagtcttagttcactatttttggatgaatattttgtgagttgtgaacaaaacaattgactactgtgtgctgtccagaaaatctgcaattgagcacttgattttgttcttgtttggctaagtaggaataattagtttttgattcttgagtgatgaagacttgtggcatttgaaatgtttctccaaatgtcttgttgcatatggttgagttttttctttcttaatgtgtgctctaaacctattagtttgggaagtgatgtgcctgtacttagagggatcatcgtgattttgtgctcgtggtagtatacaacaaaatcatgtgcttttatcttaacgtctgtttggtatatattgtgtgtttttgtgagaaatatattgcaaaatctctctctctatatatatatctacacctgactctgcaatatataggacatcgctcgaattgtttatatgcaggaataggttgtacaaataatttgaaattgacattaaccactaggtggccacccatcattgttttttaccataaggagtctcattttccagttcttactgaatatacaaatttatctgaatttcgattgtttttctgcttgtgaacctttcattggaacgagacaccgaggaggaggctgagttcagagcgaagatgaaagagcaggcaaacgcccctgatgatttgccgcctcagcttctctttgctcatcaggtccctataaaatggccaaaaagtcgtgatgtagtatggaaagcaaacattccacacactcaccttgcaaaagagaagtcagaccagaactggatggttgaagctggtgaaaaaatcaagtttccaggtggtgggacccattttcaccatgaagctgacaaatacatatcaaatattgcaaatatgctaaatttcaaagataacaatataaacaatgaggggatgcttcgtacagttcttgatgttggttgtggagttgctagtttcggaggataccttctttcttctaatgtgatagcaatgtctttggcaccaaacgac

SEQ ID NO: 53217 - DNA, 589 bp, Zea Mays
gattcctatgagtgtgagaagaagcaaatcccagcataacacatgctaggtgttcgacgaaatgttcgaattgggattgtcgttgttattgtggatctgagtcgcgctttgtattgcacaggtgtgtcgtggtgaatatctctagatccgcgactatgtctgtgtgttttgttctatggtgacgtcaggaaagtatctttcctctctttcccttgtctttgtgatgcttagttgtatgccatatgtttggtgaatgaatatgtatagaaggattaaattgtttaggcatatgcatagcatgaataaaatgagttcttgtgtgatgatatactgtatggaatgtgctgatatatgtgtatgcaaagtatgattaattagttctttgtttgcatgaagtgagagtagatttaaaaatactaggttatatgaagtgaatggattcatggttataatgtataagtaatctatatatgtgattaggaagtgtcaagcatgaaagttgtagaagtaaatatgaacccaattggaatgtttgctgtttggactgcgtgtacagttttgattgtgcaactaatctagtgaagcaaat

SEQ ID NO: 53218 - DNA, 593 bp, Zea Mays
ggaagaaaggattcctatgagtgtgagaagaagcaaatcccagcataacacatgctaggtgttcgacgaaatgttcgaattgggattgtcgttgttattgtggatctgagtcgcgctttgtattggtgtgtcgtggtgaatatctctagatccgcgactatgtctgtgtgttttgttctatggtgacgtcaggaaagtatctttcctctctttcccttgtctttgtgatgcttagttgtatgccatatgtttggtgaatgaatatgtatagaaggattaaattgtttaggcatatgcatagcatgaataaaatgagttcttgtgtgatgatatactgtatggaatgtgctgatatatgtgtatgcaaagtatgattaattagttctttgtttgcatgaagtgagagtagatttaaaaatactaggttatatgaagtgaatggattcatggttataatgtataagtaatctatatatgtgattaggaagtgtcaagcatgaaagttgtagaagtaaatatgaacccaattggaatgtttgctgtttggactgcgtgtacagttttgattgtgcaactaatctagtgaagcaaat

SEQ ID NO: 53219 - DNA, 853 bp, Zea Mays
gtggcatttctgtgtttatccgctatccatccgcgcccaagtcacgggcaacggtgcggtaggtacccgtcgacccccgcgctatggctgtcggaagcgaagctttcacgctacagcggtgcagctggaggaccaacatgcggggaaggaggaccttcgcgccatgaccgtgggggcagagcttccacaccgcggcggcacaggtagcctcggccacgtcatccgcgtccgtgttcgcgtgctcgagccagcagtggaggccgcctttgttgccggggaagaagctcgaggcaaagcctacgacgatgactaggtggagtagctggcgaacgcagccgtcgcgtgtgcgagccagccaggtcgccggcggtgaactatgccaactgctggacgacgcatggtactttatgttgacggattgaagccaaaccttttggttaattagtagtttttgttttgtaaaataatatattttgttaattaagttggtatattaaaaaggttgggatatgatgaactttagaggacgctgttaaagactgcaaagatatataagataaaattttttagaatgtactgtaaataataaataatatttttgtatagaatgaaaatttaggtaacgttggagacggtgaaggtataggagatatcttttgtagagtgtactgtaatatattttgttaattcacatcaagaaatttaggcacgtactagtctgtttgttgagcaacgacacgacacgactcgggcagtcgacacgtgtcgtatgcgccgtgcgtggagcagcagcgctaggacgtccgtttcttgggcttcaccagtctccacggcggggaacaaagaaagggac

SEQ ID NO: 53220 - DNA, 180 bp, Zea Mays
agaatgggtacatgggacagcacctccataatccttctgctgcgactacagacacgagctgcgagtctgtggtcacaagtggtcagcaccaccaacagcaaaacccagcagttccgtgtcctcagcgggacgcgaataacccagctagtctactagctattgctgatgagaccttggcag

SEQ ID NO: 53221 - DNA, 1045 bp, Zea Mays
gtcagcttggctccgccgcacgcgtgtcacctgttttggccgcaccactcactgcacatgggacctggtagtcacagtattccccgcatcgtgcgcacgtcgctgagctcaacaaaccgcgcatggtttgcggattccgttgcggggaatctggaatcgagctggccaaggctatttagccataacgcgaccggttccctacccaccattgggagctattgcatcgcgccgtggtgtggagcaaggggggattcgccttcaccgtcgatcgccgcgtgcgcctctcggcatatccgccactacactagacgagcaaactactgtggatcctgaggcccagcagatagaagtagctgagcaggagctcattgaaggcaagttgtgcccttgatcacttactttttcccagccatgttcttattaattataatgatctgcataggttaattttgatgggatccaataggttaccccagttttggctatctttataccgtgttgccactgcatatttttgggtagtatttgttattgcttattgtggttttgggtatggagatacactattcatggttacacttttattatctgtttattattactgttcatgttaagatcattatgttaatgagaacatggagcgaccacccgggaaaacagtgctaccacaagagtttaatgggacgcccttggctgattaactaggaaagctagtgaacgactaccttacccgaaaggggcaagggcagtaggagagtggttagtgtagggaggtccttgggttgattttgctgcgatggcggtcaggcgagggatttctgcactggagcttcctataaactgtagcggattttctgaagctagtggaactttgtaaaggcctcatagtgttaccctgcctcgcctcctcggtagaggtgtatgggattggtcgtctcttggcagatgggtaacatgacttgtgggtaaagatgtgcaacctctgaagagtgtaaaattggcatactatatgtgttgtcttctctggcgcttatatgagatgcac

SEQ ID NO: 53222 - DNA, 1303 bp, Zea Mays
atttggtgcggcatctgaatttgacttcatgctataaatagaatctgttttcatagcctccgagttgttatcatgcggtgaatagctacctaccaatcccatcccaccttgattggaaatcacagatgtatggtaccttgcaataaaagtgagccgacagatttgatcgtcttaatacacaattccattgttcgtctttgattgtattattgttggcaccatctccacatgatctcgacctcttcaaactcgactcaagtgatggcaaaacataattatcatttccatccctataccatcttgcttcgctagagcaatgccaggcgcaccggcctcacggaggagtgctcagctggttctcgttttgaccttgctctagaggacattgctgaagggaaggtgacggtgcaagaagccatcaacccttttttctgaatgggttattggtgcagactgatttaggagggtttttattgccattgttctgatttgctgctccacataaaaagccaattggaaaggctgcatcccaggtgctcgatgaaatgcctaaagggctacaacaatagtaattcactagctagctccagcgaagctgccatatggtaccatggaggcaccaacttcgacaagaccttcggtgggtcgttcatcgccactggctaatgcgccgatcgacgaatacgtccgctgaggcagccgaaatgggtctcctaagggacctgcacaaggccatcaagcaaaccgagctggcgctgatctctgtcaaccacacaatccaatccatcagaaaatacgagaagcatgaccatcaactcgaatgagcaattctaagtctgggcagtgaccgcagttgatcatctactctgctagccagtccatacatgtgttcgtcaacgaccagtcctatgagttcttcaacaacaggcatcgtatatggtggctacaacagtcccaagctaacatatagtgggcatgtgaagatgtggcaaggcagcaacaagaaattcagaaccaggcgacctccatgacaaagcactaaatgatggtttggtgcaggctcaagcatgaagcatcacttatgcgtgatgataaggttcaatatcaattgcatgtcgcggagatggaggcagttagcgttgcaatgcctcctgtttatgtaaatcacggtaatgatggtgggccagctgttaaggatatacatatggagaactttagcatcactattgatctaattcaagaagccactttaacaatcttatttggaaggcactatggtctagcgaagatgatttttagttag

SEQ ID NO: 53223 - DNA, 1549 bp, Zea Mays
gtttcttttcttgagctgtacaatgcggagcttactgatcttctagctgtacaatgagatcaatgaataaaaggattattcatatcaatgtccatgcaccttctcagaaaatccttttgtgttgttggtgttggtttcctggacctgtactgatatcatcaggcacgccgaggagaacaggggcctcctctccgcctcctccttcgacaggcagcagctgcggaaggaggtggtgaggagggtcaaggccgcggcggcgggactggcaatagaaaacccttatattaaagagataatcgatgatgatgcggacagacctaaagaggtttgctcaacttttgctctgaatttattagtaggctgtcttggatacagatggaaggaaacagtgggcgatgaaagcagggaatttgggaggtacatgcgacagagagaagagcaagagaagcaggaagcagagttgttcactcgggctcctgtaaccaaacatgataagcagatcgagaagcgcataaggagacaacttcatggtctaaacatggttgatatcaaacctatcatgattagacaacgcttggtaaaaataatctgtttgaaaaagttggcaagacaacgcttggtaaaaataatctgtttgaaaaagttggcagcatcaaacctatttgttaagagcaatgccaggcgcaccggcctcacggaggagtgctcagctggttctcgttttgaccttgctctagaggacattgctgaagggaagtgtttacatgttgaggagctacctacggtggcatcaattgttgcttatgatttgctccctagaggccttaaagtaccatggaggcaccaacttcgacaagaccttcggtgggtcgttcatcgccactggctaatgcgccgatcgacgaatacgtccgctgaggcagccgaaatgggtctcctaagggacctgcacaaggccatcaagcaaaccgagctggcgctgatctctgtcaaccacacaatccaatccatcagaaaatacgagaaggtcatccaaattctgtcaaaaatgtatcgagttcaaactagctactcatggacatgaccatcaactcgaatgagcaattctaagtctgggcagtgaccgcagttgatcatctactctgctagccagtccatacatgtgttcgtcaacgaccagtcctatgagttcttcaacaacaggcatcgtatatggtggctacaacagtcccaagctaacatatagtgggcatgtgaagatgtggcaaggcagcaacaagaaattcagaaccaggcgacctccatgctcaagcatgaagcatcacttatgcgtgatgataaggttcaatatcaattgcatgtcgcggagatggaggcagttagcgttgcaatgcctcctgtttatgtaaatcacggtaatgatggtgggccagctgttaaggatatacatatggagaactttagcatcactattgatctaattcaagaagccactttaacaatcttatttggaaggcactatggtctagcgaagatgatttttagttag

SEQ ID NO: 53224 - DNA, 2648 bp, Zea Mays
tcattcggagcgacagcgacacggccggcacggatgaggacgaggatgccacgccgtcgcctcctccttgccactgccaccagcagcagctcgtgacccgcgagctgttcccggccggcgccggctcgccggccccagcgccgaggcattgggccgatctcggcttcttccgcgccgaccgacagcagcaacaggcgccgggccctaggatcgtgccgcacccacatggcgcaccacagccccatcgccgccatgatccttatttctgtcaccgattgcttccgaccctcattaatttctgacacaaactctccgtcctccttttcttctcccgcgacgcagggattgcggcaagcaggtatctaggtggattcgacaccgctaacgccgctacaagacacgcactggactggacccctagaattcttcgtcatgtgagtctctgaccggattgattgattgattaacgagtctctcgctcctggaactcgcagggcgtacgaccgggcggcgatcaagttccgcggcgtggacgccgacatcaacttcaacctcagcgactacgaggatgacatgaagcagagtacatcatatttgacattctcgaggcacagagtgtagagtatagcatgaaggtttcttttcttgagctgtacaatgcggagcttactgatcttctagctgtacaatgaggcacgccgaggagaacaggggcctcctctccgcctcctccttcgacaggcagcagctgcggaaggaggtggtgaggagggtcaaggccgcggcggcgggacgtgagtgaagtgagctttgtcgagcctgtatgtggaggtcggctgtgaagctgggactaggacaagggcgagctgaaggctagaagctgtaaatgcacccttcaagagtcttcataggccaagtctctacgtagtggaaggaaacagtgggcgatgaaagcagggaatttgggaggtacatgcgacagagagaagagcaagagaagcaggaagcagagttgttcactcgggctcctgtaaccaaacatgataagcagatcgagaagcgcataaggagacaacttcatggcaaacaatctaccaatggtggattccatgcttagaaatgcttgtaccgttaggattaatctagggtttatgcaaatctgcccactgtggatcacatgtttagaaacaccattattattatggataatatatggtttttgaggatttagctgtctaaagctgagagggttggagttggacttgctctctcaaaaattttgagaatccagacttgaacctggaagggagaaaatttacaattgctcaaattaaggaatccaaacatcaacatgaatatatatacgcagcttggagactaggatgagttccatccctataccatcttgcttcgctagagcaatgccaggcgcaccggcctcacggaggagtgctcagctggttctcgttttgaccttgctctagaggacattgctgaagggaaggtgacggtgcaagaagccatcaacccttttttctgaatgggttattggtgcagactgatttaggagggtttttattgccattgttctgatttgctgctccacataaaaagccaattggaaaggtaccattgttttcccgtgcttgctacaacatgtttgttaaactgttgatgtgtacttatgtgccaaatattcaaatatgtggtccgttagattatttagtgtttacatgttgaggagctacctacggtggcatcaattgttgcttatgatttgctccctagaggccttaaaggtaaaaaccattagccctaaggaattatctctggcatatgaaccatatcaagttgacattccttttttctaattttcttgttattaatatgcctggttacctgcacaattcattgggtttcatcattatcttgatattggtgtgcatttaaaatacttgatcgatctctgtccaagtgctacaggctgcatcccaggtgctcgatgaaatgcctaaagggctacaacaatagtaattcactagctagctccagcgaagctgccatatggtaccatggaggcaccaacttcgacaagaccttcggtgggtcgttcatcgccactggctaatgcgccgatcgacgaatacgcatgaccatcaactcgaatgagcaattctaagtctgggcagtgaccgcagttgatcatctactctgctagccagtccatacatgtgttcgtcaacgaccagtcctatgagttcttcaacaacaggcatcgtatatggtggctacaacagtcccaagctaacatatagtgggcatgtgaagatgtggcaaggcagcaacaagaaattcagaaccaggcgacctccatgacaaagcactaaatgatggtttggtgcaggctcaagcatgaagcatcacttatgcgtgatgataaggttcaatatcaattgcatgtcgcggagatggaggcagttagcgttgcaatgcctcctgtttatgtaaatcacggtaatgatggtgggccagctgttaaggatatacatatggagaactttagcatcactattgatctaattcaagaagccactttaacaatcttatttggaaggcactatggtctagcgaagatgatttttagttag

SEQ ID NO: 53225 - DNA, 2137 bp, Zea Mays
atgccttgcccgcgctctgttgtttgtgccttgcctgagcctagctgttcgcgcctcgcccgagcctctgccgctgttggcctagaccgtgctctcctcgtccgcttcggccaagccaccctcgtctgtcccgaccgacccccgccgttctcgtctcgcccgagcacgccgtcacactgcgcacaccgatcccgctcctatcgcaccccgaaaccctctggaaaccgtcgcccccgacctcccatctcctcccccgaaaccctctccttgccctcaacgtcggccgtgctggagttcagcatcttcatccggagcgacagcgacgtggccggcgcggacgaggatgaggacgccacatctgctgcgggtagccgccctgctgaggcggcgggttgtcgcggctgcgggagtcgtgggtcggtgggtgcggccgatgcggcgatcgccagagatcgggaggctgtagcagcggcggggcaggggatctcctgggtggattctccggcgatggccgcagacgcactatccaccatcccgggtgccgtgcttcggaacctttctgacaagctctacgagaaaaggaaaaacgccgcgctcgagattgaggggattgtgaagcagcttgcaatggctggggagcatgagaggatatcagcagttatctcgctgctcaccaacaatttcacatactcgccacaaacgaaccatcggaagcagggtgggttgattggtcttgcagcagttactgttggactcaccagtgaggcagctcagcatcttgagttccatccctataccatcttgcttcgctagagcaatgccaggcgcaccggcctcacggaggagtgctcagctggttctcgttttgaccttgctctagaggacattgctgaagggaaggtgacggtgcaagaagccatcaacccttttttctgaatgggttattggtgcagactgatttaggagggtttttattgccattgttctgatttgctgctccacataaaaagccaattggaaaggtaccattgttttcccgtgcttgctacaacatgtttgttaaactgttgatgtgtacttatgtgccaaatattcaaatatgtggtccgttagattatttagtgtttacatgttgaggagctacctacggtggcatcaattgttgcttatgatttgctccctagaggccttaaagtgctacaggctgcatcccaggtgctcgatgaaatgcctaaagggctacaacaatagtaattcactagctagctccagcgaagctgccatatggtaccatggaggcaccaacttcgacaagaccttcggtgggtcgttcatcgccactggctaatgcgccgatcgacgaatacgcatgaccatcaactcgaatgagcaattctaagtctgggcagtgaccgcagttgatcatctactctgctagccagtccatacatgtgttcgtcaacgaccagtcctatgagttcttcaacaacaggcatcgtatatggtggctacaacagtcccaagctaacatatagtgggcatgtgaagatgtggcaaggcagcaacaagaaattcagaaccaggcgacctccatgctcaagcatgaagcatcacttatgcgtgatgataaggttcaatatcaattgcatgtcgcggagatggaggcagttagcgttgcaatgcctcctgtttatgtaaatcacggtaatgatggtgggccagctgttaaggatatacatatggagaactttagcatcactattgatctaattcaagaagccactttaacaatcttatttggaaggcactatgattataaatgttagtggttgtccaagtttccacatgtgtgtcgcgtaatctcacacatcttcaaggtttgtggactcaagtggtcttatgacaattgctagcttgcatccagaggcaatgagaaaggagtaagatgtctgttgatatgtttctgttagtttggaatgcactattattaggactctacactgttgttttcccatactaatggttccccttgtctagctttttgattggaatccacattcagtacaaccagtactgaagtatacaagcacacaacagatgtcaaagctattgccatttgtaaaaaaaattgttgggc

SEQ ID NO: 53226 - DNA, 2460 bp, Zea Mays
atgccttgcccgcgctctgttgtttgtgccttgcctgagcctagctgttcgcgcctcgcccgagcctctgccgctgttggcctagaccgtgctctcctcgtccgcttcggccaagccaccctcgtctgtcccgaccgacccccgccgttctcgtctcgcccgagcacgccgtcacactgcgcacaccgatcccgctcctatcgcaccccgaaaccctctggaaaccgtcgcccccgacctcccatctcctcccccgaaaccctctccttgccctcaacgtcggccgtgctggagttcagcatcttcatccggagcgacagcgacgtggccggcgcggacgaggatgaggacgccacatctgctgcgggtagccgccctgctgaggcggcgggttgtcgcggctgcgggagtcgtgggtcggtgggtgcggccgatgcggcgatcgccagagatcgggaggctgtagcagcggcggggcaggggatctcctgggtggattctccggcgatggccgcagacgcactatccaccatcccgggtgccgtgcttcggaacctttctgacaagctctacgagaaaaggaaaaacgccgcgctcgagattgaggggattgtgaagcagcttgcaatggctggggagcatgagaggatatcagcagttatctcgctgctcaccaacaatttcacatactcgccacaaacgaaccatcggaagcagggtgggttgattggtcttgcagcagttactgttggactcaccagtgaggcagctcagcatcttgagttccatccctataccatcttgcttcgctagagcaatgccaggcgcaccggcctcacggaggagtgctcagctggttctcgttttgaccttgctctagaggacattgctgaagggaaggtgacggtgcaagaagccatcaacccttttttctgaatgggttattggtgcagactgatttaggagggtttttattgccattgttctgatttgctgctccacataaaaagccaattggaaaggtaccattgttttcccgtgcttgctacaacatgtttgttaaactgttgatgtgtacttatgtgccaaatattcaaatatgtggtccgttagattatttagtgtttacatgttgaggagctacctacggtggcatcaattgttgcttatgatttgctccctagaggccttaaaggtaaaaaccattagccctaaggaattatctctggcatatgaaccatatcaagttgacattccttttttctaattttcttgttattaatatgcctggttacctgcacaattcattgggtttcatcattatcttgatattggtgtgcatttaaaatacttgatcgatctctgtccaagtgctacaggctgcatcccaggtgctcgatgaaatgcctaaagggctacaacaatagtaattcactagctagctccagcgaagctgccatatggtaccatggaggcaccaacttcgacaagaccttcggtgggtcgttcatcgccactggctaatgcgccgatcgacgaatacgtccgctgaggcagccgaaatgggtctcctaagggacctgcacaaggccatcaagcaaaccgagctggcgctgatctctgtcaaccacacaatccaatccatcagaaaatacgagaagcatgaccatcaactcgaatgagcaattctaagtctgggcagtgaccgcagttgatcatctactctgctagccagtccatacatgtgttcgtcaacgaccagtcctatgagttcttcaacaacaggcatcgtatatggtggctacaacagtcccaagctaacatatagtgggcatgtgaagatgtggcaaggcagcaacaagaaattcagaaccaggcgacctccatgacaaagcactaaatgatggtttggtgcaggctcaagcatgaagcatcacttatgcgtgatgataaggttcaatatcaattgcatgtcgcggagatggaggcagttagcgttgcaatgcctcctgtttatgtaaatcacggtaatgatggtgggccagctgttaaggatatacatatggagaactttagcatcactattgatctaattcaagaagccactttaacaatcttatttggaaggcactatgattataaatgttagtggttgtccaagtttccacatgtgtgtcgcgtaatctcacacatcttcaaggtttgtggactcaagtggtcttatgacaattgctagcttgcatccagaggcaatgagaaaggagtaagatgtctgttgatatgtttctgttagtttggaatgcactattattaggactctacactgttgttttcccatactaatggttccccttgtctagctttttgattggaatccacattcagtacaaccagtactgaagtatacaagcacacaacagatgtcaaagctattgccatttgtaaaaaaaattgttgggc

SEQ ID NO: 53227 - DNA, 1461 bp, Zea Mays
atgccttgcccgcgctctgttgtttgtgccttgcctgagcctagctgttcgcgcctcgcccgagcctctgccgctgttggcctagaccgtgctctcctcgtccgcttcggccaagccaccctcgtctgtcccgaccgacccccgccgttctcgtctcgcccgagcacgccgtcacactgcgcacaccgatcccgctcctatcgcaccccgaaaccctctggaaaccgtcgcccccgacctcccatctcctcccccgaaaccctctccttgccctcaacgtcggccgtgctggagttcagcatcttcatccggagcgacagcgacgtggccggcgcggacgaggatgaggacgccacatctgctgcgggtagccgccctgctgaggcggcgggttgtcgcggctgcgggagtcgtgggtcggtgggtgcggccgatgcggcgatcgccagagatcgggaggctgtagcagcggcggggcaggggatctcctgggtggattctccggcgatggccgcagacgcactatccaccatcccgggtgccgtgcttcggaacctttctgacaagctctacgagaaaaggaaaaacgccgcgctcgagattgaggggattgtgaagcagcttgcaatggctggggagcatgagaggatatcagcagttatctcgctgctcaccaacaatttcacatactcgccacaaacgaaccatcggaagggtgggttgattggtcttgcagcagttactgttggactcaccagtgaggcagctcagcatcttgaggtggattcgacaccgctaacgccgctacaagacacgcactggactggacccctagaattcttcgtcatggcgtacgaccgggcggcgatcaagttccgcggcgtggacgccgacatcaacttcaacctcagcgactacgaggatgacatgaagcagagtacatcatatttgacattctcgaggcacagagtgcacgccgaggagaacaggggcctcctctccgcctcctccttcgacaggcagcagctgcggaaggaggtggtgaggagggtcaaggccgcggcggcgggacgtgagtgaagtgagctttgtcgagcctgtatgtggaggtcggctgtgaagctgggactaggacaagggcgagctgaaggctagaagctgtaaatgcacccttcaagagtcttcataggccaagtctctactggaaggaaacagtgggcgatgaaagcagggaatttgggaggtacatgcgacagagagaagagcaagagaagcaggaagcagagttgttcactcgggctcctgtaaccaaacatgataagcagatcgagaagcgcataaggagacaacttcatggctgtctaaagctgagagggttggagttggacttgctctctcaaaaattttgagaatccagacttgaacctggaagggagaaaatttacaattgctcaaattaag

SEQ ID NO: 53228 - DNA, 1621 bp, Zea Mays
gtcactatagattccgtcgtcacgcaccgtgcatgtcaaagtgcatccagaacgagatagaagcagaaccggagtcacaccctttccgcgagataatcgattgcagcctcagcaatccacagtccatgggacagcggccaaacaagttcttccgagaggttcttgccttgtgcgactatccccatcttctagaacagagtggaactaattccttgttcagctctggtgcgatagcaagggcacgggagattctagacctctttcccgggagagcaacaggaggatatagccactctcagggcactgaaggattgcgcgacataatcgccgctggaatagccgctcgagataatttcccctgtaacgcggatgacattttcctgacagatggagcagctccgccggttcacatgatgatgcacctgctgatacgggataaaaaagacggcatcctctgcccagttccatcgcattccttgtacacgagtgctatgcttctccagggcgctactcttgtgccatatttccttgacgagtcaagaggctggggagtgagcatgtcagacctgaagaagcagctggatagtgcccggtcaatgggtgtttttgttagggggcttgtggttataaatccaggcaaccctactggacatgttctcgtggaggaaaatcagcgtgagattgtggatttctgcaggaatgaagatcttgttcttctagcagacgaggtttaccaggaaaatatttacgcagatgagaagggatttcactctttcaagaagatagcacggtccatggggtacggcgaaggagacatatctttagtgtccttccattcagtttctaatggatattatggtgaatgtgggagaaggggaggctacatggaagtcactggcttcaactctgatgtaaagaaacaagtgtacaaagttgtatccctaagctcgtgctccaacatctccggccagatcctcatgagcctagtcatgaacccgccacaggtcggagacgagtcgtacgcctcttaccaggccgaaagagacggcgtcctgtcatctttcgctcgctgcgcagaggccatggtgcgctcattcaacgggctggaaggggtgacctgtagcgaggctgaaggagcagtgttcgtgttcccttcagtccgtctgccaaagaaggcggtcgcagctgccgaggcaagcaacacgcagccagatgcgttctacgccctccgcctcctcgaaaccaccgggatcgtcgttgtgcctggctctgtttttggacagatgcatggaacgtggcatttcagatgcacggtcctgccacacgaagagaagaagacgatgacggtgatcatctccagctttgtggcgtttcatcgagccttcatggaagagtttcgcgactaacagatttcagctcctcttcttctatctctgtattgtaccacaacttaatgctgtacttcggagaaaacctagacctctccaaatgcatgattcctgtatgaaactgtttgagtttttctttttcttttgttgttgtgtctgttacggctattttagtccaacgcaactaattatatatatatatataggcaggtataacgggagcccaaggaagc

SEQ ID NO: 53229 - DNA, 1808 bp, Zea Mays
ccgcactgtcgggcagtgcaacagccaagagtgctgaacctaaaccgaactgactgcggcgtcctcttcttgttcccaaacctcaccgcctcaactgcttcgccttcgactgcgggcggcggcggcggcgtacaaagaaccaaaagatgactccttgcgctctcaccgtcgactccctaaacccaaaggtgctggctctcgcggatcacctcggcgacaacgccattgcccgccgcgcgcagtgcatccagaacgagatagaagcagaaccggagtcacaccctttccgcgagataatcgattgcagcctcagcaatccacagtccatgggacagcggccaaacaagttcttccgagaggttcttgccttgtgcgactatccccatcttctagaacagagtggaactaattccttgttcagcaagggcacgggagattctagacctctttcccgggagagcaacaggaggatatagccactctcagggcactgaaggattgcgcgacataatcgccgctggaatagccgctcgagataatttcccctgtaacgcggatgacattttcctgacagatggagcagctccgccggttcacatgatgatgcacctgctgatacgggataaaaaagacggcatcctctgcccagttccatcgcattccttgtacacgagtgctatgcttctccagggcgctactcttgtgccatatttccttgacgagtcaagaggctggggagtgagcatgtcagacctgaagaagcagctggatagtgcccggtcaatgggtgtttttgttagggggcttgtggttataaatccaggcaaccctactggacatgttctcgtggaggaaaatcagcgtgagattgtggatttctgcaggaatgaagatcttgttcttctagcagacgaggtttaccaggaaaatatttacgcagatgagaagggatttcactctttcaagaagatagcacggtccatggggtacggcgaaggagacatatctttagtgtccttccattcagtttctaatggatattatggtgaatgtgggagaaggggaggctacatggaagtcactggcttcaactctgatgtaaagaaacaagtgtacaaagttgtatccctaagctcgtgctccaacatctccggccagatcctcatgagcctagtcatgaacccgccacaggtcggagacgagtcgtacgcctcttaccaggccgaaagagacggcgtcctgtcatctttcgctcgctgcgcagaggccatggtgcgctcattcaacgggctggaaggggtgacctgtagcgaggctgaaggagcagtgttcgtgttcccttcagtccgtctgccaaagaaggcggtcgcagctgccgaggcaagcaacacgcagccagatgcgttctacgccctccgcctcctcgaaaccaccgggatcgtcgttgtgcctggctctgtttttggacagatgcatggaacgtggcatttcagatgcacggtcctgccacacgaagagaagaagacgatgacggtgatcatctccagctttgtggcgtttcatcgagccttcatggaagagtttcgcgactaacagatttcagctcctcttcttctatctctgtattgtaccacaacttaatgctgtacttcggagaaaacctagacctctccaaatgcatgattcctgtatgaaactgtttgagtttttctttttcttttgttgttgtgtctgttacggctattttagtccaacgcaactaattatatatatatatataggcaggtataacgggagcccaaggaagc

SEQ ID NO: 53230 - DNA, 1753 bp, Zea Mays
gcatctccatcgtgctgtggctgcattttttctacgcttcccaccaaccgcactgtcgggcagtgcaacagccaagagtgctgaacctaaaccgaactgactgcggcgtcctcttcttgttcccaaacctcaccgcctcaactgcttcgccttcgactgcgggcggcggcggcggcgtacaaagaaccaaaagatgactccttgcgctctcaccgtcgactccctaaacccaaaggtgctggctctcgcggatcacctcggcgacaacgccattgcccgccgcgcgcagtgcatccagaacgagatagaagcagaaccggagtcacaccctttccgcgagataatcgattgcagcctcagcaatccacagtccatgggacagcggccaaacaagttcttccgagaggttcttgccttgtgcgactatccccatcttctagaacagagtggaactaattccttgttcagctctggtgcgatagcaagggcacgggagattctagacctctttcccgggagagcaacaggaggatatagccactctcagggcactgaaggattgcgcgacataatcgccgctggaatagccgctcgagataatttcccctgtaacgcggatgacattttcctgacagatggagcagctccgccggttcacatgatgatgcacctgctgatacgggataaaaaagacggcatcctctgcccagttccatcgcattccttgtacacgagtgctatgcttctccagggcgctactcttgtgccatatttccttgacgagtcaagaggctggggagtgagcatgtcagacctgaagaagcagctggatagtgcccggtcaatgggtgtttttgttagggggcttgtggttataaatccaggcaaccctactggacatgttctcgtggaggaaaatcagcgtgagattgtggatttctgcaggaatgaagatcttgttcttctagcagacgaggtttaccaggaaaatatttacgcagatgagaagggatttcactctttcaagaagatagcacggtccatggggtacggcgaaggagacatatctttagtgtccttccattcagtttctaatggatattatggtgaatgtgggagaaggggaggctacatggaagtcactggcttcaactctgatgtaaagaaacaagtgtacaaagttgtatccctaagctcgtgctccaacatctccggccagatcctcatgagcctagtcatgaacccgccacaggtcggagacgagtcgtacgcctcttaccaggccgaaagagacggcgtcctgtcatctttcgctcgctgcgcagaggccatggtgcgctcattcaacgggctggaaggggtgacctgtagcgaggctgaaggagcagtgttcgtgttcccttcagtccgtctgccaaagaaggcggtcgcagctgccgaggcaagcaacacgcagccagatgcgttctacgccctccgcctcctcgaaaccaccgggatcgtcgttgtgcctggctctgtttttggacagatgcacggtcctgccacacgaagagaagaagacgatgacggtgatcatctccagctttgtggcgtttcatcgagccttcatggaagagtttcgcgactaacagatttcagctcctcttcttctatctctgtattgtaccacaacttaatgctgtacttcggagaaaacctagacctctccaaatgcatgattcctgcaggtataacgggagcccaaggaagc

SEQ ID NO: 53231 - DNA, 1806 bp, Zea Mays
catgcatctccatcgtgctgtggctgcattttttctacgcttcccaccaaccgcactgtcgggcagtgcaacagccaagagtgctgaacctaaaccgaactgactgcggcgtcctcttcttgttcccaaacctcaccgcctcaactgcttcgccttcgactgcgggcggcggcggcggcgtacaaagaaccaaaagatgactccttgcgctctcaccgtcgactccctaaacccaaaggtgctggctctcgcggatcacctcggcgacaacgccattgcccgccgcgcgcagtgcatccagaacgagatagaagcagaaccggagtcacaccctttccgcgaggttcttgccttgtgcgactatccccatcttctagaacagagtggaactaattccttgttcagctctggtgcgatagcaagggcacgggagattctagacctctttcccgggagagcaacaggaggatatagccactctcagggcactgaaggattgcgcgacataatcgccgctggaatagccgctcgagataatttcccctgtaacgcggatgacattttcctgacagatggagcagctccgccggttcacatgatgatgcacctgctgatacgggataaaaaagacggcatcctctgcccagttccatcgcattccttgtacacgagtgctatgcttctccagggcgctactcttgtgccatatttccttgacgagtcaagaggctggggagtgagcatgtcagacctgaagaagcagctggatagtgcccggtcaatgggtgtttttgttagggggcttgtggttataaatccaggcaaccctactggacatgttctcgtggaggaaaatcagcgtgagattgtggatttctgcaggaatgaagatcttgttcttctagcagacgaggtttaccaggaaaatatttacgcagatgagaagggatttcactctttcaagaagatagcacggtccatggggtacggcgaaggagacatatctttagtgtccttccattcagtttctaatggatattatggtgaatgtgggagaaggggaggctacatggaagtcactggcttcaactctgatgtaaagaaacaagtgtacaaagttgtatccctaagctcgtgctccaacatctccggccagatcctcatgagcctagtcatgaacccgccacaggtcggagacgagtcgtacgcctcttaccaggccgaaagagacggcgtcctgtcatctttcgctcgctgcgcagaggccatggtgcgctcattcaacgggctggaaggggtgacctgtagcgaggctgaaggagcagtgttcgtgttcccttcagtccgtctgccaaagaaggcggtcgcagctgccgaggcaagcaacacgcagccagatgcgttctacgccctccgcctcctcgaaaccaccgggatcgtcgttgtgcctggctctgtttttggacagatgcatggaacgtggcatttcagatgcacggtcctgccacacgaagagaagaagacgatgacggtgatcatctccagctttgtggcgtttcatcgagccttcatggaagagtttcgcgactaacagatttcagctcctcttcttctatctctgtattgtaccacaacttaatgctgtacttcggagaaaacctagacctctccaaatgcatgattcctgtatgaaactgtttgagtttttctttttcttttgttgttgtgtctgttacggctattttagtccaacgcaactaattatatatatatatataggcaggtataacgggagcccaaggaagc

SEQ ID NO: 53232 - DNA, 1152 bp, Zea Mays
agatattctatttcctatgcacaacatactctttataattgagtgtaattacatgaagttcttgctgaagacaaccaatatgatatagtgaaattctgcaaaaatgagggccttgttcttctagctgatgaggtatatcaagagaacatctatgtggacaacaagaaatttaactctttcaagaagattgtaagatccatggggtatggcgaggatgatctccctctagtatcgttacagtctgtttccaaaggatactatggagagtgtggtaaaagaggagggtacatggagattactggcttcagtgctccagtaagagagcagatctacaagatagcttcagtgaacctatgctccaatatcactggtcaaatccttgcgagcctcgtcatgaatccaccaaaggttggagacgaatcatatgcttcctacaaggcagagaaagatggaatccttgagtctttagctcgtcgtgcaaaggcgttggaggatgcattcaacaagcttgagggattttcatgtaacaaggccgaaggagcaatgtatcttttccctcagattcttctgccacagaaggcaatcgaggctgctaaagctgctaagaaagcgcctgacgctttctacgctctccgtctccttgaatcgactggaatcgtcgtggtccctggatctggatttggtcaagttcctggaacatggcacatcagatgcacgatcctgccgcaggaagacaagatccccgcggtgatcagccgcttcagggctttccatgaggcgttcttggccgaataccgcgactaaactgttacgctgtgtgtgagttaagttggaggttcagtagaactgtagaagagctcagtgacagcgcagaaagaggcagtgttagaaaggcttaggtccttcttcacaggagcaacagttgtcttgtctcatcaaggagaaataaaaattttagttttacaacttctcattgacactgttgggttcttgacatggtagagaattgtgtgcactgtgcctggcactgggtcctactagcggcgcaatttaagcgtgaccaggatggcgccatcagccatctctgtcgatattacactgctagctgaaaatgccacttggtccctttcaggtgtttgtggacctaaacct

SEQ ID NO: 53233 - DNA, 2037 bp, Zea Mays
aaaaccgcggctgtggtcggcggccccccggtctccttccactcgctttccggcgggcgactggcctaaaatcgcctcttgtttgtttgcttccgtcgtcccctctccacgtagagcacgcccccggaccaccttttataagcaccaaccatctggccttgccgcgccgattcgccacgaagccgcactgtgagagagggacgcggcctgttgtcccggcttttagacgcaacttccatcgctgcgaagctatccattcgtgttcgtcatggccgccagcgtcaccgtggaaaacctcaaccccaaggtcttaaaatgtgagtatgcagtccgtggggagattgtcatccatgctcagcgcctgcagcaacaactacaaacacaaccagggtctcttccttttgatgagatcctctattgcaacattgggaatccccaatctcttggtcagcaacctgtgacattcttcagggaggttcttgctctttgtgatcatccgtgcctcttggaaaaagaggaaaccaaatcattgttcagattcttgcaactattcctggaagggcaacaggtgcatatagtcacagtcagggtatcaaaggactgcgtgatgcaattgctgctggaatcatgtcacgtgatggattccctgcaaatgcagatgacattttcattacagacggagcaagtcctggggtccacatgatgatgcaattactgattaggaatgagaaagatggcattctgtgcccaattcctcagtaccctttgtactcagcctccatagctcttcatggtggagctcttgtcccctattaccttaatgaaaaaactgggtggggtttggagatctctgatcttaagatgcaactggaaaatgctcggtcaaaaggcattgatgttagggccttggtggttatcaatccaggaaatccgactgggcaggttcttgctgaagacaaccaatatgatatagtgaaattctgcaaaaatgagggccttgttcttctagctgatgaggtatatcaagagaacatctatgtggacaacaagaaatttaactctttcaagaagattgtaagatccatggggtatggcgaggatgatctccctctagtatcgttacagtctgtttccaaaggatactatggagagtgtggtaaaagaggagggtacatggagattactggcttcagtgctccagtaagagagcagatctacaagatagcttcagtgaacctatgctccaatatcactggtcaaatccttgcgagcctcgtcatgaatccaccaaaggttggagacgaatcatatgcttcctacaaggcagagaaagatggaatccttgagtctttagctcgtcgtgcaaaggcgttggaggatgcattcaacaagcttgagggattttcatgtaacaaggccgaaggagcaatgtatcttttccctcagattcttctgccacagaaggcaatcgaggctgctaaagctgctaagaaagcgcctgacgctttctacgctctccgtctccttgaatcgactggaatcgtcgtggtccctggatctggatttggtcaagttcctggaacatggcacatcagatgcacgatcctgccgcaggaagacaagatccccgcggtgatcagccgcttcagggctttccatgaggcgttcttggccgaataccgcgactaaactgttacgctgtgtgtgagttaagttggaggttcagtagaactgtagaagagctcagtgacagcgcagaaagaggcagtgttagaaaggcttaggtccttcttcacaggagcaacagttgtcttgtctcatcaaggagaaataaaaattttagttttacaacttctcattgacactgttgggttcttgacatggtagagaattgtgtgcactgtgcctggcactgggtcctactagcggcgcaatttaagcgtgaccaggatggcgccatcagccatctctgtcgatattacactgctagctgaaaatgccacttggtccctttcaggtgtttgtggacctaaacct

SEQ ID NO: 53234 - DNA, 2054 bp, Zea Mays
aaaaccgcggctgtggtcggcggccccccggtctccttccactcgctttccggcgggcgactggcctaaaatcgcctcttgtttgtttgcttccgtcgtcccctctccacgtagagcacgcccccggaccaccttttataagcaccaaccatctggccttgccgcgccgattcgccacgaagccgcactgtgagagagggacgcggcctgttgtcccggcttttagacgcaacttccatcgctgcgaagctatccattcgtgttcgtcatggccgccagcgtcaccgtggaaaacctcaaccccaaggtcttaaaatgtgagtatgcagtccgtggggagattgtcatccatgctcagcgcctgcagcaacaactacaaacacaaccagggtctcttccttttgatgagatcctctattgcaacattgggaatccccaatctcttggtcagcaacctgtgacattcttcagggaggttcttgctctttgtgatcatccgtgcctcttggaaaaagaggaaaccaaatcattgttcagtgctgatgcaatttctcgagcaaagcagattcttgcaactattcctggaagggcaacaggtgcatatagtcacagtcagggtatcaaaggactgcgtgatgcaattgctgctggaatcatgtcacgtgatggattccctgcaaatgcagatgacattttcattacagacggagcaagtcctggggtccacatgatgatgcaattactgattaggaatgagaaagatggcattctgtgcccaattcctcagtaccctttgtactcagcctccatagctcttcatggtcccctattaccttaatgaaaaaactgggtggggtttggagatctctgatcttaagatgcaactggaaaatgctcggtcaaaaggcattgatgttagggccttggtggttatcaatccaggaaatccgactgggcaggttcttgctgaagacaaccaatatgatatagtgaaattctgcaaaaatgagggccttgttcttctagctgatgaggtatatcaagagaacatctatgtggacaacaagaaatttaactctttcaagaagattgtaagatccatggggtatggcgaggatgatctccctctagtatcgttacagtctgtttccaaaggatactatggagagtgtggtaaaagaggagggtacatggagattactggcttcagtgctccagtaagagagcagatctacaagatagcttcagtgaacctatgctccaatatcactggtcaaatccttgcgagcctcgtcatgaatccaccaaaggttggagacgaatcatatgcttcctacaaggcagagaaagatggaatccttgagtctttagctcgtcgtgcaaaggcgttggaggatgcattcaacaagcttgagggattttcatgtaacaaggccgaaggagcaatgtatcttttccctcagattcttctgccacagaaggcaatcgaggctgctaaagctgctaagaaagcgcctgacgctttctacgctctccgtctccttgaatcgactggaatcgtcgtggtccctggatctggatttggtcaagttcctggaacatggcacatcagatgcacgatcctgccgcaggaagacaagatccccgcggtgatcagccgcttcagggctttccatgaggcgttcttggccgaataccgcgactaaactgttacgctgtgtgtgagttaagttggaggttcagtagaactgtagaagagctcagtgacagcgcagaaagaggcagtgttagaaaggcttaggtccttcttcacaggagcaacagttgtcttgtctcatcaaggagaaataaaaattttagttttacaacttctcattgacactgttgggttcttgacatggtagagaattgtgtgcactgtgcctggcactgggtcctactagcggcgcaatttaagcgtgaccaggatggcgccatcagccatctctgtcgatattacactgctagctgaaaatgccacttggtccctttcaggtgtttgtggacctaaacct

SEQ ID NO: 53235 - DNA, 1787 bp, Zea Mays
ctgattcatacatttatgaaagtttagaggtcttaaaatgtgagtatgcagtccgtggggagattgtcatccatgctcagcgcctgcagcaacaactacaaacacaaccagggtctcttccttttgatgagatcctctattgcaacattgggaatccccaatctcttggtcagcaacctgtgacattcttcagggaggttcttgctctttgtgatcatccgtgcctcttggaaaaagaggaaaccaaatcattgttcagtgctgatgcaatttctcgagcaaagcagattcttgcaactattcctggaagggcaacaggtgcatatagtcacagtcagggtatcaaaggactgcgtgatgcaattgctgctggaatcatgtcacgtgatggattccctgcaaatgcagatgacattttcattacagacggagcaagtcctggggtccacatgatgatgcaattactgattaggaatgagaaagatggcattctgtgcccaattcctcagtaccctttgtactcagcctccatagctcttcatggtggagctcttgtcccctattaccttaatgaaaaaactgggtggggtttggagatctctgatcttaagatgcaactggaaaatgctcggtcaaaaggcattgatgttagggccttggtggttatcaatccaggaaatccgactgggcaggttcttgctgaagacaaccaatatgatatagtgaaattctgcaaaaatgagggccttgttcttctagctgatgaggtatatcaagagaacatctatgtggacaacaagaaatttaactctttcaagaagattgtaagatccatggggtatggcgaggatgatctccctctagtatcgttacagtctgtttccaaaggatactatggagagtgtggtaaaagaggagggtacatggagattactggcttcagtgctccagtaagagagcagatctacaagatagcttcagtgaacctatgctccaatatcactggtcaaatccttgcgagcctcgtcatgaatccaccaaaggttggagacgaatcatatgcttcctacaaggcagagaaagatggaatccttgagtctttagctcgtcgtgcaaaggcgttggaggatgcattcaacaagcttgagggattttcatgtaacaaggccgaaggagcaatgtatcttttccctcagattcttctgccacagaaggcaatcgaggctgctaaagctgctaagaaagcgcctgacgctttctacgctctccgtctccttgaatcgactggaatcgtcgtggtccctggatctggatttggtcaagttcctggaacatggcacatcagatgcacgatcctgccgcaggaagacaagatccccgcggtgatcagccgcttcagggctttccatgaggcgttcttggccgaataccgcgactaaactgttacgctgtgtgtgagttaagttggaggttcagtagaactgtagaagagctcagtgacagcgcagaaagaggcagtgttagaaaggcttaggtccttcttcacaggagcaacagttgtcttgtctcatcaaggagaaataaaaattttagttttacaacttctcattgacactgttgggttcttgacatggtagagaattgtgtgcactgtgcctggcactgggtcctactagcggcgcaatttaagcgtgaccaggatggcgccatcagccatctctgtcgatattacactgctagctgaaaatgccacttggtccctttcaggtgtttgtggacctaaacct

SEQ ID NO: 53236 - DNA, 2286 bp, Zea Mays
catacctcatatttcagataacattcgagaacatctaaaaacattggaccacttttagcactcttgctcccctcagctccacttttgttagagaagtctttcagttcattctattagaagtccggctgatttacaaataaaatagggaaacatatgaatggatatagatatccaaaatgtaaaaatgaaatattatgaatggtcaccagttaccaggttacactctggaaagtaaagtttcattgtgtgacttagttgtggtcactccaagtattcacaaacaagtgcagccagtaacctatctgcaagcaatagaaatcctagaatgtaaaaccattccatgttatgagcagcttgcaaaacacatggctaaacaaaaatactggcatctttacaggtagaaggaatgactacaaatccaaatcttatgactgaagcacaagtaaataataacaagcatgaaagacccccccaacccccctcccaaaaaaacccaataagcagacataaaataatagtcaagtccagcaaggcacgcttggcactgatcataaatggtcaccagctagcaccacccatcagtcaatgaaatcagcatgcctgtttcttccttgaacatactgtatgatccaccagaacaatatgccaaaagagaatcgaccaatattgttgaccatgattgtcaggcgttccaccactactgctgccattctccaagaacacaataaagaacaagtgaccattttgtctagctcagtatggaaatcccgtattcatacttgtcattagcgttggaatgtacaagaccaaacctcactttggttgggaggtctctttctatggccatgttggtcttggtttgattccttcaccaactgcagttattctaagacttaagagtgtactgaccctgtcttggatgctgtgaagaaaataaggtctctgaagctttccagttagcagcacttcaaggtacttcaactttatacaaagacatgccttccaggtccacaaaaagtaaagcatgtagcaactggaatattttttgcatacgtctttcctatctatattctctagaatctatgcttacatgaattaagagtgttggcgatatacatttaaggaaactggatgtatgttggatgggtaatacatttaatatccagtcatcgataaacataagcaatctaatgatgtaaactaccctttatattctagagatgattagtagtaacacaaacaaggaagaaaataaaataaggagatatgtcatacagggcaaaacatacccattgcaaattcttgtttgcaccagtagggcgaaaattggttgcttaaagatataatttgaagaggaatgtcttcatgtcaccataaaaatcactgtgcctttcccaagtctgtggcagggatggggctcatgtcgaatacccattgtgaggagccaactgttataggacaactcgcttgctcacagatctcccagaacaagcaagttgaaggttcagttgggttcctagaaataaattgaatgagtgaaattccatttctcggagatgaagaaatctatcacagacccacacctgcttctcctgtagcttgagtaaatgacagatgtgttctaagatcatccaactcatgatggtactgtatataattagaaaacatattattaaggaactgcatttggcttgcgtgacaatgtaagtcaagctaaaatttatttcctgacacacacagtaggaatttagtagtcatgaacattcgatcaagttgattagtaaagaagcgaaccaagaaaacaatgtaagtcaagctaaaatttatttcctgaccaaaagtttttttataaccaaaggcagcaattctgcaagaaaaaatattgactccaaattattgttgttgtattatagtcaaccttttgggggctctatacatagtatccaaattttaatgaaaagaaaaaagttctttaccataaagtaaagaaaaaagttcaatttaatgccataactccaataaattgcaagaagtggtgtattttgctgtgaaagctctttacctgttctgtgctacttgtgaatgaatgcagttgttcatccttgtcctataagcatttctgcagcttgattacttcctcttccatgctccttgtttttgtctccgcaagctgctaatttttttctttgtcagcacaaaccccactaacaacctcgaaggtaccaattacatactaacctttctagtttgagattcccttacaaacaactgctcctaggaagcaag

SEQ ID NO: 53237 - DNA, 1673 bp, Zea Mays
cttccatacgccttttctgctgccgctgcatcttccactcgcgtcaagaaacgaaacccagctgcaccagcaacttctgccagcagacccaacgaccgaagctttttttttctttcttttcatcgccgccgctcggggttcaaggttcagcgcgtccccgaatggtacgtgactctcgctcgccgacggcctgatgggagtgatctcctctgcttttctcaactcttagattagaccctgctttgctctacttgagtttagctattggtttaagtggatcaatcgtgctggtcgttccttccatgagaatctgcttcagttcctcatgagcaagactagttggatgctgcgacgagatgtttggttgccttttgccgctagtccctcccttctcgtgattcctgaagctcaaccatgcatgtcattcaggctccgttatattatatatagataattgatcttattacttgctgggttatcctagagactgggttctagatactcgtgtgtatcatcagtttaagttgcacttcacttgttttctgatgaaaacagaggaacctctcatcattgtggttgtaagcacctgctctgacagaccacaacagaacggcgtaattttgttttcttcagagttgattaccaaatcgtggcaaagccaaagcccgtctgttcttgctctcgatgatttgggacgctgccatacatatgagtcggatcggaagcggcggcaccgtgatttcgtcgtccctgtaaaaaaagaaccattttttctcctctctctctgaaaactgaacgttgttggtgtggcgcagacgggcacgtacgaggcctccgaccgtcctcctcctcccaactccgccggctaccggaccgacaaagtccggcgaaagcggctgacggcgcagaagaggaaagagatcaaggaggcgttcgacctcttcgacatcgacggctccggcaccatcgatgcaagggagctgaacgtcgcgatgagagcccttggattcgagatgacaccggagcaaatcgggcagatgatcgcggaggtggacaaggacggcagcggcaccatcgacttcgacgagttcgtgcacatgatgacggacaagatgggcgagcgggacgcccgggacgagctccacaaggcgttccgcatcatcgaccaggacgccaacggaaagatctcggacatggacatccagcggctggccatcgagaccggcgagcacttcacgctggacgaggtccgggagatgatagaggccgccgacgaggacggcgacggcgagatcgacctggaggagttcatgaagatgatgaagcggacagactttggctctgggttctagtagtcacagacaagccaatcccaacatacattgatacataccatcggtgaaaaatacatatcacctagctactacgctacatatgactggagtattgggatttatttgagaaataatggcgtacacacaccacacatcattgtgcactaactactctagtacgtcctagctacgggttgtgtatttatttacacgtaatgaaacacatactactatttgtactgtcgtttttcagtaaaaaccagtaaaaatcgatatttttattggtggctattttggaatagccagtggaaaaatgcagttttcttaacaaaatgcaag

SEQ ID NO: 53238 - DNA, 1188 bp, Zea Mays
ccagaaaccattattcttccatacgccttttctgctgccgctgcatcttccactcgcgtcaagaaacgaaacccagctgcaccagcaacttctgccagcagacccaacgaccgaagctttttttttctttcttttcatcgccgccgctcggggttcaaggttcagcgcgtccccgaatgacgggcacgtacgaggcctccgaccgtcctcctcctcccaactccgccggctaccggaccgacaaagtccggcgaaagcggctgacggcgcagaagaggaaagagatcaaggaggcgttcgacctcttcgacatcgacggctccggcaccatcgatgcaagggagctgaacgtcgcgatgagagcccttggattcgagatgacaccggaggtacgtacgcgtgacgtgtgccaatggcgacgacaaccaaatcgggcagatgatcgcggaggtggacaaggacggcagcggcaccatcgacttcgacgagttcgtgcacatgatgacggacaagatgggcgagcgggacgcccgggacgagctccacaaggcgttccgcatcatcgaccaggacgccaacgtacgctacgcaaaccgactgcgaccaacgacgacgacggcagatagatagatagatacatcgaccgatgacgatgacatgctatatatatgctatcgatgatcgatgctgcagggaaagatctcggacatggacatccagcggctggccatcgagaccggcgagcacttcacgctggacgaggtccgggagatgatagaggccgccgacgaggacggcgacggcgagatcgacctggaggagttcatgaagatgatgaagcggacagactttggctctgggttctagtagtcacagacaagccaatcccaacatacattgatacataccatcggtgaaaaatacatatcacctagctactacgctacatatgactggagtattgggatttatttgagaaataatggcgtacacacaccacacatcattgtgcactaactactctagtacgtcctagctacgggttgtgtatttatttacacgtaatgaaacacatactactatttgtactgtcgtttttcagtaaaaaccagtaaaaatcgatatttttattggtggctattttggaatagccagtggaaaaatgcagttttcttaacaaaatgcaag

SEQ ID NO: 53239 - DNA, 1029 bp, Zea Mays
cttgacgagtagcgaaagtgccagaaaccattattcttccatacgccttttctgctgccgctgcatcttccactcgcgtcaagaaacgaaacccagctgcaccagcaacttctgccagcagacccaacgaccgaagctttttttttctttcttttcatcgccgccgctcggggttcaaggttcagcgcgtccccgaatgacgggcacgtacgaggcctccgaccgtcctcctcctcccaactccgccggctaccggaccgacaaagtccggcgaaagcggctgacggcgcagaagaggaaagagatcaaggaggcgttcgacctcttcgacatcgacggctccggcaccatcgatgcaagggagctgaacgtcgcgatgagcaaatcgggcagatgatcgcggaggtggacaaggacggcagcggcaccatcgacttcgacgagttcgtgcacatgatgacggacaagatgggcgagcgggacgcccgggacgagctccacaaggcgttccgcatcatcgaccaggacgccaacggaaagatctcggacatggacatccagcggctggccatcgagaccggcgagcacttcacgctggacgaggtccgggagatgatagaggccgccgacgaggacggcgacggcgagatcgacctggaggagttcatgaagatgatgaagcggacagactttggctctgggttctagtagtcacagacaagccaatcccaacatacattgatacataccatcggtgaaaaatacatatcacctagctactacgctacatatgactggagtattgggatttatttgagaaataatggcgtacacacaccacacatcattgtgcactaactactctagtacgtcctagctacgggttgtgtatttatttacacgtaatgaaacacatactactatttgtactgtcgtttttcagtaaaaaccagtaaaaatcgatatttttattggtggctattttggaatagccagtggaaaaatgcagttttcttaacaaaatgcaag

SEQ ID NO: 53240 - DNA, 1388 bp, Zea Mays
taaaatttgaatatgaatattagaatgaataagctgatggagatagcttatggctcagcacattaatagtcaattttttttcttccccaaaaaagctgttgcctcgttgaggaatattccacatcccctcgtttccggcaaaccgcaatgaagtctctgacccccaccgccgctggctccgccgcagatttttccgactctctgccctccccgatctcccctgcggcggtgccatgccattccagccccggccgccactactacctcgccgtcgaccgcacccagttcaaaatgaggacactcttggagctcctgggggttgtcgcggatcgccgtggtgggctgccgattgcaacatgtgtttcctcccgtgatgagcttgatgccgtctgtgctgccgtcgcaaacctcccctttgtgtcagcgtcacctctggtagttcacaaacacaatttcacctccttagttgtaacttcctctatgcattttcatttgttctattttctctgaaattttttggtggcttggaagcaatatgccttcatctagtatgttttctctgaaaatatatgacgtttatcaccaacataaatatttttatgaacccataaattgttgcacaaggtcctaacaggtatatgatccttactattatgatgttcttacttcacatcaacctccagatattactaatggtcttctatgtacagtatagtgatcaagctgaagcagagcgtgcatctattcttgagaactttcgtcaagaaacaactcagtggaataaaactgctaaagctaccaatattgccgaaagttctaagcttgaaagtactggctctaaaataagcattatagttgcaacagatgcttgcttgcctcaggcagcgatggcagaggcaccccttatggctcgagtgctgataaactatgagcttcccacaaagaagacggaattgtgattaacatggtcgttggttgtgaggtggttacactcaaggctttagaagagaacagtggtctgcttattgctgagatgccaatacatgtttcagaaatattatgaccgttccagttgtacaacatttcagaagttactgttctgattgcacactaactactcatggtttacttctactttaattttgaattgcttttcatgtttcagaatgttctcaaattatatctctaaagcattagaataatgctcattgcttcttttttcctctgtataagaaatgatagaatatagtcatggttcaacatccagcgacatgtttcttttactctgtgcatcgtatctatgttgatgcttacaagtccatgtatgaaggcaactaaaagtttaacatcaatccattattcttgcttatcactagtcaccataaata

SEQ ID NO: 53241 - DNA, 2053 bp, Zea Mays
taaaatttgaatatgaatattagaatgaataagctgatggagatagcttatggctcagcacattaatagtcaattttttttcttccccaaaaaagctgttgcctcgttgaggaatattccacatcccctcgtttccggcaaaccgcaatgaagtctctgacccccaccgccgctggctccgccgcagatttttccgactctctgccctccccgatctcccctgcggcggtgccatgccattccagccccggccgccactactacctcgccgtcgaccgcacccagttcaaaatgaggacactcttggagctcctgggggttgtcgcggatcgccgtggtgggctgccgattgcaacatgtgtttcctcccgtgatgagcttgatgccgtctgtgctgccgtcgcaaacctcccctttgtgtcagcgtcacctctggtagttcacaaacacaatttcacctccttagttgtaacttcctctatgcattttcatttgttctattttctctgaaattttttggtggcttggaagcaatatgccttcatctagtatgttttctctgaaaatatatgacgtttatcaccaacataaatatttttatgaacccataaattgttgcacaaggtcctaacaggtatatgatccttactattatgatgttcttacttcacatcaacctccagatattactaatggtcttctatgtacagtatagtgatcaagctgaagcagagcgtgcatctattcttgagaactttcgtcaagaaacaactcagtggaataaaactgctaaagctaccaatattgccgaaagttctaagcttgaaagtactggctctaaaataagcattatagttgcaacagatgcttgcttgcctcaggcagcgatggcagaggcaccccttatggctcgagtgctgataaactatgagcttcccacaaagaaggtgagctttaactatatttctgtgcatatttgttgcttttagtccattttatgcaaaaagcatgaatctgtgtatgctctctttcttatttgctactccctgtgtcccaaattataaggcattttggctattgtatagatatttttactatgtatcttgacatagtgtatatttaagtgtgtagcaaaagcgttaaaacaatgtatctagaaaaaccaaaacatcttatgctccgtttggatgttgatattgaatatgatggaattgaattgagttgaataccaaatcatgcatggtactgaaatgagatgcaattccaattctattgtttggatgtcactgaattgtacgttctaattccacgcaataccgaggggtgaggctttgtattgggagaggatgttctagttatagtctaattctagggaattaggcctctgattccaaatctcaattccacgagcaaccaaacaacagaatttagaaaaactgattctaattcccaattctgtgctccaatatctatatccaaccggggtgttagtattatgtagtttcactggctcttctagttgtgcttttatgatatcttttgtgacctgaagattaaatttgagtttttcaggaagcgtacttaagacgcatgtcaacatgtttggcggcagacggaattgtgattaacatggtcgttggttgtgaggtggttacactcaaggctttagaagagaacagtggtctgcttattgctgagatgccaatacatgtttcagaaatattatgaccgttccagttgtacaacatttcagaagttactgttctgattgcacactaactactcatggtttacttctactttaattttgaattgcttttcatgtttcagaatgttctcaaattatatctctaaagcattagaataatgctcattgcttcttttttcctctgtataagaaatgatagaatatagtcatggttcaacatccagcgacatgtttcttttactctgtgcatcgtatctatgttgatgcttacaagtccatgtatgaaggcaactaaaagtttaacatcaatccattattcttgcttatcactagtcaccataaata

SEQ ID NO: 53242 - DNA, 1773 bp, Zea Mays
taaaatttgaatatgaatattagaatgaataagctgatggagatagcttatggctcagcacattaatagtcaattttttttcttccccaaaaaagctgttgcctcgttgaggaatattccacatcccctcgtttccggcaaaccgcaatgaagtctctgacccccaccgccgctggctccgccgcagatttttccgactctctgccctccccgatctcccctgcggcggtgccatgccattccagccccggccgccactactacctcgccgtcgaccgcacccagttcaaaatgaggacactcttggagctcctgggggttgtcgcggatcgccgtggtgggctgccgattgcaacatgtgtttcctcccgtgatgagcttgatgccgtctgtgctgccgtcgcaaacctcccctttgtgtcagcgtcacctctgtgatcaagctgaagcagagcgtgcatctattcttgagaactttcgtcaagaaacaactcagtggaataaaactgctaaagctaccaatattgccgaaagttctaagcttgaaagtactggctctaaaataagcattatagttgcaacagatgcttgcttgcctcaggcagcgatggcagaggcaccccttatggctcgagtgctgataaactatgagcttcccacaaagaaggtgagctttaactatatttctgtgcatatttgttgcttttagtccattttatgcaaaaagcatgaatctgtgtatgctctctttcttatttgctactccctgtgtcccaaattataaggcattttggctattgtatagatatttttactatgtatcttgacatagtgtatatttaagtgtgtagcaaaagcgttaaaacaatgtatctagaaaaaccaaaacatcttatgctccgtttggatgttgatattgaatatgatggaattgaattgagttgaataccaaatcatgcatggtactgaaatgagatgcaattccaattctattgtttggatgtcactgaattgtacgttctaattccacgcaataccgaggggtgaggctttgtattgggagaggatgttctagttatagtctaattctagggaattaggcctctgattccaaatctcaattccacgagcaaccaaacaacagaatttagaaaaactgattctaattcccaattctgtgctccaatatctatatccaaccggggtgttagtattatgtagtttcactggctcttctagttgtgcttttatgatatcttttgtgacctgaagattaaatttgagtttttcaggaagcgtacttaagacgcatgtcaacatgtttggcggcagacggaattgtgattaacatggtcgttggttgtgaggtggttacactcaaggctttagaagagaacagtggtctgcttattgctgagatgccaatacatgtttcagaaatattatgaccgttccagttgtacaacatttcagaagttactgttctgattgcacactaactactcatggtttacttctactttaattttgaattgcttttcatgtttcagaatgttctcaaattatatctctaaagcattagaataatgctcattgcttcttttttcctctgtataagaaatgatagaatatagtcatggttcaacatccagcgacatgtttcttttactctgtgcatcgtatctatgttgatgcttacaagtccatgtatgaaggcaactaaaagtttaacatcaatccattattcttgcttatcactagtcaccataaata

SEQ ID NO: 53243 - DNA, 1778 bp, Zea Mays
taaaatttgaatatgaatattagaatgaataagctgatggagatagcttatggctcagcacattaatagtcaattttttttcttccccaaaaaagctgttgcctcgttgaggaatattccacatcccctcgtttccggcaaaccgcaatgaagtctctgacccccaccgccgctggctccgccgcagatttttccgactctctgccctccccgatctcccctgcggcggtgccatgccattccagccccggccgccactactacctcgccgtcgaccgcacccagttcaaaatgaggacactcttggagctcctgggggttgtcgcggatcgccgtggtgggctgccgattgcaacatgtgtttcctcccgtgatgagcttgatgccgtctgtgctgccgtcgcaaacctcccctttgtgtcagcgtcacctctgtatagtgatcaagctgaagcagagcgtgcatctattcttgagaactttcgtcaagaaacaactcagtggaataaaactgctaaagctaccaatattgccgaaagttctaagcttgaaagtactggctctaaaataagcattatagttgcaacagatgcttgcttgcctcaggcagcgatggcagaggcaccccttatggctcgagtgctgataaactatgagcttcccacaaagaaggtgagctttaactatatttctgtgcatatttgttgcttttagtccattttatgcaaaaagcatgaatctgtgtatgctctctttcttatttgctactccctgtgtcccaaattataaggcattttggctattgtatagatatttttactatgtatcttgacatagtgtatatttaagtgtgtagcaaaagcgttaaaacaatgtatctagaaaaaccaaaacatcttatgctccgtttggatgttgatattgaatatgatggaattgaattgagttgaataccaaatcatgcatggtactgaaatgagatgcaattccaattctattgtttggatgtcactgaattgtacgttctaattccacgcaataccgaggggtgaggctttgtattgggagaggatgttctagttatagtctaattctagggaattaggcctctgattccaaatctcaattccacgagcaaccaaacaacagaatttagaaaaactgattctaattcccaattctgtgctccaatatctatatccaaccggggtgttagtattatgtagtttcactggctcttctagttgtgcttttatgatatcttttgtgacctgaagattaaatttgagtttttcaggaagcgtacttaagacgcatgtcaacatgtttggcggcagacggaattgtgattaacatggtcgttggttgtgaggtggttacactcaaggctttagaagagaacagtggtctgcttattgctgagatgccaatacatgtttcagaaatattatgaccgttccagttgtacaacatttcagaagttactgttctgattgcacactaactactcatggtttacttctactttaattttgaattgcttttcatgtttcagaatgttctcaaattatatctctaaagcattagaataatgctcattgcttcttttttcctctgtataagaaatgatagaatatagtcatggttcaacatccagcgacatgtttcttttactctgtgcatcgtatctatgttgatgcttacaagtccatgtatgaaggcaactaaaagtttaacatcaatccattattcttgcttatcactagtcaccataaata

SEQ ID NO: 53244 - DNA, 666 bp, Zea Mays
ctcggatctagtccgataaagccacttaccaggatcgaataccactagctcactcgaaggtgaggcacagagaaatacaataaagcataataccataaattaagaaagtatcattagtgattacattatcggagtttcagaaataataacaataagttttaatgcagcggaaataactaacggagaaaaccgagtacatggcgaagcctggccacactactcctcctggtcctctcctgcggaagcagtaacccactcgaccatctatcccggtggcagggataaaggccaagtcacaccatcaaccaatcatcctaaggagtacctgcaaaaattatgccacaagcaaggctgagtatactaatactcagctagacttacccggtgtgaggagtctactcctctacctctagacatgcagctgtttggctgaggggtttggtttgccaaaagcactcgctgagtctaaaatcaagttttagcttttcaagttttagtatgaccctttttaaactagatgagtacctagctactcatacatgatatcaaacatttttaagcaatcaacatcttatatcaactcatcatcttttcacttgttactcaatgcagtacaatggatcaagcagtctcattagctgcgagaagcagacgattcgaatcgag

SEQ ID NO: 53245 - DNA, 2657 bp, Zea Mays
gcaggtactccttaggatgattggttgatggtgtgacttggcctttatccctgccaccgggatagatggtcgagtgggttactgcttccgcaggagaggaccaggaggagtagtgtggccaggcttcgccatgtactcggttttctccgttagttatttccgctgcattaaaacttattgttattatttctgaaactccgataatgtaatcactaatgatactttcttaatttatggtattatgctttattgtatttctctgtgcctcaccttcgagtgagctagtggtattcgatcctggtaagtggctttatcggactagatccgagggactgacgggttattcctgtttaagtgtgttgctgcccttaagggtgcgacttgggcacttaagctggaataattcgggcggttccgccacagctggtatcggagcgaataccagtacagagaagtcagtaagtcatgattaccaaccttttcaaaagtaaaacttgcttagaaaccaagttggatagaagtcaggacgataaggatagacctaagacgtgaagccttaggaaatagatgggtagctaggtggctatttatataggccataaaggctactactactattaataaggatgctgtagaagcacccgaaaaattagttaggtctgagaagacgactagaatgagcatgcatcatgattgtcgcattttcattgtctcttgtgcaccaacatgcttctctcacctttattccaataataagaacttgtgaataatgtaatgtactgctatgttagaaatgccttagctcgtgttagattggtaagtcttgttaggtcgtgctatgtgtttatcttgtcttgctatctaggtggtattgtaactgttcaaccttttttacaaaaaaatgttgtctgttctgttcataaaaagacctccttctccaaacaacctagtggtttagcaagtgaaaaccctaaaaaaaaatcaaatcacctgcttgtgttggtgttttctagcccttgtgtgttgcgctattggtaatgcacctgcacagcttatacaccccccacagcttgaccgctagaccaaaccccaagtctccttgtgcacttgttgtgtcaaaaaaaattgttgttggatctagttgcgcaaaccatatgccagccatgtttctttctgtaaatccttaatccaaaacttcatagcatttctgttgatcatcttagctgatcctatttgcctacctctcctttcgcttgaatctggtaatcattttccttgtgattcatgttgtggccttatcacccaaatctccggatcctttaatgattctgccctattgtctggttatctcctataacctgttctcaagtatcggatgttgatctcgcctaaacctcccatttctgatcattctcatacccccttctctgaggattatgacgctgttttatcgattttatctctaagcagtggatccatttggttcaatggattatgctgttgactttagttctctcatgtctctaaaagctcatcaatcttgatctcatggttggttcctcctcatattgaaaatcgtatcaatctttggctgataatccccgtgatgatcatgaaatagttctctgagttgaagaaaattctcatgtgatgctctcttgccaacaatctttgcctcaacttcagtcacattttctgagccatattctcatgggctccatctaatttaagccacataattttttcattggttatgtttggtaatggtgtcatgactaacgactgatagtgccgcgacgaaaccgagagcctcctgtgggcgcgcacacatggttgagctgctcggtacgcgctggtatcgcggttaatagttgtgatccattataagactacaccgatgtgctatcttttgtggacactctcagaatgatcgctgaattttgtctcgatatgtcgcgatattctaatcaaatctgtcttcagtatcttgtcagataccctctcatgaatttacatctatcttcagtctgggagttacatgcttctccacccttaaatatcatcattcgaatctcgggacgagattctttttaaggggggaaggctgtgacaccccaggtgtctatttcgtgttatgtcaggagatcaatcctaatctcggatgctcagtaaaaatttctatttctcgatcgtgcctatctctgtttatcaggctttctcttggaagttcaccgaattcagagttaatcgatcgcgagaaacaaccaattttggagcgtgttaaaacttttattctcggaacgaatgcaaactcgacggtcaatcttgatttataaatctcatctgaagctctctaaatcaaactctcgacggctgatatttggtctgagcccgagttaattcctcgaacgttgatcgatgttcgactattttaatctgaatccgtactctcaaaagaaatactcagtatgtcgtcctctgataaaatcttactcgattcagcttagtatctttgtatccaatccgatttcaaaatcaacatcggcaacgatttttaaaatatcacgattcgctttctccgactaaaattcaaagccgatcagaaatctgagagaaacatttatttctaaaatagtgcgcgaggaattatttctgag

SEQ ID NO: 53246 - DNA, 2425 bp, Zea Mays
ctcatctgaagctctctaaatcaaactctcgacggctgatatttggtctgagcccgagttaattcctcgaacgttgatcgatgttcgactattttaatctgaatccgtactctcaaaagaaatactcagtatgtcgtcctctgataaaatcttactcgattcagcttagtatctttgtatccaatccgatttcaaaatcaacatcggcaacgatttttaaaatatcacgattcgctttctccgactaaaattcaaagccgatcagaaatctgagagaaacatttatttctaaaatagtgcgcgaggaattatttctgagcgaaatcaaatccaactctcggtcgaattaatcgctcaattgtccattcgccgaaactctaattcgctctgttctctgtagaaacaaattccgcgggagcatttttattcggaaaaataatttagcgcagcccggtaacgtgttttggcccagcctggcccagcccactaagaaaaccctaaccctagtgcccctctataaatagcagccctctcctagcaagtggaggcatttttgcactcccacccctcaattttcctagccgccacaaccattcttcctccctgtcttctcttcacggcagcaagcctcccccatggcgccctcctccctggcgctcgctccctgcagggagcagtttcccttggccgacgccccagccatggcgcctttcttcctcgcgcagcgcctcggctctccctcccccaagctccagcgttcatggaacagcaggtcactggcgcccctgttttccctgcgacttccatggtcgcgagtttcccctggtcgccatctctccagcgcgtcccctgcaagcgagcagcgatttccatctccctgcaacctccaaggctgagcccctcctccctctgttcggcgcccttgctgctggacgcgcagagccccatggcgccctgatttctagctccctcccatggacgcccagaaaaatcccccagccgagcccccaagcaggcgcccagaaattccagcagcctctccatggccgagctccctgttccctctgctctagccggccatctcccgcagcacacgccgagctccccttcgatctggttcagcgcaggcagcagcagcttctatggatggcgtccagaatttttttttccagcacctccctgttcatcttcctcccagccggctttcctcccctgctgttgctcgccccttcctcctttccctggtgctgcagcaaggagcccctgctcgggctgtagccgtggcgtccaagtctctgcgcagcaatgccggtccaaaaactgcagccccgtcacttccctggcttcatcgctgctttgtgctgagcagtgaacagcacgccgtcgacgctcgccgggtgtttgctgtttttgcgcagccccatccgcgacgtctttcacccccggtgagacaacgacgctccttgtttgattccacatcggcgttattttcatatgattaattgtgtatgtgtgctgttttatttttgttttgtggaggagaggcaccccgtgttttgcgaggagaaggcaagccgctcgacgctcgtcgatgttcgtaacgatgcacaaatcggaatcaccatcgtcctcacaaacaccgattgggtttgtttatggtgagccgatgcatgtcgctctcgctcgactcgtttaattaatttgaatggatgtgtgtaaaatgtttcggttatgcgcattggtaggatcgcgtttgcgattgaagaacaaaaggttatgtgatgtatgcgatttgtagttgtctaattatgttttggtcgatgtggtgcatgtttaaaaaattgtattggtatggattgaatttttttggcgaaagaaaaagaagtagaaaagaactcggatgtttttacgttacgatagaaagatgtgcgatgtgttgtttgatgtgaaggataggttttactagtttaaacggttagccgtcagactcgatcagtaaagataaaattgattatgcgattaagatgaggtgacgacatgccgtagtagtcgtcgccttctctatgttttcgagtcgaataaataccataggcaattaattattgatacccaaagattgttagaaacatgtaatcgtgctctacctattgcgtcaaaggaaatatggtgtgttgattaattaggagctaagggacctaatatagaaaagtagttaagaaaactaatcgaattgcttttagctatattttaagttaagatgtctaaaatggtgaaactagttttgttggtctcatggtgttatgattgagaaaaatatgaacttgtgtatgaattactatttttttttcatgttgtgttaagccaactcttgttaaatagaggaattcaattgcgttaagtaattgttatatgtaggtgtttccag

SEQ ID NO: 53247 - DNA, 2561 bp, Zea Mays
caataacacgctgctccgtctccatctccatctccaattacctatcctctccgtcgaatcagaaaccctaacctcaccgtaccacggcctacgagccggaatgaccacatcagccgccgacgatggcagctctttggcgcctaccatcaccgagggagaaaccacagccgacgccggtgctggggcaggtgttgagtgcgtcgagggcaaagagatgaaggttggggccgcggctccagttgaggagccggataaggaggcggcgcgggaggaggatcctggtgatgatgatgactatgaggaggaggaggaggaggaggaggaggaggaggaggaggaggaggaggaggaggaggaggtggaggaggagacggaaactgcgaatgggaaagaggctgagttgatggagccattggcggcgctgaagcctggggaggaggtcaaacctgaaaagctagagggggagaaggaagagctggatgaggagcccgaggcatcggaagaggaccccgaggaggtggaagagttgaaggaggagggcgacggtattgcggaggaaggcttggtggatgggtcggaggcgaacgatgataaagatgctgatcaattgagcagtgggagtgatagtggtggaagcagaagtcgtggtatgcagaactctgaacttgctggaggtcttgaaatatttgttgatgacttgcctcaagattgtgtcaaggaagacattgctatggccttttctcaatcaggggaggtcaaatctgttaggataattaaaaattcatcaactggaaagaaccaagacattgcatttgtttgttacacaagtattgaagctgcaaagaaggtaaaaggaaaaatggtcagggtatctgcttgtcaagataataataccctttacctggggaacatttgcaagggttggaccagagatcaggtgttgaacaccctaaaaagtattggaattcaagagtgtgagataagctttcccagttacaagggaggaagccgagggtttgcttttcttaagttcacctcacattactatgctagagcagcacttcgtcgcttaatgaaatccgatgctatttttggtactgatagaagcgctaaagtatccttttatcgaacccccacaaaatcatccaagagacttatacaggcaaaaatagtatacctggaacatgtccctctttcttgggatgaaaataaagttaaggaatactgtgaagaatatggggagatcctgaaagctgatgttttccagatatcaaagaatatggaaaatgaaacaatttcttttgttgaattctcatccaggaagggtgcgttagcttgtgtgacaggaataaacaaagcaaatattgttgatggaagcttcaagttgtgtgcatatcttgcttggccaaaaagtgcttcaaaggtcaatagtgctgcaccttcaaatgctgccaccgcaaccgagaaggacaaaacccacacagagaagattcttgtagacatcgatttgcaacataaattccagaaaggcgacaagagcaaacttacatctcagacaaaggaggcaattatgaagaagaaaaaatcaagtaaattaccaaatgacaatgatacaaaactaacctcacaaggtgctgccgaagtaccacaaacctccaaatcttctgaaggcaagaggaaagttggaaaaaacaaacatgcctctgtataccaaaaaccattgaagaaagcaataaataatcgtaacgttgatgagagccagctaactcatcggagtgctgcagtactgcaaacgtctaacacttccaaagggaaaaggaaagccagtgagaacagaagtttatatttaaacgaaaaggctctcaagaaagcacgtggcaatagtaatttgggtggaagttcaagatctaaatcatatgcctctgatctggaacctcatgctggattcatttcgcctgcgattcgagataatggcagtgatgcatataatcgacagagaactgcacggtatgatatccatcctatagatgtccatccttatgctagagcgccaccatcagcctactctggttacaaaagccatgctggctatgaggctgcaaatacatatgaatacgcagggaaccgggcgcctacacctccaagtggatcttacatccctcgaagaggacattactaacaaaaaatggagtgctggctctgtgcatccattcgatcgcatggtaacaaggaatcaaggatctccgtatttagatgtttcatacatgttatgtagacgttaaaaagtaacttgtttaaggaaaataagaaccctctgcagctttccctttgactgaagtgcagcccggcacaccggttgcttgttgaagaatgctttttttattattattgtagttaagagtccagacgtcgttattaccacttatcttcgtattggaaaaaaaatgtctttttcttagtccagcaatccactaatagcttctatgtttttttgtgctcagcaatatcttatttgcttttttaagacaaacatgccgtgcgtctcaacaggagaaaaaaat

SEQ ID NO: 53248 - DNA, 2154 bp, Zea Mays
caataacacgctgctccgtctccatctccatctccaattacctatcctctccgtcgaatcagaaaccctaacctcaccgtaccacggcctacgagccggaatgaccacatcagccgccgacgatggcagctctttggcgcctaccatcaccgagggagaaaccacagccgacgccggtgctggggcaggtgttgagtgcgtcgagggcaaagagatgaaggttggggccgcggctccagttgaggagccggataaggaggcggcgcgggaggaggatcctggtgatgatgatgactatgaggaggaggaggaggaggaggaggaggaggaggaggaggaggaggaggaggaggaggagaaggaagagctggatgaggagcccgaggcatcggaagaggaccccgaggaggtggaagagttgaaggaggagggcgacggtattgcggaggaaggcttggtggatgggtcggaggcgaacgatgataaagatgctgatcaattgagcagtgggagtgatagtggtggaagcagaagtcgtggtatgcagaactctgaacttgctggaggtcttgaaatatttgttgatgacttgcctcaagattgtgtcaaggaagacattgctatggccttttctcaatcaggggaggtcaaatctgttaggataattaaaaattcatcaactggaaagaaccaagacattgcatttgtttgttacacaagtattgaagctgcaaagaaggttcttgctgaatttaaggagggaattgaggtaaaaggaaaaatggtcagggtatctgcttgtcaagataataataccctttacctggggaacatttgcaagggttggaccagagatcaggcaaaaatagtatacctggaacatgtccctctttcttgggatgaaaataaagttaaggaatactgtgaagaatatggggagatcctgaaagctgatgttttccagatatcaaagaatatggaaaatgaaacaatttcttttgttgaattctcatccaggaagggtgcgttagcttgtgtgacaggaataaacaaagcaaatattgttgatggaagcttcaagttgtgtgcatatcttgcttggccaaaaagtgcttcaaaggtcaatagtgctgcaccttcaaatgctgccaccgcaaccgagaaggacaaaacccacacagagaagattcttgtagacatcgatttgcaacataaattccagaaaggcgacaagagcaaacttacatctcagacaaaggaggcaattatgaagaagaaaaaatcaagtaaattaccaaatgacaatgatacaaaactaacctcacaaggtgctgccgaagtaccacaaacctccaaatcttctgaaggcaagaggaaagttggaaaaaacaaacatgcctctgtataccaaaaaccattgaagaaagcaataaataatcgtaacgttgatgagagccagctaactcatcggagtgctgcagtactgcaaacgtctaacacttccaaagggaaaaggaaagccagtaatttgggtggaagttcaagatctaaatcatatgcctctgatctggaacctcatgctggattcatttcgcctgcgattcgagataatggcagtgatgcatataatcgacagagaactgcacggtatgatatccatcctatagatgtccatccttatgctagaggctgcaaatacatatgaatacgcagggaaccgggcgcctacacctccaagtggatcttacatccctcgaagaggacattactaacaaaaaatggagtgctggctctgtgcatccattcgatcgcatggtaacaaggaatcaaggatctccgtatttagatgtttcatacatgttatgtagacgttaaaaagtaacttgtttaaggaaaataagaaccctctgcagctttccctttgactgaagtgcagcccggcacaccggttgcttgttgaagaatgctttttttattattattgtagttaagagtccagacgtcgttattaccacttatcttcgtattggaaaaaaaatgtctttttcttagtccagcaatccactaatagcttctatgtttttttgtgctcagcaatatcttatttgcttttttaagacaaacatgccgtgcgtctcaacaggagaaaaaaat

SEQ ID NO: 53249 - DNA, 2368 bp, Zea Mays
gcgcaataacacgctgctccgtctccatctccatctccaattacctatcctctccgtcgaatcagaaaccctaacctcaccgtaccacggcctacgagccggaatgaccacatcagccgccgacgatggcagctctttggcgcctaccatcaccgagggagaaaccacagccgacgccggtgctggggcaggtgttgagtgcgtcgagggcaaagagatgaaggttggggccgcggctccagttgaggagccggataaggaggcggcgcgggaggaggatcctggtgatgatgatgactatgaggaggaggaggaggaggaggaggaggaggaggaggaggaggaggaggaggaggaggaggtggaggaggagacggaaactgcgaatgggaaagaggctgagttgatggagccattggcggcgctgaagcctggggaggaggtcaaacctgaaaagctagagggggagaaggaagagctggatgaggagcccgaggcatcggaagaggaccccgaggaggtggaagagttgaaggaggagggcgacggtattgcggaggaaggcttggtggatgggtcggaggcgaacgatgataaagatgctgatcaattgagcagtgggagtgatagtggtggaagcagaagtcgtggtatgcagaactctgaacttgctggaggtcttgaaatatttgttgatgacttgcctcaagattgtgtcaaggaagacattgctatggccttttctcaatcaggggaggtcaaatctgttaggataattaaaaattcatcaactggaaagaaccaagacattgcatttgtttgttacacaagtattgaagctgcaaagaaggttcttgctgaatttaaggagggaattgaggtaaaaggaaaaatggtcagggtatctgcttgtcaagataataataccctttacctggggaacatttgcaagggttggaccagagatcaggtgttgaacaccctaaaaagtattggaattcaagagtgtgagataagctttcccagttacaagggaggaagccgagggtttgcttttcttaagttcacctcacattactatgctagagcagcacttcgtcgcttaatgaaatccgatgctatttttggaagggtgcgttagcttgtgtgacaggaataaacaaagcaaatattgttgatggaagcttcaagttgtgtgcatatcttgcttggccaaaaagtgcttcaaaggtcaatagtgctgcaccttcaaatgctgccaccgcaaccgagaaggacaaaacccacacagagaagattcttgtagacatcgatttgcaacataaattccagaaaggcgacaagagcaaacttacatctcagacaaaggaggcaattatgaagaagaaaaaatcaagtaaattaccaaatgacaatgatacaaaactaacctcacaaggtgctgccgaagtaccacaaacctccaaatcttctgaaggcaagaggaaagttggaaaaaacaaacatgcctctgtataccaaaaaccattgaagaaagcaataaataatcgtaacgttgatgagagccagctaactcatcggagtgctgcagtactgcaaacgtctaacacttccaaagggaaaaggaaagccagtgagaacagaagtttatatttaaacgaaaaggctctcaagaaagcacgtggcaatagtaatttgggtggaagttcaagatctaaatcatatgcctctgatctggaacctcatgctggattcatttcgcctgcgattcgagataatggcagtgatgcatataatcgacagagaactgcacggtatgatatccatcctatagatgtccatccttatgctagagcgccaccatcagcctactctggttacaaaagccatgctggctatgaggctgcaaatacatatgaatacgcagggaaccgggcgcctacacctccaagtggatcttacatccctcgaagaggacattactaacaaaaaatggagtgctggctctgtgcatccattcgatcgcatggtaacaaggaatcaaggatctccgtatttagatgtttcatacatgttatgtagacgttaaaaagtaacttgtttaaggaaaataagaaccctctgcagctttccctttgactgaagtgcagcccggcacaccggttgcttgttgaagaatgctttttttattattattgtagttaagagtccagacgtcgttattaccacttatcttcgtattggaaaaaaaatgtctttttcttagtccagcaatccactaatagcttctatgtttttttgtgctcagcaatatcttatttgcttttttaagacaaacatgccgtgcgtctcaacaggagaaaaaaat

SEQ ID NO: 53250 - DNA, 2602 bp, Zea Mays
cgagaaggcgcaataacacgctgctccgtctccatctccatctccaattacctatcctctccgtcgaatcagaaaccctaacctcaccgtaccacggcctacgagccggaatgaccacatcagccgccgacgatggcagctctttggcgcctaccatcaccgagggagaaaccacagccgacgccggtgctggggcaggtgttgagtgcgtcgagggcaaagagatgaaggttggggccgcggctccagttgaggagccggataaggaggcggcgcgggaggaggatcctggtgatgatgatgactatgaggaggaggaggaggaggaggaggaggaggaggaggaggaggaggaggaggaggaggaggtggaggaggagacggaaactgcgaatgggaaagaggctgagttgatggagccattggcggcgctgaagcctggggaggaggtcaaacctgaaaagctagagggggagaaggaagagctggatgaggagcccgaggcatcggaagaggaccccgaggaggtggaagagttgaaggaggagggcgacggtattgcggaggaaggcttggtggatgggtcggaggcgaacgatgataaagatgctgatcaattgagcagtgggagtgatagtggtggaagcagaagtcgtggtatgcagaactctgaacttgctggaggtcttgaaatatttgttgatgacttgcctcaagattgtgtcaaggaagacattgctatggccttttctcaatcaggggaggtcaaatctgttaggataattaaaaattcatcaactggaaagaaccaagacattgcatttgtttgttacacaagtattgaagctgcaaagaaggttcttgctgaatttaaggagggaattgaggtaaaaggaaaaatggtcagggtatctgcttgtcaagataataataccctttacctggggaacatttgcaagggttggaccagagatcagggtgttgaacaccctaaaaagtattggaattcaagagtgtgagataagctttcccagttacaagggaggaagccgagggtttgcttttcttaagttcacctcacattactatgctagagcagcacttcgtcgcttaatgaaatccgatgctatttttggtactgatagaagcgctaaagtatccttttatcgaacccccacaaaatcatccaagagacttatacaggcaaaaatagtatacctggaacatgtccctctttcttgggatgaaaataaagttaaggaatactgtgaagaatatggggagatcctgaaagctgatgttttccagatatcaaagaatatggaaaatgaaacaatttcttttgttgaattctcatccaggaagggtgcgttagcttgtgtgacaggaataaacaaagcaaatattgttgatggaagcttcaagttgtgtgcatatcttgcttggccaaaaagtgcttcaaaggtcaatagtgctgcaccttcaaatgctgccaccgcaaccgagaaggacaaaacccacacagagaagattcttgtagacatcgatttgcaacataaattccagaaaggcgacaagagcaaacttacatctcagacaaaggaggcaattatgaagaagaaaaaatcaagtaaattaccaaatgacaatgatacaaaactaacctcacaaggtgctgccgaagtaccacaaacctccaaatcttctgaaggcaagaggaaagttggaaaaaacaaacatgcctctgtataccaaaaaccattgaagaaagcaataaataatcgtaacgttgatgagagccagctaactcatcggagtgctgcagtactgcaaacgtctaacacttccaaagggaaaaggaaagccagtgagaacagaagtttatatttaaacgaaaaggctctcaagaaagcacgtggcaatagtaatttgggtggaagttcaagatctaaatcatatgcctctgatctggaacctcatgctggattcatttcgcctgcgattcgagataatggcagtgatgcatataatcgacagagaactgcacggtatgatatccatcctatagatgtccatccttatgctagagcgccaccatcagcctactctggttacaaaagccatgctggctatgaggctgcaaatacatatgaatacgcagggaaccgggcgcctacacctccaagtggatcttacatccctcgaagaggacattactaacaaaaaatggagtgctggctctgtgcatccattcgatcgcatggtaacaaggaatcaaggatctccgtatttagatgtttcatacatgttatgtagacgttaaaaagtaacttgtttaaggaaaataagaaccctctgcagctttccctttgactgaagtgcagcccggcacaccggttgcttgttgaagaatgctttttttattattattgtagttaagagtccagacgtcgttattaccacttatcttcgtattggaaaaaaaatgtctttttcttagtccagcaatccactaatagcttctatgtttttttgtgctcagcaatatcttatttgcttttttaagacaaacatgccgtgcgtctcaacaggagaaaaaaat

SEQ ID NO: 53251 - DNA, 2444 bp, Zea Mays
tcgagaaggcgcaataacacgctgctccgtctccatctccatctccaattacctatcctctccgtcgaatcagaaaccctaacctcaccgtaccacggcctacgagccggaatgaccacatcagccgccgacgatggcagctctttggcgcctaccatcaccgagggagaaaccacagccgacgccggtgctggggcaggtgttgagtgcgtcgagggcaaagagatgaaggttggggccgcggctccagttgaggagccggataaggaggcggcgcgggaggaggatcctggtgatgatgatgactatgaggaggaggaggaggaggaggaggaggaggaggaggaggaggaggaggaggaggaggaggtggaggaggagacggaaactgcgaatgggaaagaggctgagttgatggagccattggcggcgctgaagcctggggaggaggtcaaacctgaaaagctagagggggagaaggaagagctggatgaggagcccgaggcatcggaagaggaccccgaggaggtggaagagttgaaggaggagggcgacggtattgcggaggaaggcttggtggatgggtcggaggcgaacgatgataaagatgctgatcaattgagcagtgggagtgatagtggtggaagcagaagtcgtggtatgcagaactctgaacttgctggaggtcttgaaatatttgttgatgacttgcctcaagattgtgtcaaggaagacattgctatggccttttctcaatcaggggaggtcaaatctgttaggataattaaaaattcatcaactggaaagaaccaagacattgcatttgtttgttacacaagtattgaagctgcaaagaaggttcttgctgaatttaaggagggaattgaggtaaaaggaaaaatggtcagggtatctgcttgtcaagataataataccctttacctggggaacatttgcaagggttggaccagagatcaggtgttgaacaccctaaaaagtattggaattcaagagtgtgagataagctttcccagttacaagggaggaagccgagggtttgcttttcttaagttcacctcacattactatgctagagcagcacttcgtcgcttaatgaaatccgatgctatttttggtactgatagaagcgctaaagtatccttttatcgaacccccacaaaatcatccaagagacttatacaggaagggtgcgttagcttgtgtgacaggaataaacaaagcaaatattgttgatggaagcttcaagttgtgtgcatatcttgcttggccaaaaagtgcttcaaaggtcaatagtgctgcaccttcaaatgctgccaccgcaaccgagaaggacaaaacccacacagagaagattcttgtagacatcgatttgcaacataaattccagaaaggcgacaagagcaaacttacatctcagacaaaggaggcaattatgaagaagaaaaaatcaagtaaattaccaaatgacaatgatacaaaactaacctcacaaggtgctgccgaagtaccacaaacctccaaatcttctgaaggcaagaggaaagttggaaaaaacaaacatgcctctgtataccaaaaaccattgaagaaagcaataaataatcgtaacgttgatgagagccagctaactcatcggagtgctgcagtactgcaaacgtctaacacttccaaagggaaaaggaaagccagtgagaacagaagtttatatttaaacgaaaaggctctcaagaaagcacgtggcaatagtaatttgggtggaagttcaagatctaaatcatatgcctctgatctggaacctcatgctggattcatttcgcctgcgattcgagataatggcagtgatgcatataatcgacagagaactgcacggtatgatatccatcctatagatgtccatccttatgctagagcgccaccatcagcctactctggttacaaaagccatgctggctatgaggctgcaaatacatatgaatacgcagggaaccgggcgcctacacctccaagtggatcttacatccctcgaagaggacattactaacaaaaaatggagtgctggctctgtgcatccattcgatcgcatggtaacaaggaatcaaggatctccgtatttagatgtttcatacatgttatgtagacgttaaaaagtaacttgtttaaggaaaataagaaccctctgcagctttccctttgactgaagtgcagcccggcacaccggttgcttgttgaagaatgctttttttattattattgtagttaagagtccagacgtcgttattaccacttatcttcgtattggaaaaaaaatgtctttttcttagtccagcaatccactaatagcttctatgtttttttgtgctcagcaatatcttatttgcttttttaagacaaacatgccgtgcgtctcaacaggagaaaaaaat

SEQ ID NO: 53252 - DNA, 2427 bp, Zea Mays
agcaagatctcgatggttccgatttaaaaaagagaggcattctagtgaagtcgagaaggcgcaataacacgctgctccgtctccatctccatctccaattacctatcctctccgtcgaatcagaaaccctaacctcaccgtaccacggcctacgagccggaatgaccacatcagccgccgacgatggcagctctttggcgcctaccatcaccgagggagaaaccacagccgacgccggtgctggggcaggtgttgagtgcgtcgagggcaaagagatgaaggttggggccgcggctccagttgaggagccggataaggaggcggcgcgggaggaggatcctggtgatgatgatgactatgaggaggaggaggaggaggaggaggaggaggaggaggaggaggaggaggaggaggaggaggtggaggaggagacggaaactgcgaatgggaaagaggctgagttgatggagccattggcggcgctgaagcctggggaggaggtcaaacctgaaaagctagagggggagaaggaagagctggatgaggagcccgaggcatcggaagaggaccccgaggaggtggaagagttgaaggaggagggcgacggtattgcggaggaaggcttggtggatgggtcggaggcgaacgatgataaagatgctgatcaattgagcagtgggagtgatagtggtggaagcagaagtcgtggtatgcagaactctgaacttgctggaggtcttgaaatatttgttgatgacttgcctcaagattgtgtcaaggaagacattgctatggccttttctcaatcaggggaggtcaaatctgttaggataattaaaaattcatcaactggaaagaaccaagacattgcatttgtttgttacacaagtattgaagctgcaaagaaggttcttgctgaatttaaggagggaattgaggtaaaaggaaaaatggtcagggtatctgcttgtcaagataataataccctttacctggggaacatttgcaagggttggaccagagatcaggcaaaaatagtatacctggaacatgtccctctttcttgggatgaaaataaagttaaggaatactgtgaagaatatggggagatcctgaaagctgatgttttccagatatcaaagaatatggaaaatgaaacaatttcttttgttgaattctcatccaggaagggtgcgttagcttgtgtgacaggaataaacaaagcaaatattgttgatggaagcttcaagttgtgtgcatatcttgcttggccaaaaagtgcttcaaaggtcaatagtgctgcaccttcaaatgctgccaccgcaaccgagaaggacaaaacccacacagagaagattcttgtagacatcgatttgcaacataaattccagaaaggcgacaagagcaaacttacatctcagacaaaggaggcaattatgaagaagaaaaaatcaagtaaattaccaaatgacaatgatacaaaactaacctcacaaggtgctgccgaagtaccacaaacctccaaatcttctgaaggcaagaggaaagttggaaaaaacaaacatgcctctgtataccaaaaaccattgaagaaagcaataaataatcgtaacgttgatgagagccagctaactcatcggagtgctgcagtactgcaaacgtctaacacttccaaagggaaaaggaaagccagtgagaacagaagtttatatttaaacgaaaaggctctcaagaaagcacgtggcaatagtaatttgggtggaagttcaagatctaaatcatatgcctctgatctggaacctcatgctggattcatttcgcctgcgattcgagataatggcagtgatgcatataatcgacagagaactgcacggtatgatatccatcctatagatgtccatccttatgctagagcgccaccatcagcctactctggttacaaaagccatgctggctatgaggctgcaaatacatatgaatacgcagggaaccgggcgcctacacctccaagtggatcttacatccctcgaagaggacattactaacaaaaaatggagtgctggctctgtgcatccattcgatcgcatggtaacaaggaatcaaggatctccgtatttagatgtttcatacatgttatgtagacgttaaaaagtaacttgtttaaggaaaataagaaccctctgcagctttccctttgactgaagtgcagcccggcacaccggttgcttgttgaagaatgctttttttattattattgtagttaagagtccagacgtcgttattaccacttatcttcgtattggaaaaaaaatgtctttttcttagtccagcaatccactaatagcttctatgtttttttgtgctcagcaatatcttatttgcttttttaagacaaacatgccgtgcgtctcaacaggagaaaaaaat

SEQ ID NO: 53253 - DNA, 2511 bp, Zea Mays
agcaagatctcgatggttccgatttaaaaaagagaggcattctagtgaagtcgagaaggcgcaataacacgctgctccgtctccatctccatctccaattacctatcctctccgtcgaatcagaaaccctaacctcaccgtaccacggcctacgagccggaatgaccacatcagccgccgacgatggcagctctttggcgcctaccatcaccgagggagaaaccacagccgacgccggtgctggggcaggtgttgagtgcgtcgagggcaaagagatgaaggttggggccgcggctccagttgaggagccggataaggaggcggcgcgggaggaggatcctggtgatgatgatgactatgaggaggaggaggaggaggaggaggaggaggaggaggaggaggaggaggaggaggaggaggtggaggaggagacggaaactgcgaatgggaaagaggctgagttgatggagccattggcggcgctgaagcctggggaggaggtcaaacctgaaaagctagagggggagaaggaagagctggatgaggagcccgaggcatcggaagaggaccccgaggaggtggaagagttgaaggaggagggcgacggtattgcggaggaaggcttggtggatgggtcggaggcgaacgatgataaagatgctgatcaattgagcagtgggagtgatagtggtggaagcagaagtcgtggtatgcagaactctgaacttgctggaggtcttgaaatatttgttgatgacttgcctcaagattgtgtcaaggaagacattgctatggccttttctcaatcaggggaggtcaaatctgttaggataattaaaaattcatcaactggaaagaaccaagacattgcatttgtttgttacacaagtattgaagctgcaaagaaggttcttgctgaatttaaggagggaattgaggtaaaaggaaaaatggtcagggtatctgcttgtcaagataataataccctttacctggggaacatttgcaagggttggaccagagatcaggtgttgaacaccctaaaaagtattggaattcaagagtgtgagataagctttcccagttacaagggaggaagccgagggtttgcttttcttaagttcacctcacattactatgctagagcagcacttcgtcgcttaatgaaatccgatgctatttttggtactgatagaagcgctaaagtatccttttatcgaacccccacaaaatcatccaagagacttatacaggcaaaaatagtatacctggaacatgtccctctttcttgggatgaaaataaagttaaggaatactgtgaagaatatggggagatcctgaaagctgatgttttccagatatcaaagaatatggaaaatgaaacaatttcttttgttgaattctcatccaggaagggtgcgttagcttgtgtgacaggaataaacaaagcaaatattgttgatggaagcttcaagttgtgtgcatatcttgcttggccaaaaagtgcttcaaaggtcaatagtgctgcaccttcaaatgctgccaccgcaaccgagaaggacaaaacccacacagagaagattcttgtagacatcgatttgcaacataaattccagaaaggcgacaagagcaaacttacatctcagacaaaggaggcaattatgaagaagaaaaaatcaagtaaattaccaaatgacaatgatacaaaactaacctcacaaggtgctgccgaagtaccacaaacctccaaatcttctgaaggcaagaggaaagttggaaaaaacaaacatgcctctgtataccaaaaaccattgaagaaagcaataaataatcgtaatttgggtggaagttcaagatctaaatcatatgcctctgatctggaacctcatgctggattcatttcgcctgcgattcgagataatggcagtgatgcatataatcgacagagaactgcacggtatgatatccatcctatagatgtccatccttatgctagagcgccaccatcagcctactctggttacaaaagccatgctggctatgaggctgcaaatacatatgaatacgcagggaaccgggcgcctacacctccaagtggatcttacatccctcgaagaggacattactaacaaaaaatggagtgctggctctgtgcatccattcgatcgcatggtaacaaggaatcaaggatctccgtatttagatgtttcatacatgttatgtagacgttaaaaagtaacttgtttaaggaaaataagaaccctctgcagctttccctttgactgaagtgcagcccggcacaccggttgcttgttgaagaatgctttttttattattattgtagttaagagtccagacgtcgttattaccacttatcttcgtattggaaaaaaaatgtctttttcttagtccagcaatccactaatagcttctatgtttttttgtgctcagcaatatcttatttgcttttttaagacaaacatgccgtgcgtctcaacaggagaaaaaaat

SEQ ID NO: 53254 - DNA, 2937 bp, Zea Mays
cattttttttcatacgaaagcaagatctcgatggttccgatttaaaaaagagaggcattctagtgaagtcgagaaggcgcaataacacgctgctccgtctccatctccatctccaattacctatcctctccgtcgaatcagaaaccctaacctcaccgtaccacggcctacgagccggaatgaccacatcagccgccgacgatggcagctctttggcgcctaccatcaccgagggagaaaccacagccgacgccggtgctggggcaggtgttgagtgcgtcgagggcaaagagatgaaggttggggccgcggctccagttgaggagccggataaggaggcggcgcgggaggaggatcctggtgatgatgatgactatgaggaggaggaggaggaggaggaggaggaggaggaggaggaggaggaggaggaggaggaggtggaggaggagacggaaactgcgaatgggaaagaggctgagttgatggagccattggcggcgctgaagcctggggaggaggtcaaacctgaaaagctagagggggagaaggaagagctggatgaggagcccgaggcatcggaagaggaccccgaggaggtggaagagttgaaggaggagggcgacggtattgcggaggaaggcttggtggatgggtcggaggcgaacgatgataaagatgctgatcaattgagcagtgggagtgatagtggtggaagcagaagtcgtggtatgcagaactctgaacttgctggaggtcttgaaatatttgttgatgacttgcctcaagattgtgtcaaggaagacattgctatggccttttctcaatcaggggaggtcaaatctgttaggataattaaaaattcatcaactggaaagaaccaagacattgcatttgtttgttacacaagtattgaagctgcaaagaaggttcttgctgaatttaaggagggaattgaggtaaaaggaaaaatggtcagggtatctgcttgtcaagataataataccctttacctggggaacatttgcaagggttggaccagagatcaggtgttgaacaccctaaaaagtattggaattcaagagtgtgagataagctttcccagttacaagggaggaagccgagggtttgcttttcttaagttcacctcacattactatgctagagcagcacttcgtcgcttaatgaaatccgatgctatttttggtactgatagaagcgctaaagtatccttttatcgaacccccacaaaatcatccaagagacttatacagtctggacctaggccttgtcatttggatgaaaaaattcacccggggagggtaagatcaccctcgcgtagtcacggtattatattaatagaaggtcatgacaagttgacaatggtctcgaccgagcaacccccgaaccctgtcctcccatcatcaatgggccgcttcaagctgtccactctgcaaatgcccatccagggtggtgcacagccgagtcgtaacccgagagtggatgagaaacacgaggagatgtcaatgatatatgcccaggcaaaaatagtatacctggaacatgtccctctttcttgggatgaaaataaagttaaggaatactgtgaagaatatggggagatcctgaaagctgatgttttccagatatcaaagaatatggaaaatgaaacaatttcttttgttgaattctcatccaggaagggtgcgttagcttgtgtgacaggaataaacaaagcaaatattgttgatggaagcttcaagttgtgtgcatatcttgcttggccaaaaagtgcttcaaaggtcaatagtgctgcaccttcaaatgctgccaccgcaaccgagaaggacaaaacccacacagagaagattcttgtagacatcgatttgcaacataaattccagaaaggcgacaagagcaaacttacatctcagacaaaggaggcaattatgaagaagaaaaaatcaagtaaattaccaaatgacaatgatacaaaactaacctcacaaggtgctgccgaagtaccacaaacctccaaatcttctgaaggcaagaggaaagttggaaaaaacaaacatgcctctgtataccaaaaaccattgaagaaagcaataaataatcgtaacgttgatgagagccagctaactcatcggagtgctgcagtactgcaaacgtctaacacttccaaagggaaaaggaaagccagtgagaacagaagtttatatttaaacgaaaaggctctcaagaaagcacgtggcaatagtaatttgggtggaagttcaagatctaaatcatatgcctctgatctggaacctcatgctggattcatttcgcctgcgattcgagataatggcagtgatgcatataatcgacagagaactgcacggtatgatatccatcctatagatgtccatccttatgctagagcgccaccatcagcctactctggttacaaaagccatgctggctatgaggctgcaaatacatatgaatacgcagggaaccgggcgcctacacctccaagtggatcttacatccctcgaagaggacattactaacaaaaaatggagtgctggctctgtgcatccattcgatcgcatggtaacaaggaatcaaggatctccgtatttagatgtttcatacatgttatgtagacgttaaaaagtaacttgtttaaggaaaataagaaccctctgcagctttccctttgactgaagtgcagcccggcacaccggttgcttgttgaagaatgctttttttattattattgtagttaagagtccagacgtcgttattaccacttatcttcgtattggaaaaaaaatgtctttttcttagtccagcaatccactaatagcttctatgtttttttgtgctcagcaatatcttatttgcttttttaagacaaacatgccgtgcgtctcaacaggagaaaaaaat

SEQ ID NO: 53255 - DNA, 2606 bp, Zea Mays
cctctttgtgagggactgcaaacattcttgtttgtaggcattttttttcatacgaaagcaagatctcgatggttccgatttaaaaaagagaggcattctagtgaagtcgagaaggcgcaataacacgctgctccgtctccatctccatctccaattacctatcctctccgtcgaatcagaaaccctaacctcaccgtaccacggcctacgagccggaatgaccacatcagccgccgacgatggcagctctttggcgcctaccatcaccgagggagaaaccacagccgacgccggtgctggggcaggtgttgagtgcgtcgagggcaaagagatgaaggttggggccgcggctccagttgaggagccggataaggaggcggcgcgggaggaggatcctggtgatgatgatgactatgaggaggaggaggaggaggaggaggaggaggaggaggaggaggaggaggaggaggaggaggtggaggaggagacggaaactgcgaatgggaaagaggctgagttgatggagccattggcggcgctgaagcctggggaggaggtcaaacctgaaaagctagagggggagaaggaagagctggatgaggagcccgaggcatcggaagaggaccccgaggaggtggaagagttgaaggaggagggcgacggtattgcggaggaaggcttggtggatgggtcggaggcgaacgatgataaagatgctgatcaattgagcagtgggagtgatagtggtggaagcagaagtcgtggggaggtcaaatctgttaggataattaaaaattcatcaactggaaagaaccaagacattgcatttgtttgttacacaagtattgaagctgcaaagaaggttcttgctgaatttaaggagggaattgaggtaaaaggaaaaatggtcagggtatctgcttgtcaagataataataccctttacctggggaacatttgcaagggttggaccagagatcaggtgttgaacaccctaaaaagtattggaattcaagagtgtgagataagctttcccagttacaagggaggaagccgagggtttgcttttcttaagttcacctcacattactatgctagagcagcacttcgtcgcttaatgaaatccgatgctatttttggtactgatagaagcgctaaagtatccttttatcgaacccccacaaaatcatccaagagacttatacaggcaaaaatagtatacctggaacatgtccctctttcttgggatgaaaataaagttaaggaatactgtgaagaatatggggagatcctgaaagctgatgttttccagatatcaaagaatatggaaaatgaaacaatttcttttgttgaattctcatccaggaagggtgcgttagcttgtgtgacaggaataaacaaagcaaatattgttgatggaagcttcaagttgtgtgcatatcttgcttggccaaaaagtgcttcaaaggtcaatagtgctgcaccttcaaatgctgccaccgcaaccgagaaggacaaaacccacacagagaagattcttgtagacatcgatttgcaacataaattccagaaaggcgacaagagcaaacttacatctcagacaaaggaggcaattatgaagaagaaaaaatcaagtaaattaccaaatgacaatgatacaaaactaacctcacaaggtgctgccgaagtaccacaaacctccaaatcttctgaaggcaagaggaaagttggaaaaaacaaacatgcctctgtataccaaaaaccattgaagaaagcaataaataatcgtaacgttgatgagagccagctaactcatcggagtgctgcagtactgcaaacgtctaacacttccaaagggaaaaggaaagccagtgagaacagaagtttatatttaaacgaaaaggctctcaagaaagcacgtggcaatagtaatttgggtggaagttcaagatctaaatcatatgcctctgatctggaacctcatgctggattcatttcgcctgcgattcgagataatggcagtgatgcatataatcgacagagaactgcacggtatgatatccatcctatagatgtccatccttatgctagagcgccaccatcagcctactctggttacaaaagccatgctggctatgaggctgcaaatacatatgaatacgcagggaaccgggcgcctacacctccaagtggatcttacatccctcgaagaggacattactaacaaaaaatggagtgctggctctgtgcatccattcgatcgcatggtaacaaggaatcaaggatctccgtatttagatgtttcatacatgttatgtagacgttaaaaagtaacttgtttaaggaaaataagaaccctctgcagctttccctttgactgaagtgcagcccggcacaccggttgcttgttgaagaatgctttttttattattattgtagttaagagtccagacgtcgttattaccacttatcttcgtattggaaaaaaaatgtctttttcttagtccagcaatccactaatagcttctatgtttttttgtgctcagcaatatcttatttgcttttttaagacaaacatgccgtgcgtctcaacaggagaaaaaaat

SEQ ID NO: 53256 - DNA, 2450 bp, Zea Mays
cctctttgtgagggactgcaaacattcttgtttgtaggcattttttttcatacgaaagcaagatctcgatggttccgatttaaaaaagagaggcattctagtgaagtcgagaaggcgcaataacacgctgctccgtctccatctccatctccaattacctatcctctccgtcgaatcagaaaccctaacctcaccgtaccacggcctacgagccggaatgaccacatcagccgccgacgatggcagctctttggcgcctaccatcaccgagggagaaaccacagccgacgccggtgctggggcaggtgttgagtgcgtcgagggcaaagagatgaaggttggggccgcggctccagttgaggagccggataaggaggaggagaaggaagagctggatgaggagcccgaggcatcggaagaggaccccgaggaggtggaagagttgaaggaggagggcgacggtattgcggaggaaggcttggtggatgggtcggaggcgaacgatgataaagatgctgatcaattgagcagtgggagtgatagtggtggaagcagaagtcgtggtatgcagaactctgaacttgctggaggtcttgaaatatttgttgatgacttgcctcaagattgtgtcaaggaagacattgctatggccttttctcaatcaggggaggtcaaatctgttaggataattaaaaattcatcaactggaaagaaccaagacattgcatttgtttgttacacaagtattgaagctgcaaagaaggttcttgctgaatttaaggagggaattgaggtaaaaggaaaaatggtcagggtatctgcttgtcaagataataataccctttacctggggaacatttgcaagggttggaccagagatcaggtgttgaacaccctaaaaagtattggaattcaagagtgtgagataagctttcccagttacaagggaggaagccgagggtttgcttttcttaagttcacctcacattactatgctagagcagcacttcgtcgcttaatgaaatccgatgctatttttggtactgatagaagcgctaaagtatccttttatcgaacccccacaaaatcatccaagagacttatacaggcaaaaatagtatacctggaacatgtccctctttcttgggatgaaaataaagttaaggaatactgtgaagaatatggggagatcctgaaagctgatgttttccagatatcaaagaatatggaaaatgaaacaatttcttttgttgaattctcatccaggaagggtgcgttagcttgtgtgacaggaataaacaaagcaaatattgttgatggaagcttcaagttgtgtgcatatcttgcttggccaaaaagtgcttcaaaggtcaatagtgctgcaccttcaaatgctgccaccgcaaccgagaaggacaaaacccacacagagaagattcttgtagacatcgatttgcaacataaattccagaaaggcgacaagagcaaacttacatctcagacaaaggaggcaattatgaagaagaaaaaatcaagtaaattaccaaatgacaatgatacaaaactaacctcacaaggtgctgccgaagtaccacaaacctccaaatcttctgaaggcaagaggaaagttggaaaaaacaaacatgcctctgtataccaaaaaccattgaagaaagcaataaataatcgtaacgttgatgagagccagctaactcatcggagtgctgcagtactgcaaacgtctaacacttccaaagggaaaaggaaagccagtaatttgggtggaagttcaagatctaaatcatatgcctctgatctggaacctcatgctggattcatttcgcctgcgattcgagataatggcagtgatgcatataatcgacagagaactgcacggtatgatatccatcctatagatgtccatccttatgctagagcgccaccatcagcctactctggttacaaaagccatgctggctatgaggctgcaaatacatatgaatacgcagggaaccgggcgcctacacctccaagtggatcttacatccctcgaagaggacattactaacaaaaaatggagtgctggctctgtgcatccattcgatcgcatggtaacaaggaatcaaggatctccgtatttagatgtttcatacatgttatgtagacgttaaaaagtaacttgtttaaggaaaataagaaccctctgcagctttccctttgactgaagtgcagcccggcacaccggttgcttgttgaagaatgctttttttattattattgtagttaagagtccagacgtcgttattaccacttatcttcgtattggaaaaaaaatgtctttttcttagtccagcaatccactaatagcttctatgtttttttgtgctcagcaatatcttatttgcttttttaagacaaacatgccgtgcgtctcaacaggagaaaaaaat

SEQ ID NO: 53257 - DNA, 2300 bp, Zea Mays
attttttttcatacgaaagcaagatctcgatggttccgatttaaaaaagagaggcattctagtgaagtcgagaaggcgcaataacacgctgctccgtctccatctccatctccaattacctatcctctccgtcgaatcagaaaccctaacctcaccgtaccacggcctacgagccggaatgaccacatcagccgccgacgatggcagctctttggcgcctaccatcaccgagggagaaaccacagccgacgccggtgctggggcaggtgttgagtgcgtcgagggcaaagagatgaaggttggggccgcggctccagttgaggagccggataaggaggcggcgcgggaggaggatcctggtgatgatgatgactatgaggaggaggaggaggaggaggaggaggaggaggaggaggaggaggaggaggaggaggaggtggaggaggagacggaaactgcgaatgggaaagaggctgagttgatggagccattggcggcgctgaagcctggggaggaggtcaaacctgaaaagctagagggggagaaggaagagctggatgaggagcccgaggcatcggaagaggaccccgaggaggtggaagagttgaaggaggagggcgacggtattgcggaggaaggcttggtggatgggtcggaggcgaacgatgataaagatgctgatcaattgagcagtgggagtgatagtggtggaagcagaagtcgtggtatgcagaactctgaacttgctggaggtcttgaaatatttgttgatgacttgcctcaagattgtgtcaaggaagacattgctatggccttttctcaatcaggggaggtcaaatctgttaggataattaaaaattcatcaactggaaagaaccaagacattgcatttgtttgttacacaagtattgaagctgcaaagaaggttcttgctgaatttaaggagggaattgaggtaaaaggaaaaatggtcagggtatctgcttgtcaagataataataccctttacctggggaacatttgcaagggttggaccagagatcaggtgttgaacaccctaaaaagtattggaattcaagagtgtgagataagctttcccagttacaagggaggaagccgagggtttgcttttcttaagttcacctcacattactatgctagagcagcacttcgtcgcttaatgaaatccgatgctatttttggtactgatagaagcgctaaagtatccttttatcgaacccccacaaaatcatccaagagacttatacaggcaaaaatagtatacctggaacatgtccctctttcttgggatgaaaataaagttaaggaatactgtgaagaatatggggagatcctgaaagctgatgttttccagatatcaaagaatatggaaaatgaaacaatttcttttgttgaattctcatccaggaagggtgcgttagcttgtgtgacaggaataaacaaagcaaatattgttgatggaagcttcaagttgtgtgcatatcttgcttggccaaaaagtgcttcaaaggtcaatagtgctgcaccttcaaatgctgccaccgcaaccgagaaggacaaaacccacacagagaagattcttgtagacatcgatttgcaacataaattccagaaaggcgacaagagcaaacttacatctcagacaaaggaggcaattatgaagaagaaaaaatcaagtaaattaccaaatgacaatgatacaaaactaacctcacaaggtgctgccgaagtaccacaaacctccaaatcttctgaaggcaagaggaaagttggaaaaaacaaacatgcctctgtataccaaaaaccattgaagaaagcaataaataatcgtaacgttgatgagagccagctaactcatcggagtgctgcagtactgcaaacgtctaacacttccaaagggaaaaggaaagccagtgagaacagaagtttatatttaaacgaaaaggctctcaagaaagcacgtggcaatagtaatttgggtggaagttcaagatctaaatcatatgcctctgatctggaacctcatgctggattcatttcgcctgcgattcgagataatggcagtgatgcatataatcgacagagaactgcacggtatgatatccatcctatagatgtccatccttatgctagagttgttttagaaattatgtcagggaaagtgggtaaccaaccagtcaactgtaggccataaaatcacaagaaaaggatgatgtaagcgactctgaattcaactacttagggcttgttcggttattttcgttccatgtggattagag

SEQ ID NO: 53258 - DNA, 2244 bp, Zea Mays
cattttttttcatacgaaagcaagatctcgatggttccgatttaaaaaagagaggcattctagtgaagtcgagaaggcgcaataacacgctgctccgtctccatctccatctccaattacctatcctctccgtcgaatcagaaaccctaacctcaccgtaccacggcctacgagccggaatgaccacatcagccgccgacgatggcagctctttggcgcctaccatcaccgagggagaaaccacagccgacgccggtgctggggcaggtgttgagtgcgtcgagggcaaagagatgaaggttggggccgcggctccagttgaggagccggataaggaggcggcgcgggaggaggatcctggtgatgatgatgactatgaggaggaggaggaggaggaggaggaggaggaggaggaggaggaggaggaggaggaggaggtggaggaggagacggaaactgcgaatgggaaagaggctgagttgatggagccattggcggcgctgaagcctggggaggaggtcaaacctgaaaagctagagggggagaaggaagagctggatgaggagcccgaggcatcggaagaggaccccgaggaggtggaagagttgaaggaggagggcgacggtattgcggaggaaggcttggtggatgggtcggaggcgaacgatgataaagatgctgatcaattgagcagtgggagtgatagtggtggaagcagaagtcgtggtatgcagaactctgaacttgctggaggtcttgaaatatttgttgatgacttgcctcaagattgtgtcaaggaagacattgctatggccttttctcaatcaggggaggtcaaatctgttaggataattaaaaattcatcaactggaaagaaccaagacattgcatttgtttgttacacaagtattgaagctgcaaagaaggttcttgctgaatttaaggagggaattgaggtaaaaggaaaaatggtcagggtatctgcttgtcaagataataataccctttacctggggaacatttgcaagggttggaccagagatcaggtgttgaacaccctaaaaagtattggaattcaagagtgtgagataagctttcccagttacaagggaggaagccgagggtttgcttttcttaagttcacctcacattactatgctagagcagcacttcgtcgcttaatgaaatccgatgctatttttggtactgatagaagcgctaaagtatccttttatcgaacccccacaaaatcatccaagagacttatacaggcaaaaatagtatacctggaacatgtccctctttcttgggatgaaaataaagttaaggaatactgtgaagaatatggggagatcctgaaagctgatgttttccagatatcaaagaatatggaaaatgaaacaatttcttttgttgaattctcatccaggaagggtgcgttagcttgtgtgacaggaataaacaaagcaaatattgttgatggaagcttcaagttgtgtgcatatcttgcttggccaaaaagtgcttcaaaggtcaatagtgctgcaccttcaaatgctgccaccgcaaccgagaaggacaaaacccacacagagaagattcttgtagacatcgatttgcaacataaattccagaaaggcgacaagagcaaacttacatctcagacaaaggaggcaattatgaagaagaaaaaatcaagtaaattaccaaatgacaatgatacaaaactaacctcacaaggtgctgccgaagtaccacaaacctccaaatcttctgaaggcaagaggaaagttggaaaaaacaaacatgcctctgtataccaaaaaccattgaagaaagcaataaataatcgtaacgttgatgagagccagctaactcatcggagtgctgcagtactgcaaacgtctaacacttccaaagggaaaaggaaagccagtaatttgggtggaagttcaagatctaaatcatatgcctctgatctggaacctcatgctggattcatttcgcctgcgattcgagataatggcagtgatgcatataatcgacagagaactgcacggtatgatatccatcctatagatgtccatccttatgctagagttgttttagaaattatgtcagggaaagtgggtaaccaaccagtcaactgtaggccataaaatcacaagaaaaggatgatgtaagcgactctgaattcaactacttagggcttgttcggttattttcgttccatgtggattagag

SEQ ID NO: 53259 - DNA, 605 bp, Zea Mays
cgctgctccgtctccatctccatctccaattacctatcctctccgtcgaatcagaaaccctaacctcaccgtaccacggcctacgagccggaatgaccacatcagccgccgacgatggcagctctttggcgcctaccatcaccgagggagaaaccacagccgacgccggtgctggggcaggtgttgagtgcgtcgagggcaaagagatgaaggttggggccgcggctccagttgaggagccggataaggaggcggcgcgggaggaggatcctggtgatgatgatgactatgaggaggaggaggaggaggaggaggaggaggaggaggaggaggaggaggaggaggaggaggtggaggaggagacggaaactgcgaatgggaaagaggctgagttgatggagccattggcggcgctgaagcctggggaggaggtcaaacctgaaaagctagagggggagaaggaagagctggatgaggagcccgaggcatcggaagaggaccccgaggaggtggaagagttgaaggaggagggcgacggtattgcggaggaaggcttggtggatgggtcggaggcgaacggaatcaaaactgctccttggtacaat

SEQ ID NO: 53260 - DNA, 649 bp, Zea Mays
gttcgttagacgtctccctctcctttgccgcacgaatcggaggaactcaaccatgcgcgcttctcggagtccgttgactaccgtccacacactaacctttggcggccacaaaaaggggttgccgagtcctcccttccccctcccttctggatcacgccgcctcagcccttgcacgtcccagccacgctcgcccactgtgtgccgtcgtggtgagaaagaaagcaacgccgccgccctgtacctgtgcgctggcgggcagggaaattatcgcctgcacgttgagcggacctgggcaccgtcgttcagccggatcgtgcagactcagacggtctttatgcggtgggcgccatggtgcgctgtgcatgctcgatgcgtaatcgctcgctcgggtagcgactggagctcgggtgctcgacgtcatggttccccgccgccggggaccagcaggtattcagtcgccggggcccaatccggtgtcctaggagtggtgcctccactcgatggtgtatttcggagtctcgggtcgggcgcagaagcttcacggtctgggaaattgctcatcgaagtcgatatctgcagtggggtcgagctcttccgtggtcgggtgtcgctgctccaaaatcgccgaagagcccgtgaccgaggatcc

SEQ ID NO: 53261 - DNA, 3763 bp, Zea Mays
cagtaccattcgggcggctaagctctgagctaaaccccgacggagtgagcgaggaaacgttctccgtttcactttcccaacacccagaatcctgcagaaatcaccctttccacccccacccagcgctgctcggatccccgggcgagcacatcctccggtcctcgcttgtcggcctctcctccccggggccggtccagcgggttgcatggtgcgcggccgctggttgtgagcccaatcgatggcctcggcggaggcgcgccgcctcgcggtcgtgccgcagctagatatcgagcagatactgaaggaagctcaacaccgatggttacgccctgctgaaatatgtgaaatactgaaaaactacaggaacttccgtattgctccagaaccaccaaacagaccaccaagtggctcactttttttatttgatcggaaagtgttgagatacttcaggaaggatggtcataattggaggaagaaaaatgatcagaagactgtcaaggaagcccatgaaaggttgaagtctggaagtattgatgtacttcactgttactatgcccatggggaagagaatataaacttccaaaggaggacttactggatgctattgtacttgtgcattatcttgagactaagggtggcaagtcgtctcgtgctagaggaaacaacatgattcaagaagctgctgtggatagtcctttaagtcaattaccttcacagactatggagggagagagctcacttagtggacaggcctccgaatatgaagaggcggaatcagatatttattcaggaggagccggacacgactctttcacttgggtgcagcagcatgaaaatggaactggacccatgatagcttcttctgttttcagctcgtacacacctgctttgtccataggtaattaccatgggctgcatgccacacaaaacacaagcttctatcctgttaaccagcttaattctcctgtcattcttaatggatcaagtgccatgcttggaacaaatggctgtgcaaatcaaactgatcttccatcgtggaattctgtgatagaactggatcatgagcctgttcaaatgcctgatctccagtttcctgttcctcctgatcaaggtacttccacagaaggcctgggagttgattacttaacatttgatgaagtatattctgatggcctcagtctccaagatattggtgccacaggaactcatggagagtcatatttgcagttctctagtggtactggtgatttggctgcaacagtgaacagcttcccacaagaaaatgatggttctctggaggcagccattggctatccatttttgaagacacagtcatccaatctatctgatatcttaaaagacagctttaagaaaactgacagttttacaagatggatgagcaaagagcttcctgaagtggaagattctcaaattcaatctagttctggggcgttctggagcagtgaagaagcaaataatatcatcgaagcatcaaaccatgaggcactggatcagttcactgtttccccgatgctctcgcaggaccagctctttagtatagttgacttttctccaaactggacatatgtaggttcaaagactaagattttagttgctggtaacatcctgaatgacagtcaaatcaccgagagatccaagtggtcatgtatgtttggagaagttgaagttccagcaaatattttagcagatggtactctcatctgttactcaccgcagcataaacctggtcgagtacctttttatatcacctgctccaacaggttggcctgcagtgaagtgcgagagtttgaatttcgaccaactgtctcccagtacatggatgctcctagtccacatggtgaaacaaacaaagtttatttccagatacgccttgacaagttgttatcccttggaccggatgagtaccaggcaactgtatctaatcctactctggagatggttgacttaagcaggaagataagttcactgatggcgagcaacgatgagtggtccaacttgctaaagttggctgttgataatgagccttctactgctgatcagcaggatcagtttgctgaaaacttgataaagggaaaattgcatatctggcttctaaataaagttggtatgggtggcaagggacccagtgtgttagatgatgaagggcagggcgtgcttcacttagcagctgcacttggatatgattgggctataaggccaacacttgctgctggcgtgaatattaatttcagagatattcatggctggactgcactccattgggctgccttttgtggccgagagagtactgtagttgcgcttattgcactgggagcagctcctggagctttgacagacccaactcccgatttccctggaagtacaccagcagatcttgcatcttctaatggtcaaaagggaatatctggtttcttggcagagtgttctctgaccagtcatcttcaggtccttaatctgaaggaagctaatatggctcaaatatctggtctacctggtattggagatgttaccgagagagattcactgcagcctccaagtggagattcattgggtcctgttcgaaatgctactcaagctgctgcgcggatatatcaagttttcagggtgcaatccttccagagaaagcaagcggctcaatatgaggataaaggtggcatgtctgatgagcgtgctctctcactcctttctgtcaagccacccaagtcagggcagcttgatcctctgcactctgctgcaactcgcatacaaaataagttcagaggatggaaggggagaaaggaatttcttcttattaggcagcgaattgtgaagatccaggctcatgtgcgaggtcaccaagtgaggaagcattatcggaaaatagtttggtctgttgggatcgtggagaaagttatattgcgttggaggcgtagaggggctgggttacgtgggtttcggtctcaagaaggatcagtggagagcagtagtggcggaacaagtagcagttcgatccaaaataagtcttctggagatgattacgattttctgcaagaaggacgaaaacagactgaagaacggctccagaaagctcttgcaagagtgaagtccatggctcagtacccggaagcaagagatcagtaccagaggattttcactgtcgtgtcaaaaatgcaggagtctcaggctatgcaagaaaagatgccggaggagtcagcagagatggacatgagtgaattcaaggaactgtgggatgacgatgcacctatcccgggttatttttagtgtggaaacctgttttgttggatttatttctctgtagattgctccgtttgtcttgagtgctactgaattgatggcacaaatggctgataacccaaagtagcgttgctggtgcatgatctgacatgtttggatttggacttaggtgtggtatttcttttgccttatgtacagtagaatattatctacatttgaaggagccttgtatttactgtgtgaaatcggtgtaaagagtttgatatcagagatcttacccagacttaacggttgcatgttactgcagtgcagcagttaggagtttgaggctttttgcacggatcatgtcctctcgacccggtctctgttgattggacaccatgatggtctaactagcgttgcaaacgggagaacttgtgacggcctgtcccgttttcggaggggcttacgcaacaacaatgcccagcagcacgggatgaggataagaagttgacaagtgttgacccgg

SEQ ID NO: 53262 - DNA, 2502 bp, Zea Mays
cttgattctcggtaacgaactttttgcagccatccattagttctcttgcataaagccctgcgttgattcctgagcacagaatttacatcagcactcactgtgttttgcaaattagaaaattcgacaaataaattatggttggagccttaaacccttgacattttagaatttcattctcctagggtatgatgataaaagcggacttcaattcctcaactgattctattgcaagcaagttacgatcttttagtgtaaaacaggagtattttttgtgggaggaaaaaaagtgtggtaatagatacactgaaatctcaaaattcttcaatgataaagctttagaattatttaattaaatgggtaaaaccaaatgtaattatcgcagctcgattgtcattttccagcgttgacatttctggtcttgtcattatcccgtatttgacagcaatcagttcaaaccaccttgaattgaactggctgaaactattataaactaaatgcaatgaagcttaaaatgattttcactagggagggctgcccggtgccaaaggctcccacatgtgtcaggtgatcaggtctaggaagggatatgttgaggcaagctttctcccgcaaatgcaaagagcctgtttcgaacccacaacctagttactcagtgagaaggctctcaccactggtccactgcgcctataaaatttacaatgaaacaaataatttcaattctctcgaatcttgaccattatggttgtttagatgtagatatattcagggacatggaattgtactggccataattcaaattctgttgtttggatcactattaaattggtttctagaatcctataaagaagcgttgtcatgcagaaaaggagacgggccaccgaacatggggaagaagagaggggctcgccaacattcggccacagaaatgaagacaagggcacgccggcccctagccatagggaacaagggaaaggaacaccaccaaccggccatggggaagaggagaaaggtcgccaaccatggggaagaggcagggaggtgcatcaagggcggcacatcagaggtggaggcgccttgggcagcgcatcgtgggcgcctgggcggtttgtcagggctaggtgtgtgttgggattccagttctgaattattaaccttccaaaaaactacattatgaataccaattctaaattcttaggctgaatatctacatccaaatggggtattattaactttctagggggatataaaaaaggcaagacccaaaatatgaccaagccctatttagaacatgttgcttcagagtatatcctataatccaagttgattcatagtgtgtaagagcttggaagtttttcttgtatcatatgtcaatgtaatgtcagattattagttcaggatttctccacagtctatacatcgttttacctgtctatcttatccacagaacattcaataccaacttaccaagtactcatgaacattctgttcagcatcctactattagttctccaatgaacatggactcttagcgtaatggctaaagcttccgagcagcacaccaaagacccatagttgttaaggcggcaaggcaaggtaaggcgactggccccatccttaccttttaagcgataaggcgtaaggcgaggcgacgtcttaaatatagttaaaattagaaaacatattgatatttgagaaagtatttaggataagaacattaataaaatagagaaaaagataaagaaaagaaaaaactagcccccagcctacaaatcagccaaaaagcccattagcccagtaaaactaggttaagcccacttcccctccctctctcctagacctctccctctatcttctcccagcagcctcactcccaactccctcctcccagcgacctagccgcctctccctctctccacactggcgtctcttcctctctctcttccccgctggctccctctctcctgtgtcgatcgctgctggaggagtctttggggccgtcaccgctctgctgctggaggagctgcgacacgcgctttgctgctggaagagatgtcgcgccactgttggagccgtcgctggcctctcccactcgccttaggtgtgggcgtaaggcgagcaggacgccttacgtcgccggggcgctttaccgcctaggcgacgcttaagcgtcgccttgggacaccttaacaactatgcaaagacccaagttcgaattcccgtgggagcgaatttacgttgcttaggtaaaaaactcatctgactccacaccaaagcacggcttaaggcccggccccaacacacatgggcatcatgtccgccatgtaagggtggaggaaaaagactttctgatctgcgtgagatcttttctatcagccaatgaccagggggcacagtttaaggcacggccccaacacacatgcatcatgtccgccatgtaagggtcggggaaaagactcagaggttttccttgatctgcgtgagagatcttttctatcagccaat

SEQ ID NO: 53263 - DNA, 633 bp, Zea Mays
atcaaattagtttttatatatatatataacacatacactaagtattatatgaatccattagaaaccaaaacgaattttaatttatgacagaaggagtacatgacattggtttaatggcaagggcaacatctaaatgccttatatttttatagcgaaaccaaaaatcaaaatgtggcgccggtgcactggcaagggcaacaggaaggggcttcgctacaatgctgatgtccaatggttattggcccgcctattgatgatcgagcacggtgtatgatgctgatgcatacgcccttaactttccagaaatcgccacatagctgcagttctagcagtacagaatactgatagggcaacccgcgtggtcgcttggtgttgagcttccacaaaacatgagcttcttttctgcatagtcatcttagcctatcctcttgaatttcagtccggacaattgatacaacgacggctatgtcatccagtttgcccccactgtagccaaggtacccagccgagagagcagcatctgaaaatgggcttctcccagccccagacctccctacttcctgggccttcacagccaagtgttccgcaatctcctgcaagtagaacaaccattgcaattgagtcattttatta

SEQ ID NO: 53264 - DNA, 5901 bp, Zea Mays
ctgaacttcacagggtgaaataatggcggagccctaccaactgaacggcatactgaacgggatgcctaatttgagtcatccatcctctccatcagaggtcgatgaattctgtaaggcacttggtggtaactcgccaatacacagcgtgctagtcgctaacaatgggatggccgcggtcaagttcatgcgcagcatccggatatgggccctggagacctttgggacagagaaggccattcttttggttgctatggcaactccagaggacttgaagataaacgctgagcacataagaatcgctgatcagttcatagaagttcctggaggaacaaacaataacaactatgcgaatgtacagcttatagtggagattgcagagagaactcgcgtatctgcagtttggcctggctggggtcatgcgtctgagaacccagaacttccagatgctctagatgagaaaggaatcatttttctcggaccaccatcagctgcaatggctgcactgggtgataagattggttcttctcttattgcacaagcagctggagttccaactcttccatggagtggatcacatgtaaaagttccaccagaaagctgccattcaattcccgaggagttatataggaatgcttgtgtttccaccacagaggaagcagtggctagttgtcaggtggttgggtaccctgccatgatcaaggcatcatggggaggcggtggtaaaggaataaggaaggttcataacgatgatgaggtgagggcgctgttcaagcaagttcaaggagaagtccctggctcacctatatttattatgaaagtggcatctcagagccgacatctggaggttcaattgctctgtgataaacatggcaatgtggcagcactgcacagtcgagattgcagtgttcaaagaagacaccaaaagattattgaagaggggccaatcacaattgctgctccagacactgttaaagagcttgagcaggcagcaaggcagcttgctaagtgtgttcaatacgttggtgctgctactgtagaatatctgtacagcatggaaacgggcgagtactattttctggagcttaatccacggttgcaggtagaacatcctgtgactgaatggatagctgaaataaacttgccagcagcccaagttgcagtcggaatgggcatacccctttataacattccagagattagacgcttttatggaatggatcatgggggcggctaccataattggaggacaatatctgctgttgcaactaagtttgatttggataaagcacagtcagtgaggccaaagggccattgtgttgcagttagagttacaagtgaggatcctgatgatgggtttaagcctacaagtggaagagtggagtctggaggagcaattcatgaattttctgattcacagtttggtcatgtttttgcatttggggaatctagatctttggccatagccaatatggtacttgggctgaaagagattcagatccgtggagagatacgcacaaatgttgattacacagtggatctcttgaatgcaacagaataccgcgaaaataagatccatactggttggcttgacagcagaatagctatgcgtgttagagccgagaggcccccatggtacctctcagttgttggaggagctctatatgaagcatcaagcaggagctcaagcgttattactgattatgttggttatctcagcaaaggtcagataccaccaaagcacatatcgcttgtcaatttaactgtaactctgaacatagaggggagcaaatacacgattgagacagtaaggggtggaccccgcagctacaaattaagaatgaatggatcagaaattgaaacagagatacattcactgcgagatggtggacttttaatgcagttggatggaaacagtcatgtaatttatgcagagacagaggctgctggtacacgccttctcattaatggtagaacatgcttactacagaaagaacacgatccttcaaagctattggctgatacaccttgcaaacttttgcggttcttggttgcggatggctctcatgtggatgctgatacaccatatgctgaggtggaagtcatgaaaatgtgcatgccactgttgctgcctgcctctggtgtcattcactttgttatgcctgagggtcaggccatgaaggcgaatgacctgatagcaagattggaccttgatgacccatcttctgtgaggagagccgaaccatttcatggttcctttcccaaactgggacctcctactgctatctctggcaaagttcatcaaaaatttgctgcaagtgtgaattctgcacacatgatccttgcaggatatgaacataatatcaatgaagttgtacaagacctgctaaactgcctagacaaccctgagctcccttttctacaatggcaagaacttatgtctgttttagcaacacgacttccaaaagatcttaggaatgagttggatggtaagtacaaggagtatgaattgaatcctgacttctgcaagagcaaggatttccctgcaagaacaagaaagatcagagattaaatgaccagaggatgttccttcgtaccatagtcagacaaccaagtgcaacaaatagtttcctgacaggtaatattgacaatgaagtagggcacacacaagcttcgtcatcgttcacatcaaacagcattctcagatcattgatgggagcactagaagaaatagagctacatgctcatagtgagactgtgagatcaggccactcacacatgtatctgtgcttactgagagaacaacaattgcatgaactaatcccgttttcaaggatgactggtaaaattgataaggatgaaggaactgtgtgcacacttttgaagcatatggtattgaatttatatgaacatgttggggtcaggatgcatcgtctttctgtgtgccagtgggaagtcaagctctggttggtttgtgatgggcaagctagtggtgcttggagagttgttgttaccaatgttactggccacacatgcaccattgatatttaccgagaagtggaagaccccaccacacatcagcttctctaccactctgccacaacctcggctggtcctttgcatggtgttgcattgaatgaaccatacaagcctttggatgctattgacctcaaacgttatgctgctaggaaaaatgaaaccacatactgctatgattttcccctggcatttgaaacagcgctgaagagatcatggaaatcaagtagctatggtgttagcgaagctaatgagcacaatcgattctatgctgaagtgaaagagcttatatttgctgattcggttggagcatggggcactccattggtttcagttgaacgtcctccaggcatcaatgatattggcatcgttgcttggaacatgaagctgtccacgccagaattcccacgtggccgggagattatagttgttgccaatgatgtgacatttaaagctgggtcctttggtccaagagaagatgcattttttgatgctgttaccaatcttgcctgtgagaggaaacttcctcttatctatctggcagcaactgctggtgccaggcttggtgtagcagaggaaataaagtcatgcttccatgtcggctggtctgattatgagagccctgaacgtgggtttcagtacatttacctcactacacaagattactcacgtctaagctcttcagtaatagctcacgagctgcaactaaaaaatggagaaaccagatgggtggttgataccattgttggtaaagaggatggacttggttgtgagaatctccacggcagtggggcgattgccagcgcatattctaaggcatacaaagagacctttactctgacatttgtgactggaagagctgttggcattggggcttatctggctcgtttaggcatgaggtgtatacaacgtcttgatcaaccaattattttgactgggttttcggcactaaacaagctcctggggcgggaggtgtacagttctcatatgcaattgggtggccccaaaatcatggctacaaatggcgttgtccaccaaactgtgtcagatgaccttgaaggtgtttctgctatcctgaaatggctcagttatgttcctccatatgttggtggtcctcttcccattatgaaacccctggacccacccgaaagaccagtaacatacctccctgagaatgcttgtgatgctcttgcagccatctgtggcattcaggatggtgaagggaggtggttgggtggtatgtttgatagggaaagctttgtggaaacattggaaggttgggcaaaaacagttatcaccggaagagcaaagcttggtggaataccagttggtgtcatagctgtagaaacccagactgtgatgcaagtcatcccagctgatccaggtcagcttgattccgctgagcgcgtagtccctcaagcaggtcaggtttggttcccagattctgcaaccaaaacagctcaggcattactggatttcaaccgtgaggagcttccgctgttcatcctagcaaactggagaggtttctctggtgggcaaagggatttatttgaaggaatccttcaggctggttcaacaattgttgagaatctgaggacatacaagcagcctgcttttgtatatatcccaatgggtggagagctacggggaggggcctgggttgtggtggacagcaagatcaatccagaccacatcgagatgtatgccgagaggactgcgaaagggaatgtccttgagcccgaaggattggtggagatcaaattcaggccaaaggaactggaagattgcatgctaaggcttgacccagaattgattggtctgaatactaggctgaaagagatgaagaaacaaaatgccagcatctcggaaatggagaccatacggaggagtatgactattcggatgaagcagttgatgcctatttatactcaggttgccacacgatttgccgaattgcatgacacctctgctagaatggccgccaaaggtgtgatcggtaaggttgttgattggaaagagtctcgggccttcttctacaggagattgcgaaggagagttgctgaggatgccctggccaaggaagttaaagaagctgctggcgagcagctttcccacagatcagcattagactgtatcaagaaatggtatctagcgtccaaaggaactgaaggtgatggtgaaatgtggaatgatgatgaatctttctttgcttggaaggatgatcccaaaaactatgagaattatcttgaggagttgaaggctgaaagagtatcgaactggttctcgcatcttgctgaaagttcagacgtgaaagctctaccaaacggtctttcgctgctccttaacaagatgaatcctttgaagagggagcaggtcattgatggcctcaggcagcttcttggttgatcgatggtggcaaagtggagcatgaagccctgtttagttgggaacggattgttctggttgtagtcatgtatttagctgtttaacatgtatttaattgggtggcgttactccacgtcatacggtacaacagcaatcctgatcaagtgattatttattcttcaatcgaagtagtacatgattttcatcagtaagctttgtgcttgcaattagggataaaatcggatggaaatgaactgaaaaacactcattttcgtttctatattttttttataaaaatggattctaattcagaaaaaccgtgagcaaaaacataaggttctcggtaaagaagggatttggacagcgcatatattgaaagaccggtaggagatgcaatagagacccgattctcgatttcttgtggaggatttctctattaggaataaaaaacggggaagtttctttctccacatgaatataaac

SEQ ID NO: 53265 - DNA, 7246 bp, Zea Mays
ctgaacttcacagggtgaaataatggcggagccctaccaactgaacggcatactgaacgggatgcctaatttgagtcatccatcctctccatcagaggtcgatgaattctgtaaggcacttggtggtaactcgccaatacacagcgtgctagtcgctaacaatgggatggccgcggtcaagttcatgcgcagcatccggatatgggccctggagacctttgggacagagaaggccattcttttggttgctatggcaactccagaggacttgaagataaacgctgagcacataagaatcgctgatcagttcatagaagttcctggaggaacaaacaataacaactatgcgaatgtacagcttatagtggagattgcagagagaactcgcgtatctgcagtttggcctggctggggtcatgcgtctgagaacccagaacttccagatgctctagatgagaaaggaatcatttttctcggaccaccatcagctgcaatggctgcactgggtgataagattggttcttctcttattgcacaagcagctggagttccaactcttccatggagtggatcacatgtaaaagttccaccagaaagctgccattcaattcccgaggagttatataggaatgcttgtgtttccaccacagaggaagcagtggctagttgtcaggtggttgggtaccctgccatgatcaaggcatcatggggaggcggtggtaaaggaataaggaaggttcataacgatgatgaggtgagggcgctgttcaagcaagttcaaggagaagtccctggctcacctatatttattatgaaagtggcatctcagagccgacatctggaggttcaattgctctgtgataaacatggcaatgtggcagcactgcacagtcgagattgcagtgttcaaagaagacaccaaaagattattgaagaggggccaatcacaattgctgctccagacactgttaaagagcttgagcaggcagcaaggcagcttgctaagtgtgttcaatacgttggtgctgctactgtagaatatctgtacagcatggaaacgggcgagtactattttctggagcttaatccacggttgcaggtagaacatcctgtgactgaatggatagctgaaataaacttgccagcagcccaagttgcagtcggaatgggcatacccctttataacattccagagattagacgcttttatggaatggatcatgggggcggctaccataattggaggacaatatctgctgttgcaactaagtttgatttggataaagcacagtcagtgaggccaaagggccattgtgttgcagttagagttacaagtgaggatcctgatgatgggtttaagcctacaagtggaagagtggagtctggaggagcaattcatgaattttctgattcacagtttggtcatgtttttgcatttggggaatctagatctttggccatagccaatatggtacttgggctgaaagagattcagatccgtggagagatacgcacaaatgttgattacacagtggatctcttgaatgcaacagaataccgcgaaaataagatccatactggttggcttgacagcagaatagctatgcgtgttagagccgagaggcccccatggtacctctcagttgttggaggagctctatatgaagcatcaagcaggagctcaagcgttattactgattatgttggttatctcagcaaaggtcagataccaccaaagcacatatcgcttgtcaatttaactgtaactctgaacatagaggggagcaaatacacgattgagacagtaaggggtggaccccgcagctacaaattaagaatgaatggatcagaaattgaaacagagatacattcactgcgagatggtggacttttaatgcagttggatggaaacagtcatgtaatttatgcagagacagaggctgctggtacacgccttctcattaatggtagaacatgcttactacagaaagaacacgatccttcaaagctattggctgatacaccttgcaaacttttgcggttcttggttgcggatggctctcatgtggatgctgatacaccatatgctgaggtggaagtcatgaaaatgtgcatgccactgttgctgcctgcctctggtgtcattcactttgttatgcctgagggtcaggccatgaaggcgaatgacctgatagcaagattggaccttgatgacccatcttctgtgaggagagccgaaccatttcatggttcctttcccaaactgggacctcctactgctatctctggcaaagttcatcaaaaatttgctgcaagtgtgaattctgcacacatgatccttgcaggatatgaacataatatcaatgaagttgtacaagacctgctaaactgcctagacaaccctgagctcccttttctacaatggcaagaacttatgtctgttttagcaacacgacttccaaaagatcttaggaatgagtttggatgcattcagttggatggtaagtacaaggagtatgaattgaatcctgacttctgcaagagcaaggatttccctgcaaggttgctgaggggggttattgaggcaaatcttgcatactgttcggagaaagatagggttacaaatgagaggcttgtggaaccacttatgagcctggtcaagtcatacgagggtggaagagaaagccatgctcgtgttgttgttaaatctctatttgaggagtatctgtcggttgaagagctcttcaatgataaccttcagtctgatgttatagagcgtctacgccttcaacatgcaaaagaccttgagaaggttgtatacattgtgttctcacatcagggtgtgagaagcaaaaataaattaatactgcggcttatggaagcattggtatatccaaacccatctgcttacagggatcagttgattcgcttctctgccttgaaccatacatcatattctgaactggcacttaaagcaagccaacttcttgagcacactaaattgagtgaacttcgcaccagcatagcaagaagcctttcagagctggagatgtttactgaggaaggagagcgtctgtcaacacctaggagaaagatggcgataaatgagagaatggaagatttagtttgtgctccactggcagctgaagatgcccttgtagctttgttcgatcacagcgatcctactcttcaacggagagtagttgagacatacatacgcagattgtatcagccatatcttgtaagtggaagtatccggatgcaatggcaccgagctggcctaattgccttatgggagttctctgaagagcatcttaagcaaagaagtgggcaagatgtgcccctacagcaagtagaaaatcccattgagaagagttggggcgtcatggttgtaatcaagtctctccagtttgtagcaactgcaattgatgttgcactgaaggagacttcacagtacggaattggtgtcagaagtgtctctaacagtaaccatgtacattctaatcaaagcaatatgcttcatattgctttggttggtatcaataatcagatgagtactctgcaagacagtggtgatgaggatcaaacacaagaaagggtcaacaaactattcaagattttgaaggataatactattacatcacatcttaatggcgctagtgttaaggttgtcagctgtattatccaaagggatgaagggcgtccaccaatgcgacactccttccaatggtctgttgacaaactttattatgaggaggatccaatgcttcgccatgtggaacccccgttgtctacattccttgagctggaaaaagtaaacttagaaggttacaatgaagtaaaatacactccatcacgtgatcgtcagtggcatatttatacgcttatcaagaacaagaaagatcagagattaaatgaccagaggatgttccttcgtaccatagtcagacaaccaagtgcaacaaatagtttcctgacaggtaatattgacaatgaagtagggcacacacaagcttcgtcatcgttcacatcaaacagcattctcagatcattgatgggagcactagaagaaatagagctacatgctcatagtgagactgtgagatcaggccactcacacatgtatctgtgcttactgagagaacaacaattgcatgaactaatcccgttttcaaggatgactggtaaaattgataaggatgaaggaactgtgtgcacacttttgaagcatatggtattgaatttatatgaacatgttggggtcaggatgcatcgtctttctgtgtgccagtgggaagtcaagctctggttggtttgtgatgggcaagctagtggtgcttggagagttgttgttaccaatgttactggccacacatgcaccattgatatttaccgagaagtggaagaccccaccacacatcagcttctctaccactctgccacaacctcggctggtcctttgcatggtgttgcattgaatgaaccatacaagcctttggatgctattgacctcaaacgttatgctgctaggaaaaatgaaaccacatactgctatgattttcccctggcatttgaaacagcgctgaagagatcatggaaatcaagtagctatggtgttagcgaagctaatgagcacaatcgattctatgctgaagtgaaagagcttatatttgctgattcggttggagcatggggcactccattggtttcagttgaacgtcctccaggcatcaatgatattggcatcgttgcttggaacatgaagctgtccacgccagaattcccacgtggccgggagattatagttgttgccaatgatgtgacatttaaagctgggtcctttggtccaagagaagatgcattttttgatgctgttaccaatcttgcctgtgagaggaaacttcctcttatctatctggcagcaactgctggtgccaggcttggtgtagcagaggaaataaagtcatgcttccatgtcggctggtctgattatgagagccctgaacgtgggtttcagtacatttacctcactacacaagattactcacgtctaagctcttcagtaatagctcacgagctgcaactaaaaaatggagaaaccagatgggtggttgataccattgttggtaaagaggatggacttggttgtgagaatctccacggcagtggggcgattgccagcgcatattctaaggcatacaaagagacctttactctgacatttgtgactggaagagctgttggcattggggcttatctggctcgtttaggcatgaggtgtatacaacgtcttgatcaaccaattattttgactgggttttcggcactaaacaagctcctggggcgggaggtgtacagttctcatatgcaattgggtggccccaaaatcatggctacaaatggcgttgtccaccaaactgtgtcagatgaccttgaaggtgtttctgctatcctgaaatggctcagttatgttcctccatatgttggtggtcctcttcccattatgaaacccctggacccacccgaaagaccagtaacatacctccctgagaatgcttgtgatgctcttgcagccatctgtggcattcaggatggtgaagggaggtggttgggtggtatgtttgatagggaaagctttgtggaaacattggaaggttgggcaaaaacagttatcaccggaagagcaaagcttggtggaataccagttggtgtcatagctgtagaaacccagactgtgatgcaagtcatcccagctgatccaggtcagcttgattccgctgagcgcgtagtccctcaagcaggtcaggtttggttcccagattctgcaaccaaaacagctcaggcattactggatttcaaccgtgaggagcttccgctgttcatcctagcaaactggagaggtttctctggtgggcaaagggatttatttgaaggaatccttcaggctggttcaacaattgttgagaatctgaggacatacaagcagcctgcttttgtatatatcccaatgggtggagagctacggggaggggcctgggttgtggtggacagcaagatcaatccagaccacatcgagatgtatgccgagaggactgcgaaagggaatgtccttgagcccgaaggattggtggagatcaaattcaggccaaaggaactggaagattgcatgctaaggcttgacccagaattgattggtctgaatactaggctgaaagagatgaagaaacaaaatgccagcatctcggaaatggagaccatacggaggagtatgactattcggatgaagcagttgatgcctatttatactcaggttgccacacgatttgccgaattgcatgacacctctgctagaatggccgccaaaggtgtgatcggtaaggttgttgattggaaagagtctcgggccttcttctacaggagattgcgaaggagagttgctgaggatgccctggccaaggaagttaaagaagctgctggcgagcagctttcccacagatcagcattagactgtatcaagaaatggtatctagcgtccaaaggaactgaaggtgatggtgaaatgtggaatgatgatgaatctttctttgcttggaaggatgatcccaaaaactatgagaattatcttgaggagttgaaggctgaaagagtatcgaactggttctcgcatcttgctgaaagttcagacgtgaaagctctaccaaacggtctttcgctgctccttaacaagatgaatcctttgaagagggagcaggtcattgatggcctcaggcagcttcttggttgatcgatggtggcaaagtggagcatgaagccctgtttagttgggaacggattgttctggttgtagtcatgtatttagctgtttaacatgtatttaattgggtggcgttactccacgtcatacggtacaacagcaatcctgatcaagtgattatttattcttcaatcgaagtagtacatgattttcatcagtaagctttgtgcttgcaattagggataaaatcggatggaaatgaactgaaaaacactcattttcgtttctatattttttttataaaaatggattctaattcagaaaaaccgtgagcaaaaacataaggttctcggtaaagaagggatttggacagcgcatatattgaaagaccggtaggagatgcaatagagacccgattctcgatttcttgtggaggatttctctattaggaataaaaaacggggaagtttctttctccacatgaatataaac

SEQ ID NO: 53266 - DNA, 7520 bp, Zea Mays
ctttattcacctttcgtgtttgaactcacatctactctcgacttttctctcatcacatacatggtcaacctacttacctttgcgactgtgcttagtaaatcaaaaactgtgtccttgctctccctattctgctggcgtttatgctctatcacgatacaaccagctggtgcagagccatttgatctgcttaaatagccaactctctgctactaacttgctgtcatttcctcacggtggtctgaacttcacagggtgaaataatggcggagccctaccaactgaacggcatactgaacgggatgcctaatttgagtcatccatcctctccatcagaggtcgatgaattctgtaaggcacttggtggtaactcgccaatacacagcgtgctagtcgctaacaatgggatggccgcggtcaagttcatgcgcagcatccggatatgggccctggagacctttgggacagagaaggccattcttttggttgctatggcaactccagaggacttgaagataaacgctgagcacataagaatcgctgatcagttcatagaagttcctggaggaacaaacaataacaactatgcgaatgtacagcttatagtggagattgcagagagaactcgcgtatctgcagtttggcctggctggggtcatgcgtctgagaacccagaacttccagatgctctagatgagaaaggaatcatttttctcggaccaccatcagctgcaatggctgcactgggtgataagattggttcttctcttattgcacaagcagctggagttccaactcttccatggagtggatcacatgtaaaagttccaccagaaagctgccattcaattcccgaggagttatataggaatgcttgtgtttccaccacagaggaagcagtggctagttgtcaggtggttgggtaccctgccatgatcaaggcatcatggggaggcggtggtaaaggaataaggaaggttcataacgatgatgaggtgagggcgctgttcaagcaagttcaaggagaagtccctggctcacctatatttattatgaaagtggcatctcagagccgacatctggaggttcaattgctctgtgataaacatggcaatgtggcagcactgcacagtcgagattgcagtgttcaaagaagacaccaaaagattattgaagaggggccaatcacaattgctgctccagacactgttaaagagcttgagcaggcagcaaggcagcttgctaagtgtgttcaatacgttggtgctgctactgtagaatatctgtacagcatggaaacgggcgagtactattttctggagcttaatccacggttgcaggtagaacatcctgtgactgaatggatagctgaaataaacttgccagcagcccaagttgcagtcggaatgggcatacccctttataacattccagagattagacgcttttatggaatggatcatgggggcggctaccataattggaggacaatatctgctgttgcaactaagtttgatttggataaagcacagtcagtgaggccaaagggccattgtgttgcagttagagttacaagtgaggatcctgatgatgggtttaagcctacaagtggaagagtggaggagttaaactttaaaagcaaaccaaatgtttgggcctatttctctgttaagtctggaggagcaattcatgaattttctgattcacagtttggtcatgtttttgcatttggggaatctagatctttggccatagccaatatggtacttgggctgaaagagattcagatccgtggagagatacgcacaaatgttgattacacagtggatctcttgaatgcaacagaataccgcgaaaataagatccatactggttggcttgacagcagaatagctatgcgtgttagagccgagaggcccccatggtacctctcagttgttggaggagctctatatgaagcatcaagcaggagctcaagcgttattactgattatgttggttatctcagcaaaggtcagataccaccaaagcacatatcgcttgtcaatttaactgtaactctgaacatagaggggagcaaatacacgattgagacagtaaggggtggaccccgcagctacaaattaagaatgaatggatcagaaattgaaacagagatacattcactgcgagatggtggacttttaatgcagttggatggaaacagtcatgtaatttatgcagagacagaggctgctggtacacgccttctcattaatggtagaacatgcttactacagaaagaacacgatccttcaaagctattggctgatacaccttgcaaacttttgcggttcttggttgcggatggctctcatgtggatgctgatacaccatatgctgaggtggaagtcatgaaaatgtgcatgccactgttgctgcctgcctctggtgtcattcactttgttatgcctgagggtcaggccatgaaggcgaatgacctgatagcaagattggaccttgatgacccatcttctgtgaggagagccgaaccatttcatggttcctttcccaaactgggacctcctactgctatctctggcaaagttcatcaaaaatttgctgcaagtgtgaattctgcacacatgatccttgcaggatatgaacataatatcaatgaagttgtacaagacctgctaaactgcctagacaaccctgagctcccttttctacaatggcaagaacttatgtctgttttagcaacacgacttccaaaagatcttaggaatgagttggatggtaagtacaaggagtatgaattgaatcctgacttctgcaagagcaaggatttccctgcaaggttgctgaggggggttattgaggcaaatcttgcatactgttcggagaaagatagggttacaaatgagaggcttgtggaaccacttatgagcctggtcaagtcatacgagggtggaagagaaagccatgctcgtgttgttgttaaatctctatttgaggagtatctgtcggttgaagagctcttcaatgataaccttcagtctgatgttatagagcgtctacgccttcaacatgcaaaagaccttgagaaggttgtatacattgtgttctcacatcagggtgtgagaagcaaaaataaattaatactgcggcttatggaagcattggtatatccaaacccatctgcttacagggatcagttgattcgcttctctgccttgaaccatacatcatattctgaactggcacttaaagcaagccaacttcttgagcacactaaattgagtgaacttcgcaccagcatagcaagaagcctttcagagctggagatgtttactgaggaaggagagcgtctgtcaacacctaggagaaagatggcgataaatgagagaatggaagatttagtttgtgctccactggcagctgaagatgcccttgtagctttgttcgatcacagcgatcctactcttcaacggagagtagttgagacatacatacgcagattgtatcagccatatcttgtaagtggaagtatccggatgcaatggcaccgagctggcctaattgccttatgggagttctctgaagagcatcttaagcaaagaagtgggcaagatgtgcccctacagcaagtagaaaatcccattgagaagagttggggcgtcatggttgtaatcaagtctctccagtttgtagcaactgcaattgatgttgcactgaaggagacttcacagtacggaattggtgtcagaagtgtctctaacagtaaccatgtacattctaatcaaagcaatatgcttcatattgctttggttggtatcaataatcagatgagtactctgcaagacagtggtgatgaggatcaaacacaagaaagggtcaacaaactattcaagattttgaaggataatactattacatcacatcttaatggcgctagtgttaaggttgtcagctgtattatccaaagggatgaagggcgtccaccaatgcgacactccttccaatggtctgttgacaaactttattatgaggaggatccaatgcttcgccatgtggaacccccgttgtctacattccttgagctggaaaaagtaaacttagaaggttacaatgaagtaaaatacactccatcacgtgatcgtcagtggcatatttatacgcttatcaagaacaagaaagatcagagattaaatgaccagaggatgttccttcgtaccatagtcagacaaccaagtgcaacaaatagtttcctgacaggtaatattgacaatgaagtagggcacacacaagcttcgtcatcgttcacatcaaacagcattctcagatcattgatgggagcactagaagaaatagagctacatgctcatagtgagactgtgagatcaggccactcacacatgtatctgtgcttactgagagaacaacaattgcatgaactaatcccgttttcaaggatgactggtaaaattgataaggatgaaggaactgtgtgcacacttttgaagcatatggtattgaatttatatgaacatgttggggtcaggatgcatcgtctttctgtgtgccagtgggaagtcaagctctggttggtttgtgatgggcaagctagtggtgcttggagagttgttgttaccaatgttactggccacacatgcaccattgatatttaccgagaagtggaagaccccaccacacatcagcttctctaccactctgccacaacctcggctggtcctttgcatggtgttgcattgaatgaaccatacaagcctttggatgctattgacctcaaacgttatgctgctaggaaaaatgaaaccacatactgctatgattttcccctggcatttgaaacagcgctgaagagatcatggaaatcaagtagctatggtgttagcgaagctaatgagcacaatcgattctatgctgaagtgaaagagcttatatttgctgattcggttggagcatggggcactccattggtttcagttgaacgtcctccaggcatcaatgatattggcatcgttgcttggaacatgaagctgtccacgccagaattcccacgtggccgggagattatagttgttgccaatgatgtgacatttaaagctgggtcctttggtccaagagaagatgcattttttgatgctgttaccaatcttgcctgtgagaggaaacttcctcttatctatctggcagcaactgctggtgccaggcttggtgtagcagaggaaataaagtcatgcttccatgtcggctggtctgattatgagagccctgaacgtgggtttcagtacatttacctcactacacaagattactcacgtctaagctcttcagtaatagctcacgagctgcaactaaaaaatggagaaaccagatgggtggttgataccattgttggtaaagaggatggacttggttgtgagaatctccacggcagtggggcgattgccagcgcatattctaaggcatacaaagagacctttactctgacatttgtgactggaagagctgttggcattggggcttatctggctcgtttaggcatgaggtgtatacaacgtcttgatcaaccaattattttgactgggttttcggcactaaacaagctcctggggcgggaggtgtacagttctcatatgcaattgggtggccccaaaatcatggctacaaatggcgttgtccaccaaactgtgtcagatgaccttgaaggtgtttctgctatcctgaaatggctcagttatgttcctccatatgttggtggtcctcttcccattatgaaacccctggacccacccgaaagaccagtaacatacctccctgagaatgcttgtgatgctcttgcagccatctgtggcattcaggatggtgaagggaggtggttgggtggtatgtttgatagggaaagctttgtggaaacattggaaggttgggcaaaaacagttatcaccggaagagcaaagcttggtggaataccagttggtgtcatagctgtagaaacccagactgtgatgcaagtcatcccagctgatccaggtcagcttgattccgctgagcgcgtagtccctcaagcaggtcaggtttggttcccagattctgcaaccaaaacagctcaggcattactggatttcaaccgtgaggagcttccgctgttcatcctagcaaactggagaggtttctctggtgggcaaagggatttatttgaaggaatccttcaggctggttcaacaattgttgagaatctgaggacatacaagcagcctgcttttgtatatatcccaatgggtggagagctacggggaggggcctgggttgtggtggacagcaagatcaatccagaccacatcgagatgtatgccgagaggactgcgaaagggaatgtccttgagcccgaaggattggtggagatcaaattcaggccaaaggaactggaagattgcatgctaaggcttgacccagaattgattggtctgaatactaggctgaaagagatgaagaaacaaaatgccagcatctcggaaatggagaccatacggaggagtatgactattcggatgaagcagttgatgcctatttatactcaggttgccacacgatttgccgaattgcatgacacctctgctagaatggccgccaaaggtgtgatcggtaaggttgttgattggaaagagtctcgggccttcttctacaggagattgcgaaggagagttgctgaggatgccctggccaaggaagttaaagaagctgctggcgagcagctttcccacagatcagcattagactgtatcaagaaatggtatctagcgtccaaaggaactgaaggtgatggtgaaatgtggaatgatgatgaatctttctttgcttggaaggatgatcccaaaaactatgagaattatcttgaggagttgaaggctgaaagagtatcgaactggttctcgcatcttgctgaaagttcagacgtgaaagctctaccaaacggtctttcgctgctccttaacaagatgaatcctttgaagagggagcaggtcattgatggcctcaggcagcttcttggttgatcgatggtggcaaagtggagcatgaagccctgtttagttgggaacggattgttctggttgtagtcatgtatttagctgtttaacatgtatttaattgggtggcgttactccacgtcatacggtacaacagcaatcctgatcaagtgattatttattcttcaatcgaagtagtacatgattttcatcagtaagctttgtgcttgcaattagggataaaatcggatggaaatgaactgaaaaacactcattttcgtttctatattttttttataaaaatggattctaattcagaaaaaccgtgagcaaaaacataaggttctcggtaaagaagggatttggacagcgcatatattgaaagaccggtaggagatgcaatagagacccgattctcgatttcttgtggaggatttctctattaggaataaaaaacggggaagtttctttctccacatgaatataaac

SEQ ID NO: 53267 - DNA, 7521 bp, Zea Mays
tctctctctacccggcagctctctggtccaccgctgcgggcagttaaaagccccccgctggcgcggcagctgctgcaggcagcacaagcggcgtcgccacggcccggggcgtaccaccacctccttctgtcgcgcccccctctcccttcccgcggtggctgggagggagcacgcgctgctgtagctcaacggcacgcatttaaggcgccccttggatcgcactgctgcccatatcctactcctccttcctctcctcctcctcctccccctcggcggcgatcggccgaacgcaagccacgcctctgcaactgcgtgcgtggtctgaacttcacagggtgaaataatggcggagccctaccaactgaacggcatactgaacgggatgcctaatttgagtcatccatcctctccatcagaggtcgatgaattctgtaaggcacttggtggtaactcgccaatacacagcgtgctagtcgctaacaatgggatggccgcggtcaagttcatgcgcagcatccggatatgggccctggagacctttgggacagagaaggccattcttttggttgctatggcaactccagaggacttgaagataaacgctgagcacataagaatcgctgatcagttcatagaagttcctggaggaacaaacaataacaactatgcgaatgtacagcttatagtggagattgcagagagaactcgcgtatctgcagtttggcctggctggggtcatgcgtctgagaacccagaacttccagatgctctagatgagaaaggaatcatttttctcggaccaccatcagctgcaatggctgcactgggtgataagattggttcttctcttattgcacaagcagctggagttccaactcttccatggagtggatcacatgtaaaagttccaccagaaagctgccattcaattcccgaggagttatataggaatgcttgtgtttccaccacagaggaagcagtggctagttgtcaggtggttgggtaccctgccatgatcaaggcatcatggggaggcggtggtaaaggaataaggaaggttcataacgatgatgaggtgagggcgctgttcaagcaagttcaaggagaagtccctggctcacctatatttattatgaaagtggcatctcagagccgacatctggaggttcaattgctctgtgataaacatggcaatgtggcagcactgcacagtcgagattgcagtgttcaaagaagacaccaaaagattattgaagaggggccaatcacaattgctgctccagacactgttaaagagcttgagcaggcagcaaggcagcttgctaagtgtgttcaatacgttggtgctgctactgtagaatatctgtacagcatggaaacgggcgagtactattttctggagcttaatccacggttgcaggtagaacatcctgtgactgaatggatagctgaaataaacttgccagcagcccaagttgcagtcggaatgggcatacccctttataacattccagagattagacgcttttatggaatggatcatgggggcggctaccataattggaggacaatatctgctgttgcaactaagtttgatttggataaagcacagtcagtgaggccaaagggccattgtgttgcagttagagttacaagtgaggatcctgatgatgggtttaagcctacaagtggaagagtggagtctggaggagcaattcatgaattttctgattcacagtttggtcatgtttttgcatttggggaatctagatctttggccatagccaatatggtacttgggctgaaagagattcagatccgtggagagatacgcacaaatgttgattacacagtggatctcttgaatgcaacagaataccgcgaaaataagatccatactggttggcttgacagcagaatagctatgcgtgttagagccgagaggcccccatggtacctctcagttgttggaggagctctatatgaagcatcaagcaggagctcaagcgttattactgattatgttggttatctcagcaaaggtcagataccaccaaagcacatatcgcttgtcaatttaactgtaactctgaacatagaggggagcaaatacacgattgagacagtaaggggtggaccccgcagctacaaattaagaatgaatggatcagaaattgaaacagagatacattcactgcgagatggtggacttttaatgcagagacagaggctgctggtacacgccttctcattaatggtagaacatgcttactacagaaagaacacgatccttcaaagctattggctgatacaccttgcaaacttttgcggttcttggttgcggatggctctcatgtggatgctgatacaccatatgctgaggtggaagtcatgaaaatgtgcatgccactgttgctgcctgcctctggtgtcattcactttgttatgcctgagggtcaggccatgaaggcgaatgacctgatagcaagattggaccttgatgacccatcttctgtgaggagagccgaaccatttcatggttcctttcccaaactgggacctcctactgctatctctggcaaagttcatcaaaaatttgctgcaagtgtgaattctgcacacatgatccttgcaggatatgaacataatatcaatgaagttgtacaagacctgctaaactgcctagacaaccctgagctcccttttctacaatggcaagaacttatgtctgttttagcaacacgacttccaaaagatcttaggaatgagttggatggtaagtacaaggagtatgaattgaatcctgacttctgcaagagcaaggatttccctgcaaggttgctgaggggggttattgaggcaaatcttgcatactgttcggagaaagatagggttacaaatgagaggcttgtggaaccacttatgagcctggtcaagtcatacgagggtggaagagaaagccatgctcgtgttgttgttaaatctctatttgaggagtatctgtcggttgaagagctcttcaatgataaccttcagtctgatgttatagagcgtctacgccttcaacatgcaaaagaccttgagaaggttgtatacattgtgttctcacatcagggtgtgagaagcaaaaataaattaatactgcggcttatggaagcattggtatatccaaacccatctgcttacagggatcagttgattcgcttctctgccttgaaccatacatcatattctgaactggcacttaaagcaagccaacttcttgagcacactaaattgagtgaacttcgcaccagcatagcaagaagcctttcagagctggagatgtttactgaggaaggagagcgtctgtcaacacctaggagaaagatggcgataaatgagagaatggaagatttagtttgtgctccactggcagctgaagatgcccttgtagctttgttcgatcacagcgatcctactcttcaacggagagtagttgagacatacatacgcagattgtatcagccatatcttgtaagtggaagtatccggatgcaatggcaccgagctggcctaattgccttatgggagttctctgaagagcatcttaagcaaagaagtgggcaagatgtgcccctacagcaagtagaaaatcccattgagaagagttggggcgtcatggttgtaatcaagtctctccagtttgtagcaactgcaattgatgttgcactgaaggagacttcacagtacggaattggtgtcagaagtgtctctaacagtaaccatgtacattctaatcaaagcaatatgcttcatattgctttggttggtatcaataatcagatgagtactctgcaagacagtggtgatgaggatcaaacacaagaaagggtcaacaaactattcaagattttgaaggataatactattacatcacatcttaatggcgctagtgttaaggttgtcagctgtattatccaaagggatgaagggcgtccaccaatgcgacactccttccaatggtctgttgacaaactttattatgaggaggatccaatgcttcgccatgtggaacccccgttgtctacattccttgagctggaaaaagtaaacttagaaggttacaatgaagtaaaatacactccatcacgtgatcgtcagtggcatatttatacgcttatcaagaacaagaaagatcagagattaaatgaccagaggatgttccttcgtaccatagtcagacaaccaagtgcaacaaatagtttcctgacaggtaatattgacaatgaagtagggcacacacaagcttcgtcatcgttcacatcaaacagcattctcagatcattgatgggagcactagaagaaatagagctacatgctcatagtgagactgtgagatcaggccactcacacatgtatctgtgcttactgagagaacaacaattgcatgaactaatcccgttttcaaggatgactggtaaaattgataaggatgaaggaactgtgtgcacacttttgaagcatatggtattgaatttatatgaacatgttggggtcaggatgcatcgtctttctgtgtgccagtgggaagtcaagctctggttggtttgtgatgggcaagctagtggtgcttggagagttgttgttaccaatgttactggccacacatgcaccattgatatttaccgagaagtggaagaccccaccacacatcagcttctctaccactctgccacaacctcggctggtcctttgcatggtgttgcattgaatgaaccatacaagcctttggatgctattgacctcaaacgttatgctgctaggaaaaatgaaaccacatactgctatgattttcccctggcatttgaaacagcgctgaagagatcatggaaatcaagtagctatggtgttagcgaagctaatgagcacaatcgattctatgctgaagtgaaagagcttatatttgctgattcggttggagcatggggcactccattggtttcagttgaacgtcctccaggcatcaatgatattggcatcgttgcttggaacatgaagctgtccacgccagaattcccacgtggccgggagattatagttgttgccaatgatgtgacatttaaagctgggtcctttggtccaagagaagatgcattttttgatgctgttaccaatcttgcctgtgagaggaaacttcctcttatctatctggcagcaactgctggtgccaggcttggtgtagcagaggaaataaagtcatgcttccatgtcggctggtctgattatgagagccctgaacgtgggtttcagtacatttacctcactacacaagattactcacgtctaagctcttcagtaatagctcacgagctgcaactaaaaaatggagaaaccagatgggtggttgataccattgttggtaaagaggatggacttggttgtgagaatctccacggcagtggggcgattgccagcgcatattctaaggcatacaaagagacctttactctgacatttgtgactggaagagctgttggcattggggcttatctggctcgtttaggcatgaggtgtatacaacgtcttgatcaaccaattattttgactgggttttcggcactaaacaagctcctggggcgggaggtgtacagttctcatatgcaattgggtggccccaaaatcatggctacaaatggcgttgtccaccaaactgtgtcagatgaccttgaaggtgtttctgctatcctgaaatggctcagttatgttcctccatatgttggtggtcctcttcccattatgaaacccctggacccacccgaaagaccagtaacatacctccctgagaatgcttgtgatgctcttgcagccatctgtggcattcaggatggtgaagggaggtggttgggtggtatgtttgatagggaaagctttgtggaaacattggaaggttgggcaaaaacagttatcaccggaagagcaaagcttggtggaataccagttggtgtcatagctgtagaaacccagactgtgatgcaagtcatcccagctgatccaggtcagcttgattccgctgagcgcgtagtccctcaagcaggtcaggtttggttcccagattctgcaaccaaaacagctcaggcattactggatttcaaccgtgaggagcttccgctgttcatcctagcaaactggagaggtttctctggtgggcaaagggatttatttgaaggaatccttcaggctggttcaacaattgttgagaatctgaggacatacaagcagcctgcttttgtatatatcccaatgggtggagagctacggggaggggcctgggttgtggtggacagcaagatcaatccagaccacatcgagatgtatgccgagaggactgcgaaagggaatgtccttgagcccgaaggattggtggagatcaaattcaggccaaaggaactggaagattgcatgctaaggcttgacccagaattgattggtctgaatactaggctgaaagagatgaagaaacaaaatgccagcatctcggaaatggagaccatacggaggagtatgactattcggatgaagcagttgatgcctatttatactcaggttgccacacgatttgccgaattgcatgacacctctgctagaatggccgccaaaggtgtgatcggtaaggttgttgattggaaagagtctcgggccttcttctacaggagattgcgaaggagagttgctgaggatgccctggccaaggaagttaaagaagctgctggcgagcagctttcccacagatcagcattagactgtatcaagaaatggtatctagcgtccaaaggaactgaaggtgatggtgaaatgtggaatgatgatgaatctttctttgcttggaaggatgatcccaaaaactatgagaattatcttgaggagttgaaggctgaaagagtatcgaactggttctcgcatcttgctgaaagttcagacgtgaaagctctaccaaacggtctttcgctgctccttaacaagatgaatcctttgaagagggagcaggtcattgatggcctcaggcagcttcttggttgatcgatggtggcaaagtggagcatgaagccctgtttagttgggaacggattgttctggttgtagtcatgtatttagctgtttaacatgtatttaattgggtggcgttactccacgtcatacggtacaacagcaatcctgatcaagtgattatttattcttcaatcgaagtagtacatgattttcatcagtaagctttgtgcttgcaattagggataaaatcggatggaaatgaactgaaaaacactcattttcgtttctatattttttttataaaaatggattctaattcagaaaaaccgtgagcaaaaacataaggttctcggtaaagaagggatttggacagcgcatatattgaaagaccggtaggagatgcaatagagacccgattctcgatttcttgtggaggatttctctattaggaataaaaaacggggaagtttctttctccacatgaatataaac

SEQ ID NO: 53268 - DNA, 7270 bp, Zea Mays
tctctctctacccggcagctctctggtccaccgctgcgggcagttaaaagccccccgctggcgcggcagctgctgcaggcagcacaagcggcgtcgccacggcccggggcgtaccaccacctccttctgtcgcgcccccctctcccttcccgcggtggctgggagggagcacgcgctgctgtagctcaacggcacgcatttaaggcgccccttggatcgcactgctgcccatatcctactcctccttcctctcctcctcctcctccccctcggcggcgatcggccgaacgcaagccacgcctctgcaactgcgtgcgtggtctgaacttcacagggtgaaataatggcggagccctaccaactgaacggcatactgaacgggatgcctaatttgagtcatccatcctctccatcagaggtcgatgaattctgtaaggcacttggtggtaactcgccaatacacagcgtgctagtcgctaacaatgggatggccgcggtcaagttcatgcgcagcatccggatatgggccctggagacctttgggacagagaaggccattcttttggttgctatggcaactccagaggacttgaagataaacgctgagcacataagaatcgctgatcagttcatagaagttcctggaggaacaaacaataacaactatgcgaatgtacagcttatagtggagattgcagagagaactcgcgtatctgcagtttggcctggctggggtcatgcgtctgagaacccagaacttccagatgctctagatgagaaaggaatcatttttctcggaccaccatcagctgcaatggctgcactgggtgataagattggttcttctcttattgcacaagcagctggagttccaactcttccatggagtggatcacatgtaaaagttccaccagaaagctgccattcaattcccgaggagttatataggaatgcttgtgtttccaccacagaggaagcagtggctagttgtcaggtggttgggtaccctgccatgatcaaggcatcatggggaggcggtggtaaaggaataaggaaggttcataacgatgatgaggtgagggcgctgttcaagcaagttcaaggagaagtccctggctcacctatatttattatgaaagtggcatctcagagccgacatctggaggttcaattgctctgtgataaacatggcaatgtggcagcactgcacagtcgagattgcagtgttcaaagaagacaccaaaagattattgaagaggggccaatcacaattgctgctccagacactgttaaagagcttgagcaggcagcaaggcagcttgctaagtgtgttcaatacgttggtgctgctactgtagaatatctgtacagcatggaaacgggcgagtactattttctggagcttaatccacggttgcaggtagaacatcctgtgactgaatggatagctgaaataaacttgccagcagcccaagttgcagtcggaatgggcatacccctttataacattccagagattagacgcttttatggaatggatcatgggggcggctaccataattggaggacaatatctgctgttgcaactaagtttgatttggataaagcacagtcagtgaggccaaagggccattgtgttgcagttagagttacaagtgaggatcctgatgatgggtttaagcctacaagtggaagagtggaggagttaaactttaaaagcaaaccaaatgtttgggcctatttctctgttaagtctggaggagcaattcatgaattttctgattcacagtttggtcatgtttttgcatttggggaatctagatctttggccatagccaatatggtacttgggctgaaagagattcagatccgtggagagatacgcacaaatgttgattacacagtggatctcttgaatgcaacagaataccgcgaaaataagatccatactggttggcttgacagcagaatagctatgcgtgttagagccgagaggcccccatggtacctctcagttgttggaggagctctatatgaagcatcaagcaggagctcaagcgttattactgattatgttggttatctcagcaaaggtcagataccaccaaagcacatatcgcttgtcaatttaactgtaactctgaacatagaggggagcaaatacacgattgagacagtaaggggtggaccccgcagctacaaattaagaatgaatggatcagaaattgaaacagagatacattcactgcgagatggtggacttttaatgcagttggatggaaacagtcatgtaatttatgcagagacagaggctgctggtacacgccttctcattaatggtagaacatgcttactacagaaagaacacgatccttcaaagctattggctgatacaccttgcaaacttttgcggttcttggttgcggatggctctcatgtggatgctgatacaccatatgctgaggtggaagtcatgaaaatgtgcatgccactgttgctgcctgcctctggtgtcattcactttgttatgcctgagggtcaggccatgaaggcgaatgacctgatagcaagattggaccttgatgacccatcttctgtgaggagagccgaaccatttcatggttcctttcccaaactgggacctcctactgctatctctggcaaagttcatcaaaaatttgctgcaagtgtgaattctgcacacatgatccttgcaggatatgaacataatatcaatgaagttgtacaagacctgctaaactgcctagacaaccctgagctcccttttctacaatggcaagaacttatgtctgttttagcaacacgacttccaaaagatcttaggaatgagttggatggtaagtacaaggagtatgaattgaatcctgacttctgcaagagcaaggatttccctgcaaggttgctgaggggggttattgaggcaaatcttgcatactgttcggagaaagatagggttacaaatgagaggcttgtggaaccacttatgagcctggtcaagtcatacgagggtggaagagaaagccatgctcgtgttgttgttaaatctctatttgaggagtatctgtcggttgaagagctcttcaatgataaccttcagtctgatgttatagagcgtctacgccttcaacatgcaaaagaccttgagaaggttgtatacattgtgttctcacatcagggtgtgagaagcaaaaataaattaatactgcggcttatggaagcattggtatatccaaacccatctgcttacagggatcagttgattcgcttctctgccttgaaccatacatcatattctgaactggcacttaaagcaagccaacttcttgagcacactaaattgagtgaacttcgcaccagcatagcaagaagcctttcagagctggagatgtttactgaggaaggagagcgtctgtcaacacctaggagaaagatggcgataaatgagagaatggaagatttagtttgtgctccactggcagctgaagatgcccttgtagctttgttcgatcacagcgatcctactcttcaacggagagtagttgagacatacatacgcagattgtatcagccatatcttgtaagtggaagtatccggatgcaatggcaccgagctggcctaattgccttatgggagttctctgaagagcatcttaagcaaagaagtgggcaagatgtgcccctacagcaagtagaaaatcccattgagaagagttggggcgtcatggttgtaatcaagtctctccagtttgtagcaactgcaattgatgttgcactgaaggagacttcacagtacggaattggtgtcagaagtgtctctaacagtaaccatgtacattctaatcaaagcaatatgcttcatattgctttggttggtatcaataatcagatgagtactctgcaagacagtggtgatgaggatcaaacacaagaaagggtcaacaaactattcaagattttgaaggataatactattacatcacatcttaatggcgctagtgttaaggttgtcagctgtattatccaaagggatgaagggcgtccaccaatgcgacactccttccaatggtctgttgacaaactttattatgaggaggatccaatgcttcgccatgtggaacccccgttgtctacattccttgagctggaaaaagtaaacttagaaggttacaatgaagtaaaatacactccatcacgtgatcgtcagtggcatatttatacgcttatcaagaacaagaaagatcagagattaaatgaccagaggatgttccttcgtaccatagtcagacaaccaagtgcaacaaatagtttcctgacaggtaatattgacaatgaagtagggcacacacaagcttcgtcatcgttcacatcaaacagcattctcagatcattgatgggagcactagaagaaatagagctacatgctcatagtgagactgtgagatcaggccactcacacatgtatctgtgcttactgagagaacaacaattgcatgaactaatcccgttttcaaggatgactggtaaaattgataaggatgaaggaactgtgtgcacacttttgaagcatatggcatttgaaacagcgctgaagagatcatggaaatcaagtagctatggtgttagcgaagctaatgagcacaatcgattctatgctgaagtgaaagagcttatatttgctgattcggttggagcatggggcactccattggtttcagttgaacgtcctccaggcatcaatgatattggcatcgttgcttggaacatgaagctgtccacgccagaattcccacgtggccgggagattatagttgttgccaatgatgtgacatttaaagctgggtcctttggtccaagagaagatgcattttttgatgctgttaccaatcttgcctgtgagaggaaacttcctcttatctatctggcagcaactgctggtgccaggcttggtgtagcagaggaaataaagtcatgcttccatgtcggctggtctgattatgagagccctgaacgtgggtttcagtacatttacctcactacacaagattactcacgtctaagctcttcagtaatagctcacgagctgcaactaaaaaatggagaaaccagatgggtggttgataccattgttggtaaagaggatggacttggttgtgagaatctccacggcagtggggcgattgccagcgcatattctaaggcatacaaagagacctttactctgacatttgtgactggaagagctgttggcattggggcttatctggctcgtttaggcatgaggtgtatacaacgtcttgatcaaccaattattttgactgggttttcggcactaaacaagctcctggggcgggaggtgtacagttctcatatgcaattgggtggccccaaaatcatggctacaaatggcgttgtccaccaaactgtgtcagatgaccttgaaggtgtttctgctatcctgaaatggctcagttatgttcctccatatgttggtggtcctcttcccattatgaaacccctggacccacccgaaagaccagtaacatacctccctgagaatgcttgtgatgctcttgcagccatctgtggcattcaggatggtgaagggaggtggttgggtggtatgtttgatagggaaagctttgtggaaacattggaaggttgggcaaaaacagttatcaccggaagagcaaagcttggtggaataccagttggtgtcatagctgtagaaacccagactgtgatgcaagtcatcccagctgatccaggtcagcttgattccgctgagcgcgtagtccctcaagcaggtcaggtttggttcccagattctgcaaccaaaacagctcaggcattactggatttcaaccgtgaggagcttccgctgttcatcctagcaaactggagaggtttctctggtgggcaaagggatttatttgaaggaatccttcaggctggttcaacaattgttgagaatctgaggacatacaagcagcctgcttttgtatatatcccaatgggtggagagctacggggaggggcctgggttgtggtggacagcaagatcaatccagaccacatcgagatgtatgccgagaggactgcgaaagggaatgtccttgagcccgaaggattggtggagatcaaattcaggccaaaggaactggaagattgcatgctaaggcttgacccagaattgattggtctgaatactaggctgaaagagatgaagaaacaaaatgccagcatctcggaaatggagaccatacggaggagtatgactattcggatgaagcagttgatgcctatttatactcaggttgccacacgatttgccgaattgcatgacacctctgctagaatggccgccaaaggtgtgatcggtaaggttgttgattggaaagagtctcgggccttcttctacaggagattgcgaaggagagttgctgaggatgccctggccaaggaagttaaagaagctgctggcgagcagctttcccacagatcagcattagactgtatcaagaaatggtatctagcgtccaaaggaactgaaggtgatggtgaaatgtggaatgatgatgaatctttctttgcttggaaggatgatcccaaaaactatgagaattatcttgaggagttgaaggctgaaagagtatcgaactggttctcgcatcttgctgaaagttcagacgtgaaagctctaccaaacggtctttcgctgctccttaacaagatgaatcctttgaagagggagcaggtcattgatggcctcaggcagcttcttggttgatcgatggtggcaaagtggagcatgaagccctgtttagttgggaacggattgttctggttgtagtcatgtatttagctgtttaacatgtatttaattgggtggcgttactccacgtcatacggtacaacagcaatcctgatcaagtgattatttattcttcaatcgaagtagtacatgattttcatcagtaagctttgtgcttgcaattagggataaaatcggatggaaatgaactgaaaaacactcattttcgtttctatattttttttataaaaatggattctaattcagaaaaaccgtgagcaaaaacataaggttctcggtaaagaagggatttggacagcgcatatattgaaagaccggtaggagatgcaatagagacccgattctcgatttcttgtggaggatttctctattaggaataaaaaacggggaagtttctttctccacatgaatataaac

SEQ ID NO: 53269 - DNA, 7603 bp, Zea Mays
tctctctctacccggcagctctctggtccaccgctgcgggcagttaaaagccccccgctggcgcggcagctgctgcaggcagcacaagcggcgtcgccacggcccggggcgtaccaccacctccttctgtcgcgcccccctctcccttcccgcggtggctgggagggagcacgcgctgctgtagctcaacggcacgcatttaaggcgccccttggatcgcactgctgcccatatcctactcctccttcctctcctcctcctcctccccctcggcggcgatcggccgaacgcaagccacgcctctgcaactgcgtgcgtggtctgaacttcacagggtgaaataatggcggagccctaccaactgaacggcatactgaacgggatgcctaatttgagtcatccatcctctccatcagaggtcgatgaattctgtaaggcacttggtggtaactcgccaatacacagcgtgctagtcgctaacaatgggatggccgcggtcaagttcatgcgcagcatccggatatgggccctggagacctttgggacagagaaggccattcttttggttgctatggcaactccagaggacttgaagataaacgctgagcacataagaatcgctgatcagttcatagaagttcctggaggaacaaacaataacaactatgcgaatgtacagcttatagtggagattgcagagagaactcgcgtatctgcagtttggcctggctggggtcatgcgtctgagaacccagaacttccagatgctctagatgagaaaggaatcatttttctcggaccaccatcagctgcaatggctgcactgggtgataagattggttcttctcttattgcacaagcagctggagttccaactcttccatggagtggatcacatgtaaaagttccaccagaaagctgccattcaattcccgaggagttatataggaatgcttgtgtttccaccacagaggaagcagtggctagttgtcaggtggttgggtaccctgccatgatcaaggcatcatggggaggcggtggtaaaggaataaggaaggttcataacgatgatgaggtgagggcgctgttcaagcaagttcaaggagaagtccctggctcacctatatttattatgaaagtggcatctcagagccgacatctggaggttcaattgctctgtgataaacatggcaatgtggcagcactgcacagtcgagattgcagtgttcaaagaagacaccaaaagattattgaagaggggccaatcacaattgctgctccagacactgttaaagagcttgagcaggcagcaaggcagcttgctaagtgtgttcaatacgttggtgctgctactgtagaatatctgtacagcatggaaacgggcgagtactattttctggagcttaatccacggttgcaggtagaacatcctgtgactgaatggatagctgaaataaacttgccagcagcccaagttgcagtcggaatgggcatacccctttataacattccagagattagacgcttttatggaatggatcatgggggcggctaccataattggaggacaatatctgctgttgcaactaagtttgatttggataaagcacagtcagtgaggccaaagggccattgtgttgcagttagagttacaagtgaggatcctgatgatgggtttaagcctacaagtggaagagtggaggagttaaactttaaaagcaaaccaaatgtttgggcctatttctctgttaagtctggaggagcaattcatgaattttctgattcacagtttggtcatgtttttgcatttggggaatctagatctttggccatagccaatatggtacttgggctgaaagagattcagatccgtggagagatacgcacaaatgttgattacacagtggatctcttgaatgcaacagaataccgcgaaaataagatccatactggttggcttgacagcagaatagctatgcgtgttagagccgagaggcccccatggtacctctcagttgttggaggagctctatatgaagcatcaagcaggagctcaagcgttattactgattatgttggttatctcagcaaaggtcagataccaccaaagcacatatcgcttgtcaatttaactgtaactctgaacatagaggggagcaaatacacgattgagacagtaaggggtggaccccgcagctacaaattaagaatgaatggatcagaaattgaaacagagatacattcactgcgagatggtggacttttaatgcagttggatggaaacagtcatgtaatttatgcagagacagaggctgctggtacacgccttctcattaatggtagaacatgcttactacagaaagaacacgatccttcaaagctattggctgatacaccttgcaaacttttgcggttcttggttgcggatggctctcatgtggatgctgatacaccatatgctgaggtggaagtcatgaaaatgtgcatgccactgttgctgcctgcctctggtgtcattcactttgttatgcctgagggtcaggccatgaaggcgaatgacctgatagcaagattggaccttgatgacccatcttctgtgaggagagccgaaccatttcatggttcctttcccaaactgggacctcctactgctatctctggcaaagttcatcaaaaatttgctgcaagtgtgaattctgcacacatgatccttgcaggatatgaacataatatcaatgaagttgtacaagacctgctaaactgcctagacaaccctgagctcccttttctacaatggcaagaacttatgtctgttttagcaacacgacttccaaaagatcttaggaatgagttggatggtaagtacaaggagtatgaattgaatcctgacttctgcaagagcaaggatttccctgcaaggttgctgaggggggttattgaggcaaatcttgcatactgttcggagaaagatagggttacaaatgagaggcttgtggaaccacttatgagcctggtcaagtcatacgagggtggaagagaaagccatgctcgtgttgttgttaaatctctatttgaggagtatctgtcggttgaagagctcttcaatgataaccttcagtctgatgttatagagcgtctacgccttcaacatgcaaaagaccttgagaaggttgtatacattgtgttctcacatcagggtgtgagaagcaaaaataaattaatactgcggcttatggaagcattggtatatccaaacccatctgcttacagggatcagttgattcgcttctctgccttgaaccatacatcatattctgaactggcacttaaagcaagccaacttcttgagcacactaaattgagtgaacttcgcaccagcatagcaagaagcctttcagagctggagatgtttactgaggaaggagagcgtctgtcaacacctaggagaaagatggcgataaatgagagaatggaagatttagtttgtgctccactggcagctgaagatgcccttgtagctttgttcgatcacagcgatcctactcttcaacggagagtagttgagacatacatacgcagattgtatcagccatatcttgtaagtggaagtatccggatgcaatggcaccgagctggcctaattgccttatgggagttctctgaagagcatcttaagcaaagaagtgggcaagatgtgcccctacagcaagtagaaaatcccattgagaagagttggggcgtcatggttgtaatcaagtctctccagtttgtagcaactgcaattgatgttgcactgaaggagacttcacagtacggaattggtgtcagaagtgtctctaacagtaaccatgtacattctaatcaaagcaatatgcttcatattgctttggttggtatcaataatcagatgagtactctgcaagacagtggtgatgaggatcaaacacaagaaagggtcaacaaactattcaagattttgaaggataatactattacatcacatcttaatggcgctagtgttaaggttgtcagctgtattatccaaagggatgaagggcgtccaccaatgcgacactccttccaatggtctgttgacaaactttattatgaggaggatccaatgcttcgccatgtggaacccccgttgtctacattccttgagctggaaaaagtaaacttagaaggttacaatgaagtaaaatacactccatcacgtgatcgtcagtggcatatttatacgcttatcaagaacaagaaagatcagagattaaatgaccagaggatgttccttcgtaccatagtcagacaaccaagtgcaacaaatagtttcctgacaggtaatattgacaatgaagtagggcacacacaagcttcgtcatcgttcacatcaaacagcattctcagatcattgatgggagcactagaagaaatagagctacatgctcatagtgagactgtgagatcaggccactcacacatgtatctgtgcttactgagagaacaacaattgcatgaactaatcccgttttcaaggatgactggtaaaattgataaggatgaaggaactgtgtgcacacttttgaagcatatggtattgaatttatatgaacatgttggggtcaggatgcatcgtctttctgtgtgccagtgggaagtcaagctctggttggtttgtgatgggcaagctagtggtgcttggagagttgttgttaccaatgttactggccacacatgcaccattgatatttaccgagaagtggaagaccccaccacacatcagcttctctaccactctgccacaacctcggctggtcctttgcatggtgttgcattgaatgaaccatacaagcctttggatgctattgacctcaaacgttatgctgctaggaaaaatgaaaccacatactgctatgattttcccctggcatttgaaacagcgctgaagagatcatggaaatcaagtagctatggtgttagcgaagctaatgagcacaatcgattctatgctgaagtgaaagagcttatatttgctgattcggttggagcatggggcactccattggtttcagttgaacgtcctccaggcatcaatgatattggcatcgttgcttggaacatgaagctgtccacgccagaattcccacgtggccgggagattatagttgttgccaatgatgtgacatttaaagctgggtcctttggtccaagagaagatgcattttttgatgctgttaccaatcttgcctgtgagaggaaacttcctcttatctatctggcagcaactgctggtgccaggcttggtgtagcagaggaaataaagtcatgcttccatgtcggctggtctgattatgagagccctgaacgtgggtttcagtacatttacctcactacacaagattactcacgtctaagctcttcagtaatagctcacgagctgcaactaaaaaatggagaaaccagatgggtggttgataccattgttggtaaagaggatggacttggttgtgagaatctccacggcagtggggcgattgccagcgcatattctaaggcatacaaagagacctttactctgacatttgtgactggaagagctgttggcattggggcttatctggctcgtttaggcatgaggtgtatacaacgtcttgatcaaccaattattttgactgggttttcggcactaaacaagctcctggggcgggaggtgtacagttctcatatgcaattgggtggccccaaaatcatggctacaaatggcgttgtccaccaaactgtgtcagatgaccttgaaggtgtttctgctatcctgaaatggctcagttatgttcctccatatgttggtggtcctcttcccattatgaaacccctggacccacccgaaagaccagtaacatacctccctgagaatgcttgtgatgctcttgcagccatctgtggcattcaggatggtgaagggaggtggttgggtggtatgtttgatagggaaagctttgtggaaacattggaaggttgggcaaaaacagttatcaccggaagagcaaagcttggtggaataccagttggtgtcatagctgtagaaacccagactgtgatgcaagtcatcccagctgatccaggtcagcttgattccgctgagcgcgtagtccctcaagcaggtcaggtttggttcccagattctgcaaccaaaacagctcaggcattactggatttcaaccgtgaggagcttccgctgttcatcctagcaaactggagaggtttctctggtgggcaaagggatttatttgaaggaatccttcaggctggttcaacaattgttgagaatctgaggacatacaagcagcctgcttttgtatatatcccaatgggtggagagctacggggaggggcctgggttgtggtggacagcaagatcaatccagaccacatcgagatgtatgccgagaggactgcgaaagggaatgtccttgagcccgaaggattggtggagatcaaattcaggccaaaggaactggaagattgcatgctaaggcttgacccagaattgattggtctgaatactaggctgaaagagatgaagaaacaaaatgccagcatctcggaaatggagaccatacggaggagtatgactattcggatgaagcagttgatgcctatttatactcaggttgccacacgatttgccgaattgcatgacacctctgctagaatggccgccaaaggtgtgatcggtaaggttgttgattggaaagagtctcgggccttcttctacaggagattgcgaaggagagttgctgaggatgccctggccaaggaagttaaagaagctgctggcgagcagctttcccacagatcagcattagactgtatcaagaaatggtatctagcgtccaaaggaactgaaggtgatggtgaaatgtggaatgatgatgaatctttctttgcttggaaggatgatcccaaaaactatgagaattatcttgaggagttgaaggctgaaagagtatcgaactggttctcgcatcttgctgaaagttcagacgtgaaagctctaccaaacggtctttcgctgctccttaacaagatgaatcctttgaagagggagcaggtcattgatggcctcaggcagcttcttggttgatcgatggtggcaaagtggagcatgaagccctgtttagttgggaacggattgttctggttgtagtcatgtatttagctgtttaacatgtatttaattgggtggcgttactccacgtcatacggtacaacagcaatcctgatcaagtgattatttattcttcaatcgaagtagtacatgattttcatcagtaagctttgtgcttgcaattagggataaaatcggatggaaatgaactgaaaaacactcattttcgtttctatattttttttataaaaatggattctaattcagaaaaaccgtgagcaaaaacataaggttctcggtaaagaagggatttggacagcgcatatattgaaagaccggtaggagatgcaatagagacccgattctcgatttcttgtggaggatttctctattaggaataaaaaacggggaagtttctttctccacatgaatataaac

SEQ ID NO: 53270 - DNA, 7586 bp, Zea Mays
tctctctctacccggcagctctctggtccaccgctgcgggcagttaaaagccccccgctggcgcggcagctgctgcaggcagcacaagcggcgtcgccacggcccggggcgtaccaccacctccttctgtcgcgcccccctctcccttcccgcggtggctgggagggagcacgcgctgctgtagctcaacggcacgcatttaaggcgccccttggatcgcactgctgcccatatcctactcctccttcctctcctcctcctcctccccctcggcggcgatcggccgaacgcaagccacgcctctgcaactgcgtgcgtggtctgaacttcacagggtgaaataatggcggagccctaccaactgaacggcatactgaacgggatgcctaatttgagtcatccatcctctccatcagaggtcgatgaattctgtaaggcacttggtggtaactcgccaatacacagcgtgctagtcgctaacaatgggatggccgcggtcaagttcatgcgcagcatccggatatgggccctggagacctttgggacagagaaggccattcttttggttgctatggcaactccagaggacttgaagataaacgctgagcacataagaatcgctgatcagttcatagaagttcctggaggaacaaacaataacaactatgcgaatgtacagcttatagtggagattgcagagagaactcgcgtatctgcagtttggcctggctggggtcatgcgtctgagaacccagaacttccagatgctctagatgagaaaggaatcatttttctcggaccaccatcagctgcaatggctgcactgggtgataagattggttcttctcttattgcacaagcagctggagttccaactcttccatggagtggatcacatgtaaaagttccaccagaaagctgccattcaattcccgaggagttatataggaatgcttgtgtttccaccacagaggaagcagtggctagttgtcaggtggttgggtaccctgccatgatcaaggcatcatggggaggcggtggtaaaggaataaggaaggttcataacgatgatgaggtgagggcgctgttcaagcaagttcaaggagaagtccctggctcacctatatttattatgaaagtggcatctcagagccgacatctggaggttcaattgctctgtgataaacatggcaatgtggcagcactgcacagtcgagattgcagtgttcaaagaagacaccaaaagattattgaagaggggccaatcacaattgctgctccagacactgttaaagagcttgagcaggcagcaaggcagcttgctaagtgtgttcaatacgttggtgctgctactgtagaatatctgtacagcatggaaacgggcgagtactattttctggagcttaatccacggttgcaggtagaacatcctgtgactgaatggatagctgaaataaacttgccagcagcccaagttgcagtcggaatgggcatacccctttataacattccagagattagacgcttttatggaatggatcatgggggcggctaccataattggaggacaatatctgctgttgcaactaagtttgatttggataaagcacagtcagtgaggccaaagggccattgtgttgcagttagagttacaagtgaggatcctgatgatgggtttaagcctacaagtggaagagtggaggagttaaactttaaaagcaaaccaaatgtttgggcctatttctctgttaagtctggaggagcaattcatgaattttctgattcacagtttggtcatgtttttgcatttggggaatctagatctttggccatagccaatatggtacttgggctgaaagagattcagatccgtggagagatacgcacaaatgttgattacacagtggatctcttgaatgcaacagaataccgcgaaaataagatccatactggttggcttgacagcagaatagctatgcgtgttagagccgagaggcccccatggtacctctcagttgttggaggagctctatatgaagcatcaagcaggagctcaagcgttattactgattatgttggttatctcagcaaagcacatatcgcttgtcaatttaactgtaactctgaacatagaggggagcaaatacacgattgagacagtaaggggtggaccccgcagctacaaattaagaatgaatggatcagaaattgaaacagagatacattcactgcgagatggtggacttttaatgcagttggatggaaacagtcatgtaatttatgcagagacagaggctgctggtacacgccttctcattaatggtagaacatgcttactacagaaagaacacgatccttcaaagctattggctgatacaccttgcaaacttttgcggttcttggttgcggatggctctcatgtggatgctgatacaccatatgctgaggtggaagtcatgaaaatgtgcatgccactgttgctgcctgcctctggtgtcattcactttgttatgcctgagggtcaggccatgaaggcgaatgacctgatagcaagattggaccttgatgacccatcttctgtgaggagagccgaaccatttcatggttcctttcccaaactgggacctcctactgctatctctggcaaagttcatcaaaaatttgctgcaagtgtgaattctgcacacatgatccttgcaggatatgaacataatatcaatgaagttgtacaagacctgctaaactgcctagacaaccctgagctcccttttctacaatggcaagaacttatgtctgttttagcaacacgacttccaaaagatcttaggaatgagttggatggtaagtacaaggagtatgaattgaatcctgacttctgcaagagcaaggatttccctgcaaggttgctgaggggggttattgaggcaaatcttgcatactgttcggagaaagatagggttacaaatgagaggcttgtggaaccacttatgagcctggtcaagtcatacgagggtggaagagaaagccatgctcgtgttgttgttaaatctctatttgaggagtatctgtcggttgaagagctcttcaatgataaccttcagtctgatgttatagagcgtctacgccttcaacatgcaaaagaccttgagaaggttgtatacattgtgttctcacatcagggtgtgagaagcaaaaataaattaatactgcggcttatggaagcattggtatatccaaacccatctgcttacagggatcagttgattcgcttctctgccttgaaccatacatcatattctgaactggcacttaaagcaagccaacttcttgagcacactaaattgagtgaacttcgcaccagcatagcaagaagcctttcagagctggagatgtttactgaggaaggagagcgtctgtcaacacctaggagaaagatggcgataaatgagagaatggaagatttagtttgtgctccactggcagctgaagatgcccttgtagctttgttcgatcacagcgatcctactcttcaacggagagtagttgagacatacatacgcagattgtatcagccatatcttgtaagtggaagtatccggatgcaatggcaccgagctggcctaattgccttatgggagttctctgaagagcatcttaagcaaagaagtgggcaagatgtgcccctacagcaagtagaaaatcccattgagaagagttggggcgtcatggttgtaatcaagtctctccagtttgtagcaactgcaattgatgttgcactgaaggagacttcacagtacggaattggtgtcagaagtgtctctaacagtaaccatgtacattctaatcaaagcaatatgcttcatattgctttggttggtatcaataatcagatgagtactctgcaagacagtggtgatgaggatcaaacacaagaaagggtcaacaaactattcaagattttgaaggataatactattacatcacatcttaatggcgctagtgttaaggttgtcagctgtattatccaaagggatgaagggcgtccaccaatgcgacactccttccaatggtctgttgacaaactttattatgaggaggatccaatgcttcgccatgtggaacccccgttgtctacattccttgagctggaaaaagtaaacttagaaggttacaatgaagtaaaatacactccatcacgtgatcgtcagtggcatatttatacgcttatcaagaacaagaaagatcagagattaaatgaccagaggatgttccttcgtaccatagtcagacaaccaagtgcaacaaatagtttcctgacaggtaatattgacaatgaagtagggcacacacaagcttcgtcatcgttcacatcaaacagcattctcagatcattgatgggagcactagaagaaatagagctacatgctcatagtgagactgtgagatcaggccactcacacatgtatctgtgcttactgagagaacaacaattgcatgaactaatcccgttttcaaggatgactggtaaaattgataaggatgaaggaactgtgtgcacacttttgaagcatatggtattgaatttatatgaacatgttggggtcaggatgcatcgtctttctgtgtgccagtgggaagtcaagctctggttggtttgtgatgggcaagctagtggtgcttggagagttgttgttaccaatgttactggccacacatgcaccattgatatttaccgagaagtggaagaccccaccacacatcagcttctctaccactctgccacaacctcggctggtcctttgcatggtgttgcattgaatgaaccatacaagcctttggatgctattgacctcaaacgttatgctgctaggaaaaatgaaaccacatactgctatgattttcccctggcatttgaaacagcgctgaagagatcatggaaatcaagtagctatggtgttagcgaagctaatgagcacaatcgattctatgctgaagtgaaagagcttatatttgctgattcggttggagcatggggcactccattggtttcagttgaacgtcctccaggcatcaatgatattggcatcgttgcttggaacatgaagctgtccacgccagaattcccacgtggccgggagattatagttgttgccaatgatgtgacatttaaagctgggtcctttggtccaagagaagatgcattttttgatgctgttaccaatcttgcctgtgagaggaaacttcctcttatctatctggcagcaactgctggtgccaggcttggtgtagcagaggaaataaagtcatgcttccatgtcggctggtctgattatgagagccctgaacgtgggtttcagtacatttacctcactacacaagattactcacgtctaagctcttcagtaatagctcacgagctgcaactaaaaaatggagaaaccagatgggtggttgataccattgttggtaaagaggatggacttggttgtgagaatctccacggcagtggggcgattgccagcgcatattctaaggcatacaaagagacctttactctgacatttgtgactggaagagctgttggcattggggcttatctggctcgtttaggcatgaggtgtatacaacgtcttgatcaaccaattattttgactgggttttcggcactaaacaagctcctggggcgggaggtgtacagttctcatatgcaattgggtggccccaaaatcatggctacaaatggcgttgtccaccaaactgtgtcagatgaccttgaaggtgtttctgctatcctgaaatggctcagttatgttcctccatatgttggtggtcctcttcccattatgaaacccctggacccacccgaaagaccagtaacatacctccctgagaatgcttgtgatgctcttgcagccatctgtggcattcaggatggtgaagggaggtggttgggtggtatgtttgatagggaaagctttgtggaaacattggaaggttgggcaaaaacagttatcaccggaagagcaaagcttggtggaataccagttggtgtcatagctgtagaaacccagactgtgatgcaagtcatcccagctgatccaggtcagcttgattccgctgagcgcgtagtccctcaagcaggtcaggtttggttcccagattctgcaaccaaaacagctcaggcattactggatttcaaccgtgaggagcttccgctgttcatcctagcaaactggagaggtttctctggtgggcaaagggatttatttgaaggaatccttcaggctggttcaacaattgttgagaatctgaggacatacaagcagcctgcttttgtatatatcccaatgggtggagagctacggggaggggcctgggttgtggtggacagcaagatcaatccagaccacatcgagatgtatgccgagaggactgcgaaagggaatgtccttgagcccgaaggattggtggagatcaaattcaggccaaaggaactggaagattgcatgctaaggcttgacccagaattgattggtctgaatactaggctgaaagagatgaagaaacaaaatgccagcatctcggaaatggagaccatacggaggagtatgactattcggatgaagcagttgatgcctatttatactcaggttgccacacgatttgccgaattgcatgacacctctgctagaatggccgccaaaggtgtgatcggtaaggttgttgattggaaagagtctcgggccttcttctacaggagattgcgaaggagagttgctgaggatgccctggccaaggaagttaaagaagctgctggcgagcagctttcccacagatcagcattagactgtatcaagaaatggtatctagcgtccaaaggaactgaaggtgatggtgaaatgtggaatgatgatgaatctttctttgcttggaaggatgatcccaaaaactatgagaattatcttgaggagttgaaggctgaaagagtatcgaactggttctcgcatcttgctgaaagttcagacgtgaaagctctaccaaacggtctttcgctgctccttaacaagatgaatcctttgaagagggagcaggtcattgatggcctcaggcagcttcttggttgatcgatggtggcaaagtggagcatgaagccctgtttagttgggaacggattgttctggttgtagtcatgtatttagctgtttaacatgtatttaattgggtggcgttactccacgtcatacggtacaacagcaatcctgatcaagtgattatttattcttcaatcgaagtagtacatgattttcatcagtaagctttgtgcttgcaattagggataaaatcggatggaaatgaactgaaaaacactcattttcgtttctatattttttttataaaaatggattctaattcagaaaaaccgtgagcaaaaacataaggttctcggtaaagaagggatttggacagcgcatatattgaaagaccggtaggagatgcaatagagacccgattctcgatttcttgtggaggatttctctattaggaataaaaaacggggaagtttctttctccacatgaatataaac

SEQ ID NO: 53271 - DNA, 7681 bp, Zea Mays
gtcaaattccatctctctcctcaccacactcctgtcctgttgttgccacatgccagtctcctcctcatcacgccttccgccttctctctctacccggcagctctctggtccaccgctgcgggcagttaaaagccccccgctggcgcggcagctgctgcaggcagcacaagcggcgtcgccacggcccggggcgtaccaccacctccttctgtcgcgcccccctctcccttcccgcggtggctgggagggagcacgcgctgctgtagctcaacggcacgcatttaaggcgccccttggatcgcactgctgcccatatcctactcctccttcctctcctcctcctcctccccctcggcggcgatcggccgaacgcaagccacgcctctgcaactgcgtggtctgaacttcacagggtgaaataatggcggagccctaccaactgaacggcatactgaacgggatgcctaatttgagtcatccatcctctccatcagaggtcgatgaattctgtaaggcacttggtggtaactcgccaatacacagcgtgctagtcgctaacaatgggatggccgcggtcaagttcatgcgcagcatccggatatgggccctggagacctttgggacagagaaggccattcttttggttgctatggcaactccagaggacttgaagataaacgctgagcacataagaatcgctgatcagttcatagaagttcctggaggaacaaacaataacaactatgcgaatgtacagcttatagtggagattgcagagagaactcgcgtatctgcagtttggcctggctggggtcatgcgtctgagaacccagaacttccagatgctctagatgagaaaggaatcatttttctcggaccaccatcagctgcaatggctgcactgggtgataagattggttcttctcttattgcacaagcagctggagttccaactcttccatggagtggatcacatgtaaaagttccaccagaaagctgccattcaattcccgaggagttatataggaatgcttgtgtttccaccacagaggaagcagtggctagttgtcaggtggttgggtaccctgccatgatcaaggcatcatggggaggcggtggtaaaggaataaggaaggttcataacgatgatgaggtgagggcgctgttcaagcaagttcaaggagaagtccctggctcacctatatttattatgaaagtggcatctcagagccgacatctggaggttcaattgctctgtgataaacatggcaatgtggcagcactgcacagtcgagattgcagtgttcaaagaagacaccaaaagattattgaagaggggccaatcacaattgctgctccagacactgttaaagagcttgagcaggcagcaaggcagcttgctaagtgtgttcaatacgttggtgctgctactgtagaatatctgtacagcatggaaacgggcgagtactattttctggagcttaatccacggttgcaggtagaacatcctgtgactgaatggatagctgaaataaacttgccagcagcccaagttgcagtcggaatgggcatacccctttataacattccagagattagacgcttttatggaatggatcatgggggcggctaccataattggaggacaatatctgctgttgcaactaagtttgatttggataaagcacagtcagtgaggccaaagggccattgtgttgcagttagagttacaagtgaggatcctgatgatgggtttaagcctacaagtggaagagtggaggagttaaactttaaaagcaaaccaaatgtttgggcctatttctctgttaagtctggaggagcaattcatgaattttctgattcacagtttggtcatgtttttgcatttggggaatctagatctttggccatagccaatatggtacttgggctgaaagagattcagatccgtggagagatacgcacaaatgttgattacacagtggatctcttgaatgcaacagaataccgcgaaaataagatccatactggttggcttgacagcagaatagctatgcgtgttagagccgagaggcccccatggtacctctcagttgttggaggagctctatatgaagcatcaagcaggagctcaagcgttattactgattatgttggttatctcagcaaaggtcagataccaccaaagcacatatcgcttgtcaatttaactgtaactctgaacatagaggggagcaaatacacgattgagacagtaaggggtggaccccgcagctacaaattaagaatgaatggatcagaaattgaaacagagatacattcactgcgagatggtggacttttaatgcagttggatggaaacagtcatgtaatttatgcagagacagaggctgctggtacacgccttctcattaatggtagaacatgcttactacagaaagaacacgatccttcaaagctattggctgatacaccttgcaaacttttgcggttcttggttgcggatggctctcatgtggatgctgatacaccatatgctgaggtggaagtcatgaaaatgtgcatgccactgttgctgcctgcctctggtgtcattcactttgttatgcctgagggtcaggccatgaaggcgaatgacctgatagcaagattggaccttgatgacccatcttctgtgaggagagccgaaccatttcatggttcctttcccaaactgggacctcctactgctatctctggcaaagttcatcaaaaatttgctgcaagtgtgaattctgcacacatgatccttgcaggatatgaacataatatcaatgaagttgtacaagacctgctaaactgcctagacaaccctgagctcccttttctacaatggcaagaacttatgtctgttttagcaacacgacttccaaaagatcttaggaatgagttggatggtaagtacaaggagtatgaattgaatcctgacttctgcaagagcaaggatttccctgcaaggttgctgaggggggttattgaggcaaatcttgcatactgttcggagaaagatagggttacaaatgagaggcttgtggaaccacttatgagcctggtcaagtcatacgagggtggaagagaaagccatgctcgtgttgttgttaaatctctatttgaggagtatctgtcggttgaagagctcttcaatgataaccttcagtctgatgttatagagcgtctacgccttcaacatgcaaaagaccttgagaaggttgtatacattgtgttctcacatcagggtgtgagaagcaaaaataaattaatactgcggcttatggaagcattggtatatccaaacccatctgcttacagggatcagttgattcgcttctctgccttgaaccatacatcatattctgaactggcacttaaagcaagccaacttcttgagcacactaaattgagtgaacttcgcaccagcatagcaagaagcctttcagagctggagatgtttactgaggaaggagagcgtctgtcaacacctaggagaaagatggcgataaatgagagaatggaagatttagtttgtgctccactggcagctgaagatgcccttgtagctttgttcgatcacagcgatcctactcttcaacggagagtagttgagacatacatacgcagattgtatcagccatatcttgtaagtggaagtatccggatgcaatggcaccgagctggcctaattgccttatgggagttctctgaagagcatcttaagcaaagaagtgggcaagatgtgcccctacagcaagtagaaaatcccattgagaagagttggggcgtcatggttgtaatcaagtctctccagtttgtagcaactgcaattgatgttgcactgaaggagacttcacagtacggaattggtgtcagaagtgtctctaacagtaaccatgtacattctaatcaaagcaatatgcttcatattgctttggttggtatcaataatcagatgagtactctgcaagacagtggtgatgaggatcaaacacaagaaagggtcaacaaactattcaagattttgaaggataatactattacatcacatcttaatggcgctagtgttaaggttgtcagctgtattatccaaagggatgaagggcgtccaccaatgcgacactccttccaatggtctgttgacaaactttattatgaggaggatccaatgcttcgccatgtggaacccccgttgtctacattccttgagctggaaaaagtaaacttagaaggttacaatgaagtaaaatacactccatcacgtgatcgtcagtggcatatttatacgcttatcaagaacaagaaagatcagagattaaatgaccagaggatgttccttcgtaccatagtcagacaaccaagtgcaacaaatagtttcctgacaggtaatattgacaatgaagtagggcacacacaagcttcgtcatcgttcacatcaaacagcattctcagatcattgatgggagcactagaagaaatagagctacatgctcatagtgagactgtgagatcaggccactcacacatgtatctgtgcttactgagagaacaacaattgcatgaactaatcccgttttcaaggatgactggtaaaattgataaggatgaaggaactgtgtgcacacttttgaagcatatggtattgaatttatatgaacatgttggggtcaggatgcatcgtctttctgtgtgccagtgggaagtcaagctctggttggtttgtgatgggcaagctagtggtgcttggagagttgttgttaccaatgttactggccacacatgcaccattgatatttaccgagaagtggaagaccccaccacacatcagcttctctaccactctgccacaacctcggctggtcctttgcatggtgttgcattgaatgaaccatacaagcctttggatgctattgacctcaaacgttatgctgctaggaaaaatgaaaccacatactgctatgattttcccctggcatttgaaacagcgctgaagagatcatggaaatcaagtagctatggtgttagcgaagctaatgagcacaatcgattctatgctgaagtgaaagagcttatatttgctgattcggttggagcatggggcactccattggtttcagttgaacgtcctccaggcatcaatgatattggcatcgttgcttggaacatgaagctgtccacgccagaattcccacgtggccgggagattatagttgttgccaatgatgtgacatttaaagctgggtcctttggtccaagagaagatgcattttttgatgctgttaccaatcttgcctgtgagaggaaacttcctcttatctatctggcagcaactgctggtgccaggcttggtgtagcagaggaaataaagtcatgcttccatgtcggctggtctgattatgagagccctgaacgtgggtttcagtacatttacctcactacacaagattactcacgtctaagctcttcagtaatagctcacgagctgcaactaaaaaatggagaaaccagatgggtggttgataccattgttggtaaagaggatggacttggttgtgagaatctccacggcagtggggcgattgccagcgcatattctaaggcatacaaagagacctttactctgacatttgtgactggaagagctgttggcattggggcttatctggctcgtttaggcatgaggtgtatacaacgtcttgatcaaccaattattttgactgggttttcggcactaaacaagctcctggggcgggaggtgtacagttctcatatgcaattgggtggccccaaaatcatggctacaaatggcgttgtccaccaaactgtgtcagatgaccttgaaggtgtttctgctatcctgaaatggctcagttatgttcctccatatgttggtggtcctcttcccattatgaaacccctggacccacccgaaagaccagtaacatacctccctgagaatgcttgtgatgctcttgcagccatctgtggcattcaggatggtgaagggaggtggttgggtggtatgtttgatagggaaagctttgtggaaacattggaaggttgggcaaaaacagttatcaccggaagagcaaagcttggtggaataccagttggtgtcatagctgtagaaacccagactgtgatgcaagtcatcccagctgatccaggtcagcttgattccgctgagcgcgtagtccctcaagcaggtcaggtttggttcccagattctgcaaccaaaacagctcaggcattactggatttcaaccgtgaggagcttccgctgttcatcctagcaaactggagaggtttctctggtgggcaaagggatttatttgaaggaatccttcaggctggttcaacaattgttgagaatctgaggacatacaagcagcctgcttttgtatatatcccaatgggtggagagctacggggaggggcctgggttgtggtggacagcaagatcaatccagaccacatcgagatgtatgccgagaggactgcgaaagggaatgtccttgagcccgaaggattggtggagatcaaattcaggccaaaggaactggaagattgcatgctaaggcttgacccagaattgattggtctgaatactaggctgaaagagatgaagaaacaaaatgccagcatctcggaaatggagaccatacggaggagtatgactattcggatgaagcagttgatgcctatttatactcaggttgccacacgatttgccgaattgcatgacacctctgctagaatggccgccaaaggtgtgatcggtaaggttgttgattggaaagagtctcgggccttcttctacaggagattgcgaaggagagttgctgaggatgccctggccaaggaagttaaagaagctgctggcgagcagctttcccacagatcagcattagactgtatcaagaaatggtatctagcgtccaaaggaactgaaggtgatggtgaaatgtggaatgatgatgaatctttctttgcttggaaggatgatcccaaaaactatgagaattatcttgaggagttgaaggctgaaagagtatcgaactggttctcgcatcttgctgaaagttcagacgtgaaagctctaccaaacggtctttcgctgctccttaacaagatgaatcctttgaagagggagcaggtcattgatggcctcaggcagcttcttggttgatcgatggtggcaaagtggagcatgaagccctgtttagttgggaacggattgttctggttgtagtcatgtatttagctgtttaacatgtatttaattgggtggcgttactccacgtcatacggtacaacagcaatcctgatcaagtgattatttattcttcaatcgaagtagtacatgattttcatcagtaagctttgtgcttgcaattagggataaaatcggatggaaatgaactgaaaaacactcattttcgtttctatattttttttataaaaatggattctaattcagaaaaaccgtgagcaaaaacataaggttctcggtaaagaagggatttggacagcgcatatattgaaagaccggtaggagatgcaatagagacccgattctcgatttcttgtggaggatttctctattaggaataaaaaacggggaagtttctttctccacatgaatataaac

SEQ ID NO: 53272 - DNA, 7322 bp, Zea Mays
gtcacgatgatgcgatgcacccgctggggttgggggtggtctgaacttcacagggtgaaataatggcggagccctaccaactgaacggcatactgaacgggatgcctaatttgagtcatccatcctctccatcagaggtcgatgaattctgtaaggcacttggtggtaactcgccaatacacagcgtgctagtcgctaacaatgggatggccgcggtcaagttcatgcgcagcatccggatatgggccctggagacctttgggacagagaaggccattcttttggttgctatggcaactccagaggacttgaagataaacgctgagcacataagaatcgctgatcagttcatagaagttcctggaggaacaaacaataacaactatgcgaatgtacagcttatagtggagattgcagagagaactcgcgtatctgcagtttggcctggctggggtcatgcgtctgagaacccagaacttccagatgctctagatgagaaaggaatcatttttctcggaccaccatcagctgcaatggctgcactgggtgataagattggttcttctcttattgcacaagcagctggagttccaactcttccatggagtggatcacatgtaaaagttccaccagaaagctgccattcaattcccgaggagttatataggaatgcttgtgtttccaccacagaggaagcagtggctagttgtcaggtggttgggtaccctgccatgatcaaggcatcatggggaggcggtggtaaaggaataaggaaggttcataacgatgatgaggtgagggcgctgttcaagcaagttcaaggagaagtccctggctcacctatatttattatgaaagtggcatctcagagccgacatctggaggttcaattgctctgtgataaacatggcaatgtggcagcactgcacagtcgagattgcagtgttcaaagaagacaccaaaagattattgaagaggggccaatcacaattgctgctccagacactgttaaagagcttgagcaggcagcaaggcagcttgctaagtgtgttcaatacgttggtgctgctactgtagaatatctgtacagcatggaaacgggcgagtactattttctggagcttaatccacggttgcaggtagaacatcctgtgactgaatggatagctgaaataaacttgccagcagcccaagttgcagtcggaatgggcatacccctttataacattccagagattagacgcttttatggaatggatcatgggggcggctaccataattggaggacaatatctgctgttgcaactaagtttgatttggataaagcacagtcagtgaggccaaagggccattgtgttgcagttagagttacaagtgaggatcctgatgatgggtttaagcctacaagtggaagagtggaggagttaaactttaaaagcaaaccaaatgtttgggcctatttctctgttaagtctggaggagcaattcatgaattttctgattcacagtttggtcatgtttttgcatttggggaatctagatctttggccatagccaatatggtacttgggctgaaagagattcagatccgtggagagatacgcacaaatgttgattacacagtggatctcttgaatgcaacagaataccgcgaaaataagatccatactggttggcttgacagcagaatagctatgcgtgttagagccgagaggcccccatggtacctctcagttgttggaggagctctatatgaagcatcaagcaggagctcaagcgttattactgattatgttggttatctcagcaaaggtcagataccaccaaagcacatatcgcttgtcaatttaactgtaactctgaacatagaggggagcaaatacacgattgagacagtaaggggtggaccccgcagctacaaattaagaatgaatggatcagaaattgaaacagagatacattcactgcgagatggtggacttttaatgcagttggatggaaacagtcatgtaatttatgcagagacagaggctgctggtacacgccttctcattaatggtagaacatgcttactacagaaagaacacgatccttcaaagctattggctgatacaccttgcaaacttttgcggttcttggttgcggatggctctcatgtggatgctgatacaccatatgctgaggtggaagtcatgaaaatgtgcatgccactgttgctgcctgcctctggtgtcattcactttgttatgcctgagggtcaggccatgaaggcgaatgacctgatagcaagattggaccttgatgacccatcttctgtgaggagagccgaaccatttcatggttcctttcccaaactgggacctcctactgctatctctggcaaagttcatcaaaaatttgctgcaagtgtgaattctgcacacatgatccttgcaggatatgaacataatatcaatgaagttgtacaagacctgctaaactgcctagacaaccctgagctcccttttctacaatggcaagaacttatgtctgttttagcaacacgacttccaaaagatcttaggaatgagttggatggtaagtacaaggagtatgaattgaatcctgacttctgcaagagcaaggatttccctgcaaggttgctgaggggggttattgaggcaaatcttgcatactgttcggagaaagatagggttacaaatgagaggcttgtggaaccacttatgagcctggtcaagtcatacgagggtggaagagaaagccatgctcgtgttgttgttaaatctctatttgaggagtatctgtcggttgaagagctcttcaatgataaccttcagtctgatgttatagagcgtctacgccttcaacatgcaaaagaccttgagaaggttgtatacattgtgttctcacatcagggtgtgagaagcaaaaataaattaatactgcggcttatggaagcattggtatatccaaacccatctgcttacagggatcagttgattcgcttctctgccttgaaccatacatcatattctgaactggcacttaaagcaagccaacttcttgagcacactaaattgagtgaacttcgcaccagcatagcaagaagcctttcagagctggagatgtttactgaggaaggagagcgtctgtcaacacctaggagaaagatggcgataaatgagagaatggaagatttagtttgtgctccactggcagctgaagatgcccttgtagctttgttcgatcacagcgatcctactcttcaacggagagtagttgagacatacatacgcagattgtatcagccatatcttgtaagtggaagtatccggatgcaatggcaccgagctggcctaattgccttatgggagttctctgaagagcatcttaagcaaagaagtgggcaagatgtgcccctacagcaagtagaaaatcccattgagaagagttggggcgtcatggttgtaatcaagtctctccagtttgtagcaactgcaattgatgttgcactgaaggagacttcacagtacggaattggtgtcagaagtgtctctaacagtaaccatgtacattctaatcaaagcaatatgcttcatattgctttggttggtatcaataatcagatgagtactctgcaagacagtggtgatgaggatcaaacacaagaaagggtcaacaaactattcaagattttgaaggataatactattacatcacatcttaatggcgctagtgttaaggttgtcagctgtattatccaaagggatgaagggcgtccaccaatgcgacactccttccaatggtctgttgacaaactttattatgaggaggatccaatgcttcgccatgtggaacccccgttgtctacattccttgagctggaaaaagtaaacttagaaggttacaatgaagtaaaatacactccatcacgtgatcgtcagtggcatatttatacgcttatcaagaacaagaaagatcagagattaaatgaccagaggatgttccttcgtaccatagtcagacaaccaagtgcaacaaatagtttcctgacaggtaatattgacaatgaagtagggcacacacaagcttcgtcatcgttcacatcaaacagcattctcagatcattgatgggagcactagaagaaatagagctacatgctcatagtgagactgtgagatcaggccactcacacatgtatctgtgcttactgagagaacaacaattgcatgaactaatcccgttttcaaggatgactggtaaaattgataaggatgaaggaactgtgtgcacacttttgaagcatatggtattgaatttatatgaacatgttggggtcaggatgcatcgtctttctgtgtgccagtgggaagtcaagctctggttggtttgtgatgggcaagctagtggtgcttggagagttgttgttaccaatgttactggccacacatgcaccattgatatttaccgagaagtggaagaccccaccacacatcagcttctctaccactctgccacaacctcggctggtcctttgcatggtgttgcattgaatgaaccatacaagcctttggatgctattgacctcaaacgttatgctgctaggaaaaatgaaaccacatactgctatgattttcccctggcatttgaaacagcgctgaagagatcatggaaatcaagtagctatggtgttagcgaagctaatgagcacaatcgattctatgctgaagtgaaagagcttatatttgctgattcggttggagcatggggcactccattggtttcagttgaacgtcctccaggcatcaatgatattggcatcgttgcttggaacatgaagctgtccacgccagaattcccacgtggccgggagattatagttgttgccaatgatgtgacatttaaagctgggtcctttggtccaagagaagatgcattttttgatgctgttaccaatcttgcctgtgagaggaaacttcctcttatctatctggcagcaactgctggtgccaggcttggtgtagcagaggaaataaagtcatgcttccatgtcggctggtctgattatgagagccctgaacgtgggtttcagtacatttacctcactacacaagattactcacgtctaagctcttcagtaatagctcacgagctgcaactaaaaaatggagaaaccagatgggtggttgataccattgttggtaaagaggatggacttggttgtgagaatctccacggcagtggggcgattgccagcgcatattctaaggcatacaaagagacctttactctgacatttgtgactggaagagctgttggcattggggcttatctggctcgtttaggcatgaggtgtatacaacgtcttgatcaaccaattattttgactgggttttcggcactaaacaagctcctggggcgggaggtgtacagttctcatatgcaattgggtggccccaaaatcatggctacaaatggcgttgtccaccaaactgtgtcagatgaccttgaaggtgtttctgctatcctgaaatggctcagttatgttcctccatatgttggtggtcctcttcccattatgaaacccctggacccacccgaaagaccagtaacatacctccctgagaatgcttgtgatgctcttgcagccatctgtggcattcaggatggtgaagggaggtggttgggtggtatgtttgatagggaaagctttgtggaaacattggaaggttgggcaaaaacagttatcaccggaagagcaaagcttggtggaataccagttggtgtcatagctgtagaaacccagactgtgatgcaagtcatcccagctgatccaggtcagcttgattccgctgagcgcgtagtccctcaagcaggtcaggtttggttcccagattctgcaaccaaaacagctcaggcattactggatttcaaccgtgaggagcttccgctgttcatcctagcaaactggagaggtttctctggtgggcaaagggatttatttgaaggaatccttcaggctggttcaacaattgttgagaatctgaggacatacaagcagcctgcttttgtatatatcccaatgggtggagagctacggggaggggcctgggttgtggtggacagcaagatcaatccagaccacatcgagatgtatgccgagaggactgcgaaagggaatgtccttgagcccgaaggattggtggagatcaaattcaggccaaaggaactggaagattgcatgctaaggcttgacccagaattgattggtctgaatactaggctgaaagagatgaagaaacaaaatgccagcatctcggaaatggagaccatacggaggagtatgactattcggatgaagcagttgatgcctatttatactcaggttgccacacgatttgccgaattgcatgacacctctgctagaatggccgccaaaggtgtgatcggtaaggttgttgattggaaagagtctcgggccttcttctacaggagattgcgaaggagagttgctgaggatgccctggccaaggaagttaaagaagctgctggcgagcagctttcccacagatcagcattagactgtatcaagaaatggtatctagcgtccaaaggaactgaaggtgatggtgaaatgtggaatgatgatgaatctttctttgcttggaaggatgatcccaaaaactatgagaattatcttgaggagttgaaggctgaaagagtatcgaactggttctcgcatcttgctgaaagttcagacgtgaaagctctaccaaacggtctttcgctgctccttaacaagatgaatcctttgaagagggagcaggtcattgatggcctcaggcagcttcttggttgatcgatggtggcaaagtggagcatgaagccctgtttagttgggaacggattgttctggttgtagtcatgtatttagctgtttaacatgtatttaattgggtggcgttactccacgtcatacggtacaacagcaatcctgatcaagtgattatttattcttcaatcgaagtagtacatgattttcatcagtaagctttgtgcttgcaattagggataaaatcggatggaaatgaactgaaaaacactcattttcgtttctatattttttttataaaaatggattctaattcagaaaaaccgtgagcaaaaacataaggttctcggtaaagaagggatttggacagcgcatatattgaaagaccggtaggagatgcaatagagacccgattctcgatttcttgtggaggatttctctattaggaataaaaaacggggaagtttctttctccacatgaatataaac

SEQ ID NO: 53273 - DNA, 1125 bp, Zea Mays
aacccatgctcaagggaaagtgggaaacgctcgaagaggggagaggagacagcggtcctatgtccgtgtggtcgtgcggactgcggacttctcttcctcattccatccccgctgccccatccggccatcccacagcgaatctcccaaaccccggctccctcgattcccaatcccacccctgccacgaagagatcagatgacggcgagctgctgctgatcgagtgcagtggaatcggaggcgatgcgggctagccggccggcggtgcaccctgtggaagcggcccctccgccgccggccgcggcggcggaggggccggaggcccaggtggagggtgccgcgcacccgcgcggggtgcggatgaaggatccgcctggggcaccagggacacctgcggggcttggtctacgccttgcgcaggccttcttcgcagccgctgcgctcgccgtcatggcgtccaccaacgacttcccgtccgtctctgccttcagccattttgcagtgcttgtggagccttttgctagcctttgtcgacatttatgcacttcttgtcaagcgatcgttgagaaatgcccgagctgtatgtatatttactatcggagatgggatcacaggtacaataaccttgggcgcggcatgtgcttcagcaggaatcactgttctcatcggtaatgatctcaacatatgtgcagagaatcactgtgcaagtttcgagaccgccacagcattggcttttataagctggtttgcgctggcgccatcctgtatcttgaatttctggtcgatggcctccagatgataaatataggatgttataaaacatagtatttttgaatggtttctggacaaggtcgctgcttatggtagcagcaaagcaacgcggtgccgtaaagctaattgtaatacccagaaattgttgaatggctgtggaatgtagcacgtggtcgaattgtctgtacaaaatacggagaggccttctttggatctgaaaaaggcttctgaatcttgccagtccttcctttttacgttaacatgtttctcctgtgtggtttgttgtattgtacgatggcatgcctaaatggctcgagatgattgtttttatgagttgttggtatcacgcatataag

SEQ ID NO: 53274 - DNA, 1070 bp, Zea Mays
aacccatgctcaagggaaagtgggaaacgctcgaagaggggagaggagacagcggtcctatgtccgtgtggtcgtgcggactgcggacttctcttcctcattccatccccgctgccccatccggccatcccacagcgaatctcccaaaccccggctccctcgattcccaatcccacccctgccacgaagagatcagatgacggcgagctgctgctgatcgagtgcagtggaatcggaggggccggaggcccaggtggagggtgccgcgcacccgcgcggggtgcggatgaaggatccgcctggggcaccagggacacctgcggggcttggtctacgccttgcgcaggccttcttcgcagccgctgcgctcgccgtcatggcgtccaccaacgacttcccgtccgtctctgccttcagctaccttgtcgcagcagccattttgcagtgcttgtggagccttttgctagcctttgtcgacatttatgcacttcttgtcaagcgatcgttgagaaatgcccgagctgtatgtatatttactatcggagatgggatcacaggtacaataaccttgggcgcggcatgtgcttcagcaggaatcactgttctcatcggtaatgatctcaacatatgtgcagagaatcactgtgcaagtttcgagaccgccacagcattggcttttataagctggtttgcgctggcgccatcctgtatcttgaatttctggtcgatggcctccagatgataaatataggatgttataaaacatagtatttttgaatggtttctggacaaggtcgctgcttatggtagcagcaaagcaacgcggtgccgtaaagctaattgtaatacccagaaattgttgaatggctgtggaatgtagcacgtggtcgaattgtctgtacaaaatacggagaggccttctttggatctgaaaaaggcttctgaatcttgccagtccttcctttttacgttaacatgtttctcctgtgtggtttgttgtattgtacgatggcatgcctaaatggctcgagatgattgtttttatgagttgttggtatcacgcatataag

SEQ ID NO: 53275 - DNA, 686 bp, Zea Mays
ttggcctttcaccaccagccacaagtcatccgctaatttttcaacattagtcggttcggtcctccagttagtgttacccaaccttcaacctgcccatggctagatcaccgggtttcgggtctataccctgcaacttaacgcccagttaagactcggtttcccttcggctcccctattcggttaaccttgctacagaatataagtcgctgacccattatacaaaaggtacgcagtcacccggtatcgcgcgcctttccagacgcttccactaacacacatactgattcaggctgtgggctgctccccgttcgctcgccgctactgggggaatctcggttgatttcttttcctcggggtacttagatgtttcagttcccccggttcgcctcattaacctatggattcagttaatgatagtgtgtcgaaacacactgggtttccccattcggaaatcgccggttataacggttcatatcaccttaccgacgcttatcgcagattagcacgtccttcatcgcctctgactgccagggcatccaccgtgtacgcttagtcgcttaacctcacaacccgaagatgtttctttcgattcatcatcgtgttgcgaaaatttgagagactcacgaacaactttcgttgttcagtgtttcaattttcagcttgatccagatttttaaagagcaaat

SEQ ID NO: 53276 - DNA, 2364 bp, Zea Mays
ccgagccagccaacgagacacgattatttcgtacaaacctatcctcgtcaaccagacggtcactccgcgacggcatcgctacagcctacaggcactaataactgcactggcacagcgacactgcacacgcatcttccccgtgcttgcagttgcagtgcagctgtacccacattaccctgtcagtctcggccattgcattgcctcaagaagcagcaatggagttgccaagaccaatgggcgtgcttctgctcgtgttcttcgtcttgtgcagagtgggggacgcggcgacgttcatgttcgtgaaccggtgcacggacacggtgtggccgggcgtcctgtccaacgccggcagcccaaggctggagccgacggggttcgagctcccgccgggcgcggcacgcgcggtgccggcgccggcgggctggtccggccgcatgtgggcgcgcacgggctgctcccaggacggcgccacggggcggctcgtctgtgccacgggcgactgcggctctggctccgccgagtgcgcgggcgcgggcgctgcgccgccggccacgctggccgagttcacgctcgacggcagtggcgggctggacttctacgacgtcagcctcgtggatggctacaacctccccgtgctggtggagacctccggcggcgcaggctccagcgggccggcgtcgtgcgcggcggccgggtgcgcagcggacctgaacgcgatgtgccccgccgagctccgagccgggggcggcgccgcgtgccggagcgcgtgcgacgcgttcgcgcggcccgagtactgctgcagcggcgccttcgcgaccccggcggcgtgccggccgactgcctactcgcaggtgttcaagagcgcgtgcccgcgctcctacagttacgccttcgacgatcccacctccacattcacctgcggcggcggcccagactacaccgtcaccttctgccccggcgccaccccaaggtccggcctttgattcactcacccacccttctcttctctcccaccattgcatattattggtcattctcatcattcacgttgcaatttgtggagagaggtgcgtgtgtgatggatcatgatttggcactgtgcttctgccaagattgtctgggtcttcggcttgtgaaggtggggttgatctgccgcagctcttttaccgtctctgccagtgccagctaatctatccacacagcctgctgtcgtccttttaactcctcttgtcaactgtcagaggttgctgactttactgcaagatttttttcagctattaattatttttttcagaggctactgttgttacaagatttacattgtcagagatttctggttcttctctgagaaattgaagtagacgcaatgcaagctagtgactgaacctgtgttgttgtgttcctagaatgaggaaagactaggaacatggggctacaacgtacaagatcttggcataataaattttttatatctttgatttacagcagaggggacgaaacgaaaagcgcatgggcgaaatgctttttttggggcgttattagtagtatttcccatttgcgtgcaaaatgattttgtccgtactactgagcacgtgaacttctgaccggatggatacgctgctcttgtatgtacccgtgacatgagcgcagccagaagtcgacgaccacaccgggcgcgacgccggcgacggtgccggggacaatgacgacgacggtgccggaggcaacgccgatgccgggcgcgaccccggctatgccgacggggaccatgatgccaccgggcgcgacgttcacggacgccaccccggacagcgcgatgatgccgatgggtggcctgggcatcgagggcgggggccaaggcagcgtgctcctgggcggcagcagcagcgaaggcagcgtctcttggctcgccaacatggccaccggcgacgcggccgtcccgctggtggcttcggctcggttattggtggcgccactggcaacgttgctctgcggcctccatttgctgtagtagtggtgatggagggagcagaggaatctgttggcgattcgcacggtggcgcctttgtattgccgtgtctgtagatgattttactgtccattgatcatgttgcgttagccccggtcccaggattagatacttgtggctactagtagtactagttctagaggagaaattaaagcatggatgtggacattgattaaagttaatcgctgtcgtgctagctgcgctttgttgttgccactgttgttcgtgcgtggctcgaggttggcgaggaaacacgggcgcagcatggactcaagagactgtctggactaaaaaaaaattactagtgtcctgcgttcactgcaccacaccattag

SEQ ID NO: 53277 - DNA, 1946 bp, Zea Mays
agaaactagaatagaatcgctacattctaattgactctccaaccaaacgcactcttatctcgcgagctccaaaccgagcggaactgacactgaaccgagccagccaacgagacacgattatttcgtacaaacctatcctcgtcaaccagacggtcactccgcgacggcatcgctacagcctacaggcactaataactgcactggcacagcgacactgcacacgcatcttccccgtgcttgcagttgcagtgcagctgtacccacattaccctgtcagtctcggccattgcattgcctcaagaagcagcaatggagttgccaagaccaatgggcgtgcttctgctcgtgttcttcgtcttgtgcagagtgggggacgcggcgacgttcatgttcgtgaaccggtgcacggacacggtgtggccgggcgtcctgtccaacgccggcagcccaaggctggagccgacggggttcgagctcccgccgggcgcggcacgcgcggtgccggcgccggcgggctggtccggccgcatgtgggcgcgcacgggctgctcccaggacggcgccacggggcggctcgtctgtgccacgggcgactgcggctctggctccgccgagtgcgcgggcgcgggcgctgcgccgccggccacgctggccgagttcacgctcgacggcagtggcgggctggacttctacgacgtcagcctcgtggatggctacaacctccccgtgctggtggagacctccggcggcgcaggctccagcgggccggcgtcgtgcgcggcggccgggtgcgcagcggacctgaacgcgatgtgccccgccgagctccgagccgggggcggcgccgcgtgccggagcgcgtgcgacgcgttcgcgcggcccgagtactgctgcagcggcgccttcgcgaccccggcggcgtgccggccgactgcctactcgcaggtgttcaagagcgcgtgcccgcgctcctacagttacgccttcgacgatcccacctccacattcacctgcggcggcggcccagactacaccgtcaccttctgccccggcgccaccccaaggtccggcctttgattcactcacccacccttctcttctctcccaccattgcatattattggtcattctcatcattcacgttgcaatttgtggagagaggtgcgtgtgtgatggatcatgatttggcactgtgcttctgccaagattgtctgggtcttcggcttgtgaagccagaagtcgacgaccacaccgggcgcgacgccggcgacggtgccggggacaatgacgacgacggtgccggaggcaacgccgatgccgggcgcgaccccggctatgccgacggggaccatgatgccaccgggcgcgacgttcacggacgccaccccggacagcgcgatgatgccgatgggtggcctgggcatcgagggcgggggccaaggcagcgtgctcctgggcggcagcagcagcgaaggcagcgtctcttggctcgccaacatggccaccggcgacgcggccgtcccgctggtggcttcggctcggttattggtggcgccactggcaacgttgctctgcggcctccatttgctgtagtagtggtgatggagggagcagaggaatctgttggcgattcgcacggtggcgcctttgtattgccgtgtctgtagatgattttactgtccattgatcatgttgcgttagccccggtcccaggattagatacttgtggctactagtagtactagttctagaggagaaattaaagcatggatgtggacattgattaaagttaatcgctgtcgtgctagctgcgctttgttgttgccactgttgttcgtgcgtggctcgaggttggcgaggaaacacgggcgcagcatggactcaagagactgtctggactaaaaaaaaattactagtgtcctgcgttcactgcaccacaccattag

SEQ ID NO: 53278 - DNA, 274 bp, Zea Mays
tccattcagattcagccgctcttcagtcctgctttgatcctgcagtggaagggacacgaaatgagggcagtaaaagcgatggtgcagtggtaaaaagtcatcaggtcacaggtaagcaagtcttgatcttcacatgagttgctgctgagtaggttgttttcatatgcttgtaaatatccctgtctgtttacttgtctgattgatgacagaatattattccaccatgatcacgccacgtggagcatgagctgactgacatcgacatgcaggaccc

SEQ ID NO: 53279 - DNA, 3828 bp, Zea Mays
gccggccacacctacggacctcgacctacccctgtctcggtctcacgcgctgaccgcagcgtcgactcagccgctgccccggtccaggccccgcacatcactccaggcttcagcagtccagctccaaccgcagccgcctccctttgcttcctccactcttccccaaccccaaccaaacccaccaccaccactaccatccccaaaacccccacgaggaatccccaaattcgtcctgctcccccgcagatcgcaccatctgcgcgcgtttccatcgacacccgcaacccccgaccacccaagccgcggcgccggtttctttttccttctttggttggggaggggagatgggggagggggtgaaggagatgctggccccgccgatccagctggccgacgaggtcgccaagcagtgcgctgccgcgcggagcttccgcgccgagtgcgccgaactcaaggcccgcgcggacaagctggcggcgctgctgcggcaggcggcgcgggccccggagctctacgaccgccccgcggcccgcatcttggccggggccacccaggcgctgtccagagcctcggccctcgccgcccggtgcgctcggggccacccgcggctgcgcagcctcttcacgctcagccccgccgccgggttcccccgggccgtggcggcgctcgacacggcgctcgaggacgtcgcgtggctgctccgcatctcctcgcctggtgccaccggcgaaggggacgacgactcgctcctgggcctccccaacatcgcgcagaacgagcccatcctcttcttaatctgggaccacgtcgcgcgcctgcacacgggttcccccgccgcccgcgctgactcggccgccaacctcgcctcgctcgcccgcgacaaccagcactttgccaagctcatcatcgaggaggacggcgtgccgccgctgctcaagctgctcaaggacggcaccgacgaaagccaggaggccgcggcacgggctctgggcttcctcggctgtgacgccgagaacgtggacaagctcgtgcaggctgcagtggcggaggccatcgcgtccctcgccgaccggagctccacctgccaagaccttttcgcgcagaacaatgccgtccggtaccttgtcgcacacctcgcttccgggactatccaggagcacagccggtactccgtcggctccagcagctccaagaacagcgcagccgctgctgccacagcacagcagcacatgaagtcgctccactctgttgtgcttgccaagacgctcagcatgcgccacagcggtgactgtgacacctccatccgcggcgctgatggtctgccaaggatgtccaatggtacaccaggatgcgatcaagacacaaaaaggaacccccagatgcagtcagtggtacactcggctatgtctgccaagacaaacacaaatggctcattggttccgcccttcaggcctcagctgggcaccagtggctccagtggccgtggtgctcgtgaagtggaggatcctgaaaccaaggcacaattgaaggctatggcggcaaaagctttgtggaagcttgctcataaccatttgggtgtgtgcaagagcattacagagtcacgcgcgctgctgtgctttgctgtgctccttgagaagggtgatggcgatatgggcactgatgtgcagtacttctcagcaatggccatcatggagattgcccgtgttgctgaacacagcctcgtgctgcggcaatcagcattcaaacccagctccccagctgccaaggctgttgttgatcagctgcttggtgttgtctgcaggggtgaatacgatacattgcttctcccatgcatcactggccttggatgccttgcccgtaccttcacagcaagtgagaccaggatagtggcccctcttgtgcagcttctcgatgagcgcgagcctccagtcataaaggaggctgttgttgcgctcaccaagtttgcgtgcactgagaaccatctacatgtgaaccactgcaaagccattgttgatgatggtggtgcgcgccaccttgtccagcttgtctaccttggtgatgaggtgcagattgaggcgctcatactactctgttacattgcattgtatgtgcctgagagcgaggaactcgcgcaagctggtgtgctggccgtgctgctttgggcatcaaagcaggctcaaatggtgcaggacacacgtgttgaggcattgcttccagatgcgaaagggaggcttgagctgttccagtccagggcctccaggtgatgttggagaggggatcgttgggcatgggttagtagttctttattgcaatgtgtaattagagtagaattatctccgtcatccgtaattgctcttgtgaggtacgttacatttttggctgtacatgtgaagtcatatatttgtctattaaattggttggtgttattgaattataaattataaattcatgagacattgaaatagaacatgttgcctatgattttttttttgccgtctatatcttagaattaatacaaaactacaactgttctgactatagcgtcaagtaactatagttcctggtgtccgttcacaaaaccacagctacttgtgttctcagtgcaaaggaacttcagcttttatataaatcgtagtgaaacagtgtgtcaactctaatgtggttgctactgcagtattaagttgtctctaacagaagactctatatgctcctctaccctaaatatagagaagatttctttctctatagcctccaatggtgtcatctaaaacctactctgaatatagagcactccatcccctctatatagagactcttcttctctatccatttttatattttagacaacagattaagcaaaactaaaatatgtttatgacatttgagggtatgacaaatacatacgtaaaaaaactagagcaaaaatgtctctaatatgggtctttgatgactgatgtatagaggacaagatataaaggatgttggagaggaataaaatatagagcagataatcttttcgagaagtctataaaatatagatatagaggacaccactagagacaaccttaggctaaggctgacaggagggtgcatgctcctgttctgttacggttttctagcagttgtagtttcttgttaccaagggtactagtagttgtggtttcatgatcggcaccatagttatggttccttgttacaatgatctggatagttgtagttttgtaaattagttctatatcatatttatccaaatttacagtattatgacatgaattcaactttgctcagaaatttcacttttgttatgtttttgattgtgttgagcgacgtcaatgagaaattatagacttatagctgcataactcctagaaatttgtttgtaagcaaaaccagcctggaagtccctgtttgccaaatataggcacggttggtggttgtcctgtatctgtgaatgtatttaatttgctgaatctgaaagtgtgattgttttaaatattagcagtatattttactagtcaagactcaagattggacaaatatcgttaaataaaaagttctggaagtatttcagtgttctacttgttcatccgaattggattggtccaatttttttttaaaaaaaatctgtttgttcgcatcatggttgcgcttgttcctttgtaatgctgtctgaagttattatagaaacaggttttgcttatagcagttgtatttagaacagcattctaatgcagtaaggaaaatcagcaattataagtggtatcctggtaggcatattatgttctccgcgtttgcagcatttgttcaatacaattatgcatactggag

SEQ ID NO: 53280 - DNA, 1162 bp, Zea Mays
ccgcattcccgctgctgaaggaagaaggattgaggtgaggtgctgtcctctgttttgcgtctgttcccgttgctacagactacatactacagagactacagagtacagaaactgtcccactgttctactgtccgctggcgtatgctccactgccattaactcgagcaagggtcccaatagtgaagcttatggatccaaaaacagggctttcctgtgatatatgcgtcaataatcttttagcagttgttaacacaaaacttttgcgagattatggacaaatagataaaaggttacagcagttggcattcattgtgaagcattgggctaaaactcgacgtgtaaatgaaacttatcaaggaacactttctagttatgcctatgtgattatgtgcattcacctcctacagctgcgaagaatactcccatgtctacaggaaatggaggccacttattatgtcaaggtggaagaaatcaactgtgcatactttgaccaagtggacaagctaaataattatggtgctcacaacagagatacagtatcaaggctgctctggtcctttttccattactgggcatatgagcacgattacacaagagatgtcatatcaattcgtactggaaggattatcagtaaggaacggaaggactggactagacgagttggaaatgacaggcatctcatatgcatcgaagatccgtttgagatctcccatgatctcggtcgcgtagttgacaagttcaccatcaaaatactcagggaggaattcgagcgagcagctaatatattacagttcgatccaaaccccagcgtaacactctttgagccctacgtgccccctccatcgccgagcctgttgcaagaagaaactgcgaatgctgcagaaattgaactatgatagcgtttggttcgtccccaggtattgtaataggaaatagaatcaactcaaggattttgatccttgcatcactggttgcagcctttggttggatgtgtaaatggtattgtttaccgttacagctgtttggtttctatctcagggatcacaagtcagttcccgaacttaaaaatcattcgtggtatgttctatttcaactcaagggatcacaagtcagctaccatatcacatgtcctattttatttctatttcaaacttcattcggc

SEQ ID NO: 53281 - DNA, 1432 bp, Zea Mays
aaaaaagccaagttgcattatcaaggactcttgccagcaaccagttgccagatttcagatcagatttttctagagggcatcatgtatcaagtcagagaataagattccagaggagaaacaggccatgtcgatatgacatagatcgatttacacctaacttcttgtcaatttttgaatctttggtgccctctgaagaggaaattgcaaatcagaaacagttgttaacatctctaagcagactgataaacacagaatggcctaattcaaaactatacctctatggatcatgtgccaattcttttggtttctcaaatagtgatattgatctttgtctctcgattgataacaaggaaatgagcaaggttgatattatattgaaattggcagatattttccaagctggaaatctccagaatattcagccattaactcgagcaagggtcccaatagtgaagcttatggatccaaaaacagggctttcctgtgatatatgcgtcaataatcttttagcagttgttaacacaaaacttttgcgagattatggacaaatagataaaaggttacagcagttggcattcattgtgaagcattgggctaaaactcgacgtgtaaatgaaacttatcaaggaacactttctagttatgcctatgtgattatgtgcattcacctcctacagctgcgaagaatactcccatgtctacaggaaatggaggccacttattatgtcaaggtggaagaaatcaactgtgcatactttgaccaagtggacaagctaaataattatggtgctcacaacagagatacagtatcaaggctgctctggtcctttttccattactgggcatatgagcacgattacacaagagatgtcatatcaattcgtactggaaggattatcagtaaggaacggaaggactggactagacgagttggaaatgacaggcatctcatatgcatcgaagatccgtttgagatctcccatgatctcggtcgcgtagttgacaagttcaccatcaaaatactcagggaggaattcgagcgagcagctaatatattacagttcgatccaaaccccagcgtaacactctttgagccctacgtgccccctccatcgccgagcctgttgcaagaagaaactgcgaatgctgcagaaattgaactatgatagcgtttggttcgtccccaggtattgtaataggaaatagaatcaactcaaggattttgatccttgcatcactggttgcagcctttggttggatgtgtaaatggtattgtttaccgttacagctgtttggtttctatctcagggatcacaagtcagttcccgaacttaaaaatcattcgtggtatgttctatttcaactcaagggatcacaagtcagctaccatatcacatgtcctattttatttctatttcaaacttcattcggc

SEQ ID NO: 53282 - DNA, 2746 bp, Zea Mays
cgagaaggtaccaaagctgggaaaatatcgtcacagaggcccaggtcctcgccgcccccgatggccgactcctccggtcgcagtggcggccgccccacgtcagcctcgccatccactgccacacacacctcaccggcgtctttcgacggcggtctcctactccgcctcctccaaaaccctccttctgcgcacccgcgagaggaaatcctcgccccgtcccccgttgccccgggggcgcaccacttctttagtgaccctgccgtcgccgccgtggggcctctcttcgccgcatcggcgcagacgcaaggaggggacttcgggtggtcctccacctcgaccacgcacgtacagcagcaaccccgattctcggatccccgattcgctccaggggaccccttcgctgctcttggcggtagagggttcggatctggggatgcggttagggcggagaggcctcggtcgggggcgccgcctccagggtttggcaagccgtcgcatccacttcctgctgcccgtgatgcgcggagtgcatctggtgtggtattgcgtaaggagcagtacaatcctcgtcccgtggatttcgttccggctcttgcagatgttcgtgatccggttggcagaatgcctcatggacacggagagcagttttacagggaacagcagcaagatcgttttttgtcacggaccccgcctgagatcaatgccaatggacagtttggcaggatgccaattggagagcagcatacacttcctatcttaggtggcaggaggctccatgtagatcagtacatgcctcccgtccaggaaggcagggcaccacatggtggtcatggcaagcatgaatcccgcttaaccaatccgctacaaagggagcagaggtggcagggtcttagggaggacaagggctatgcttcgcggaagctgccaaatgtgaatgcccattacacatctggtaaggcactggtgaaggaggtgcaccatttgacaatacctgctggcagttcagttccagtggaaattacggagaatcaagcgagtggtttggaaggaggcagaatagggaaagtagttttggaggatggaattgatgaagaaggggtagtggaggcaagtaagtttgaagtgtcatatgaaaagagtaagattagatttgctggacatgatgaacaagatgatggtggtgacagggaagatgctataattgagcagatggcacaaaatctgctgattgatggcaatggtgatgccaagggagtagtgttggaaaaacctatcctgaggagtaaggatttcagatcagatttttctagagggcatcatgtatcaagtcagagaataagattccagaggagaaacaggccatgtcgatatgacatagatcgatttacacctaacttcttgtcaatttttgaatctttggtgccctctgaagaggaaattgcaaatcagaaacagttgttaacatctctaagcagactgataaacacagaatggcctaattcaaaactatacctctatggatcatgtgccaattcttttggtttctcaaatagtgatattgatctttgtctctcgattgataacaaggaaatgagcaaggttgatattatattgaaattggcagatattttccaagctggaaatctccagaatattcagccattaactcgagcaagggtcccaatagtgaagcttatggatccaaaaacagggctttcctgtgatatatgcgtcaataatcttttagcagttgttaacacaaaacttttgcgagattatggacaaatagataaaaggttacagcagttggcattcattgtgaagcattgggctaaaactcgacgtgtaaatgaaacttatcaaggaacactttctagttatgcctatgtgattatgtgcattcacctcctacagctgcgaagaatactcccatgtctacaggttcataatttgagggtgtaaattaaactgcactttcaggtgacagggcagatggttttttgtttcaatttagaaaggaaatggaggccacttattatgtcaaggtggaagaaatcaactgtgcatactttgaccaagtggacaagctaaataattatggtgctcacaacagagatacagtatcaaggctgctctggtcctttttccattactgggcatatgagcacgattacacaagagatgtcatatcaattcgtactggaaggattatcagtaaggaacggaaggactggactagacgagttggaaatgacaggcatctcatatgcatcgaagatccgtttgagatctcccatgatctcggtcgcgtagttgacaagttcaccatcaaaatactcagggaggaattcgagcgagcagctaatatattacagttcgatccaaaccccagcgtaacactctttgagccctacgtgccccctccatcgccgagcctgttgcaagaagaaactgcgaatgctgcagaaattgaactatgatagcgtttggttcgtccccaggtattgtaataggaaatagaatcaactcaaggattttgatccttgcatcactggttgcagcctttggttggatgtgtaaatggtattgtttaccgttacagctgtttggtttctatctcagggatcacaagtcagttcccgaacttaaaaatcattcgtggtatgttctatttcaactcaagggatcacaagtcagctaccatatcacatgtcctattttatttctatttcaaacttcattcggc

SEQ ID NO: 53283 - DNA, 2467 bp, Zea Mays
cgagaaggtaccaaagctgggaaaatatcgtcacagaggcccaggtcctcgccgcccccgatggccgactcctccggtcgcagtggcggccgccccacgtcagcctcgccatccactgccacacacacctcaccggcgtctttcgacggcggtctcctactccgcctcctccaaaaccctccttctgcgcacccgcgagaggaaatcctcgccccgtcccccgttgccccgggggcgcaccacttctttagtgaccctgccgtcgccgccgtggggcctctcttcgccgcatcggcgcagacgcaaggaggggacttcgggtggtcctccacctcgaccacgcacgtacagcagcaaccccgattctcggatccccgattcgctccaggggaccccttcgctgctcttggcggtagagggttcggatctggggatgcggttagggcggagaggcctcggtcgggggcgccgcctccagggtttggcaagccgtcgcatccacttcctgctgcccgtgatgcgcggagtgcatctggtgtggtattgcgtaaggagcagtacaatcctcgtcccgtggatttcgttccggctcttgcagatgttcgtgatccggttggcagaatgcctcatggacacggagagcagttttacagggaacagcagcaagatcgttttttgtcacggaccccgcctgagatcaatgccaatggacagtttggcaggatgccaattggagagcagcatacacttcctatcttaggtggcaggaggctccatgtagatcagtacatgcctcccgtccaggaaggcagggcaccacatggtggtcatggcaagcatgaatcccgcttaaccaatccgctacaaagggagcagaggtggcagggtcttagggaggacaagggctatgcttcgcggaagctgccaaatgtgaatgcccattacacatctggtaaggcactggtgaaggaggtgcaccatttgacaatacctgctggcagttcagttccagtggaaattacggagaatcaagcgagtggtttggaaggaggcagaatagggaaagtagttttggaggatggaattgatgaagaaggggtagtggaggcaaatgctataattgagcagatggcacaaaatctgctgattgatggcaatggtgatgccaagggagtagtgttggaaaaacctatcctgaggagtaaggatttcagatcagatttttctagagggcatcatgtatcaagtcagagaataagattccagaggagaaacaggccatgtcgatatgacatagatcgatttacacctaacttcttgtcaatttttgaatctttggtgccctctgaagaggaaattgcaaatcagaaacagttgttaacatctctaagcagactgataaacacagaatggcctaattcaaaactatacctctatggatcatgtgccaattcttttggtttctcaaatagtgatattgatctttgtctctcgattgataacaaggaaatgagcaaggttgatattatattgaaattggcagatattttccaagctggaaatctccagaatattcagccattaactcgagcaagggtcccaatagtgaagcttatggatccaaaaacagggctttcctgtgatatatgcgtcaataatcttttagcagttgttaacacaaaacttttgcgagattatggacaaatagataaaaggttacagcagttggcattcattgtgaagcattgggctaaaactcgacgtgtaaatgaaacttatcaaggaacactttctagttatgcctatgtgattatgtgcattcacctcctacagctgcgaagaatactcccatgtctacaggaaatggaggccacttattatgtcaaggtggaagaaatcaactgtgcatactttgaccaagtggacaagctaaataattatggtgctcacaacagagatacagtatcaaggctgctctggtcctttttccattactgggcatatgagcacgattacacaagagatgtcatatcaattcgtactggaaggattatcagtaaggaacggaaggactggactagacgagttggaaatgacaggcatctcatatgcatcgaagatccgtttgagatctcccatgatctcggtcgcgtagttgacaagttcaccatcaaaatactcagggaggaattcgagcgagcagctaatatattacagttcgatccaaaccccagcgtaacactctttgagccctacgtgccccctccatcgccgagcctgttgcaagaagaaactgcgaatgctgcagaaattgaactatgatagcgtttggttcgtccccagggatcacaagtcagttcccgaacttaaaaatcattcgtggtatgttctatttcaactcaagggatcacaagtcagctaccatatcacatgtcctattttatttctatttcaaacttcattcggc

SEQ ID NO: 53284 - DNA, 2601 bp, Zea Mays
cgagaaggtaccaaagctgggaaaatatcgtcacagaggcccaggtcctcgccgcccccgatggccgactcctccggtcgcagtggcggccgccccacgtcagcctcgccatccactgccacacacacctcaccggcgtctttcgacggcggtctcctactccgcctcctccaaaaccctccttctgcgcacccgcgagaggaaatcctcgccccgtcccccgttgccccgggggcgcaccacttctttagtgaccctgccgtcgccgccgtggggcctctcttcgccgcatcggcgcagacgcaaggaggggacttcgggtggtcctccacctcgaccacgcacgtacagcagcaaccccgattctcggatccccgattcgctccaggggaccccttcgctgctcttggcggtagagggttcggatctggggatgcggttagggcggagaggcctcggtcgggggcgccgcctccagggtttggcaagccgtcgcatccacttcctgctgcccgtgatgcgcggagtgcatctggtgtggtattgcgtaaggagcagtacaatcctcgtcccgtggatttcgttccggctcttgcagatgttcgtgatccggttggcagaatgcctcatggacacggagagcagttttacagggaacagcagcaagatcgttttttgtcacggaccccgcctgagatcaatgccaatggacagtttggcaggatgccaattggagagcagcatacacttcctatcttaggtggcaggaggctccatgtagatcagtacatgcctcccgtccaggaaggcagggcaccacatggtggtcatggcaagcatgaatcccgcttaaccaatccgctacaaagggagcagaggtggcagggtcttagggaggacaagggctatgcttcgcggaagctgccaaatgtgaatgcccattacacatctggtaaggcactggtgaaggaggtgcaccatttgacaatacctgctggcagttcagttccagtggaaattacggagaatcaagcgagtggtttggaaggaggcagaatagggaaagtagttttggaggatggaattgatgaagaaggggtagtggaggcaaggaagatgctataattgagcagatggcacaaaatctgctgattgatggcaatggtgatgccaagggagtagtgttggaaaaacctatcctgaggagtaaggatttcagatcagatttttctagagggcatcatgtatcaagtcagagaataagattccagaggagaaacaggccatgtcgatatgacatagatcgatttacacctaacttcttgtcaatttttgaatctttggtgccctctgaagaggaaattgcaaatcagaaacagttgttaacatctctaagcagactgataaacacagaatggcctaattcaaaactatacctctatggatcatgtgccaattcttttggtttctcaaatagtgatattgatctttgtctctcgattgataacaaggaaatgagcaaggttgatattatattgaaattggcagatattttccaagctggaaatctccagaatattcagccattaactcgagcaagggtcccaatagtgaagcttatggatccaaaaacagggctttcctgtgatatatgcgtcaataatcttttagcagttgttaacacaaaacttttgcgagattatggacaaatagataaaaggttacagcagttggcattcattgtgaagcattgggctaaaactcgacgtgtaaatgaaacttatcaaggaacactttctagttatgcctatgtgattatgtgcattcacctcctacagctgcgaagaatactcccatgtctacaggtttctgggaaatggaggccacttattatgtcaaggtggaagaaatcaactgtgcatactttgaccaagtggacaagctaaataattatggtgctcacaacagagatacagtatcaaggctgctctggtcctttttccattactgggcatatgagcacgattacacaagagatgtcatatcaattcgtactggaaggattatcagtaaggaacggaaggactggactagacgagttggaaatgacaggcatctcatatgcatcgaagatccgtttgagatctcccatgatctcggtcgcgtagttgacaagttcaccatcaaaatactcagggaggaattcgagcgagcagctaatatattacagttcgatccaaaccccagcgtaacactctttgagccctacgtgccccctccatcgccgagcctgttgcaagaagaaactgcgaatgctgcagaaattgaactatgatagcgtttggttcgtccccaggtattgtaataggaaatagaatcaactcaaggattttgatccttgcatcactggttgcagcctttggttggatgtgtaaatggtattgtttaccgttacagctgtttggtttctatctcagggatcacaagtcagttcccgaacttaaaaatcattcgtggtatgttctatttcaactcaagggatcacaagtcagctaccatatcacatgtcctattttatttctatttcaaacttcattcggc

SEQ ID NO: 53285 - DNA, 2398 bp, Zea Mays
gaaaaatagaacgagaaggtaccaaagctgggaaaatatcgtcacagaggcccaggtcctcgccgcccccgatggccgactcctccggtcgcagtggcggccgccccacgtcagcctcgccatccactgccacacacacctcaccggcgtctttcgacggcggtctcctactccgcctcctccaaaaccctccttctgcgcacccgcgagaggaaatcctcgccccgtcccccgttgccccgggggcgcaccacttctttagtgaccctgccgtcgccgccgtggggcctctcttcgccgcatcggcgcagacgcaaggaggggacttcgggtggtcctccacctcgaccacgcacgtacagcagcaaccccgattctcggatccccgattcgctccaggggaccccttcgctgctcttggcggtagagggttcggatctggggatgcggttagggcggagaggcctcggtcgggggcgccgcctccagggtttggcaagccgtcgcatccacttcctgctgcccgtgatgcgcggagtgcatctggtgtggtattgcgtaaggagcagtacaatcctcgtcccgtggatttcgttccggctcttgcagatgttcgtgatccggttggcagaatgcctcatggacacggagagcagttttacagggaacagcagcaagatcgttttttgtcacggaccccgcctgagatcaatgccaatggacagtttggcaggatgccaattggagagcagcatacacttcctatcttaggtggcaggaggctccatgtagatcagtacatgcctcccgtccaggaaggcagggcaccacatggtggtcatggcaagcatgaatcccgcttaaccaatccgctacaaagggagcagaggtggcagggtcttagggaggacaagggctatgcttcgcggaagctgccaaatgtgaatgcccattacacatctggtaaggcactggtgaaggaggtgcaccatttgacaatacctgctggcagttcagttccagtggaaattacggagaatcaagcgagtggtttggaaggaggcagaatagggaaagtagttttggaggatggaattgatgaagaaggggtagtggaggcaagtaagtttgaagtgtcatatgaaaagagtaagattagatttgctggacatgatgaacaagatgatggtggtgacagggaagatgctataattgagcagatggcacaaaatctgctgattgatggcaatggtgatgccaagggagtagtgttggaaaaacctatcctgaggagtaaggatttcagatcagatttttctagagggcatcatgtatcaagtcagagaataagattccagaggagaaacaggccatgtcgatatgacatagatcgatttacacctaacttcttgtcaatttttgaatctttggtgccctctgaagaggaaattgcaaatcagaaacagttgttaacatctctaagcagactgataaacacagaatggcctaattcaaaactatacctctatggatcatgtgccaattcttttggtttctcaaatagtgatattgatctttgtctctcgattgataacaaggaaatgagcaaggttgatattatattgaaattggcagatattttccaagctggaaatctccagaatattcaggaaatggaggccacttattatgtcaaggtggaagaaatcaactgtgcatactttgaccaagtggacaagctaaataattatggtgctcacaacagagatacagtatcaaggctgctctggtcctttttccattactgggcatatgagcacgattacacaagagatgtcatatcaattcgtactggaaggattatcagtaaggaacggaaggactggactagacgagttggaaatgacaggcatctcatatgcatcgaagatccgtttgagatctcccatgatctcggtcgcgtagttgacaagttcaccatcaaaatactcagggaggaattcgagcgagcagctaatatattacagttcgatccaaaccccagcgtaacactctttgagccctacgtgccccctccatcgccgagcctgttgcaagaagaaactgcgaatgctgcagaaattgaactatgatagcgtttggttcgtccccaggtattgtaataggaaatagaatcaactcaaggattttgatccttgcatcactggttgcagcctttggttggatgtgtaaatggtattgtttaccgttacagctgtttggtttctatctcagggatcacaagtcagttcccgaacttaaaaatcattcgtggtatgttctatttcaactcaagggatcacaagtcagctaccatatcacatgtcctattttatttctatttcaaacttcattcggc

SEQ ID NO: 53286 - DNA, 1717 bp, Zea Mays
cgagaaggtaccaaagctgggaaaatatcgtcacagaggcccaggtcctcgccgcccccgatggccgactcctccggtcgcagtggcggccgccccacgtcagcctcgccatccactgccacacacacctcaccggcgtctttcgacggcggtctcctactccgcctcctccaaaaccctccttctgcgcacccgcgagaggaaatcctcgccccgtcccccgttgccccgggggcgcaccacttctttagtgaccctgccgtcgccgccgtggggcctctcttcgccgcatcggcgcagacgcaaggaggggacttcgggtggtcctccacctcgaccacgcacgtacagcagcaaccccgattctcggatccccgattcgctccaggggaccccttcgctgctcttggcggtagagggttcggatctggggatgcggttagggcggagaggcctcggtcgggggcgccgcctccagggtttggcaagccgtcgcatccacttcctgctgcccgtgatgcgcggagtgcatctggtgtggtattgcgtaaggagcagtacaatcctcgtcccgtggatttcgttccggctcttgcagatgttcgtgatccggttggcagaatgcctcatggacacggagagcagttttacagggaacagcagcaagatcgttttttgtcacggaccccgcctgagatcaatgccaatggacagtttggcaggatgccaattggagagcagcatacacttcctatcttaggtggcaggaggctccatgtagatcagtacatgcctcccgtccaggaaggcagggcaccacatggtggtcatggcaagcatgaatcccgcttaaccaatccgctacaaagggagcagaggtggcagggtcttagggaggacaagggctatgcttcgcggaagctgccaaatgtgaatgcccattacacatctggtaaggcactggtgaaggaggtgcaccatttgacaatacctgctggcagttcagttccagtggaaattacggagaatcaagcgagtggtttggaaggaggcagaatagggaaagtagttttggaggatggaattgatgaagaaggggtagtggaggcaagtaagtttgaagtgtcatatgaaaagagtaagattagatttgctggacatgatgaacaagatgatggtggtgacagggaagatgctataattgagcagatggcacaaaatctgctgattgatggcaatggtgatgccaagggagtagtgttggaaaaacctatcctgaggagtaaggatttcagatcagatttttctagagggcatcatgtatcaagtcagagaataagattccagaggagaaacaggccatgtcgatatgacatagatcgatttacacctaacttcttgtcaatttttgaatctttggtgccctctgaagaggaaattgcaaatcagaaacagttgttaacatctctaagcagactgataaacacagaatggcctaattcaaaactatacctctatggatcatgtgccaattcttttggtttctcaaatagtgatattgatctttgtctctcgattgataacaaggaaatgagcaaggttgatattatattgaaattggcagatattttccaagctggaaatctccagaatattcaggaaaacagctatccatgtgcctaaaccttgatcattttggtcgcctgggagatttgga

SEQ ID NO: 53287 - DNA, 785 bp, Zea Mays
acacagacacagcgcggagccgccacttctcttctcagcgctcccaatctggcggcggcggcacgccggcacccacccgaagcactagtctgcaccaaagattggatagctggagcaagaaaaaggttccaaggctaagagtgttgctattcctaatatggtttatgaaatggatgaacttgaggctcttgcaagaaatatttcatttgaggatgaagacctagatgatgatgatcatgatgatggacctgaggcatcgttgtaagcttgttgatgaagatctagatgataataacgtaccatgaatgctatgaatgtttcttattgtacttgctccgtaatgttttgtgaccttgcgaacttgggacttgtggctttgtgaactttatgatgaacttgttatattgtgtacttgtgttctttgtgatcaacttatcatattgtgaacttgtgatctatgttatcaatttgtaatattgtgaacttgtgatatttgtgatcaaactattatattgtgaacttgtggtctttgtgatcaattttttatattgtgaattgtgaacttgtggtctttgtgatatttgtaaactttgttgtattctgaacttgttatattgacatatggttaccgattgtatttaaggttccgaccggtaccgatgtattttctgtaccgaactttcgattccgatgtttccgaaataccgatatcgtttctgtttccgaagttaccgtttccgatttcgtttccgataaaaaaaatatggaaacggtaacggttttag

SEQ ID NO: 53288 - DNA, 1030 bp, Zea Mays
acacagacacagcgcggagccgccacttctcttctcagcgctcccaatctggcggcggcggcacgccggcacccacccgatgtatcaatactatgtctctactacaccctcatcatcatctgttgcaccttcctcaacttcagcagttgacatgattaagtcaagtatcgaagaagagcttgatagctacatatttgatggacaaggtcatgatgattctattgacacaagtgacttagaaaaatatttggcagatccaatactaaaggttggtaaaagtaatcaacacacttttgacatattagcatggtggaaagcacacaaagaagatagtctgcaccaaagattggatagctggagcaagaaaaaggttccaaggctaagagtgttgctattcctaatatggtttatgaaatggatgaacttgaggctcttgcaagaaatatttcatttgaggatgaagacctagatgatgatgatcatgatgatggacctgaggcatcgttgtaagcttgttgatgaagatctagatgataataacgtaccatgaatgctatgaatgtttcttattgtacttgctccgtaatgttttgtgaccttgcgaacttgggacttgtggctttgtgaactttatgatgaacttgttatattgtgtacttgtgttctttgtgatcaacttatcatattgtgaacttgtgatctatgttatcaatttgtaatattgtgaacttgtgatatttgtgatcaaactattatattgtgaacttgtggtctttgtgatcaattttttatattgtgaattgtgaacttgtggtctttgtgatatttgtaaactttgttgtattctgaacttgttatattgacatatggttaccgattgtatttaaggttccgaccggtaccgatgtattttctgtaccgaactttcgattccgatgtttccgaaataccgatatcgtttctgtttccgaagttaccgtttccgatttcgtttccgataaaaaaaatatggaaacggtaacggttttag

SEQ ID NO: 53289 - DNA, 1104 bp, Zea Mays
cacacagacacagcgcggagccgccacttctcttctcagcgctcccaatctggcggcggcggcacgccggcacccacccgttgacatgattaagtcaagtatcgaagaagagcttgatagctacatatttgatggacaaggtcatgatgattctattgacacaagtgacttagaaaaatatttggcagatccaatactaaaggttggtaaaagtaatcaacacacttttgacatattagcatggtggaaagcacacaaagaagaatatcctgtcttgggccagcttgctcgtgatgtcttagctatgcaagtgtcaacagtagcttcagaatcttcttttagtgttggtggtcgtgtacttaatccatttcgtactcgccttgaccctaccatggtagaagcactagtctgcaccaaagattggatagctggagcaagaaaaaggttccaaggctaagagtgttgctattcctaatatggtttatgaaatggatgaacttgaggctcttgcaagaaatatttcatttgaggatgaagacctagatgatgatgatcatgatgatggacctgaggcatcgttgtaagcttgttgatgaagatctagatgataataacgtaccatgaatgctatgaatgtttcttattgtacttgctccgtaatgttttgtgaccttgcgaacttgggacttgtggctttgtgaactttatgatgaacttgttatattgtgtacttgtgttctttgtgatcaacttatcatattgtgaacttgtgatctatgttatcaatttgtaatattgtgaacttgtgatatttgtgatcaaactattatattgtgaacttgtggtctttgtgatcaattttttatattgtgaattgtgaacttgtggtctttgtgatatttgtaaactttgttgtattctgaacttgttatattgacatatggttaccgattgtatttaaggttccgaccggtaccgatgtattttctgtaccgaactttcgattccgatgtttccgaaataccgatatcgtttctgtttccgaagttaccgtttccgatttcgtttccgataaaaaaaatatggaaacggtaacggttttag

SEQ ID NO: 53290 - DNA, 982 bp, Zea Mays
cacggcagtacggtccacacagacacagcgcggagccgccacttctcttctcagcgctcccaatctggcggcggcggcacgccggcacccacccgcagttgacatgattaagtcaagtatcgaagaagagcttgatagctacatatttgatggacaaggtcatgatgattctattgacacaagtgacttagaaaaatatttggcagatccaatactaaaggttggtaaaagtaatcaacacacttttgacatattagcatggtggaaagcacacaaagaagatagtctgcaccaaagattggatagctggagcaagaaaaaggttccaaggctaagagtgttgctattcctaatatggtttatgaaatggatgaacttgaggctcttgcaagaaatatttcatttgaggatgaagacctagatgatgatgatcatgatgatggacctgaggcatcgttgtaagcttgttgatgaagatctagatgataataacgtaccatgaatgctatgaatgtttcttattgtacttgctccgtaatgttttgtgaccttgcgaacttgggacttgtggctttgtgaactttatgatgaacttgttatattgtgtacttgtgttctttgtgatcaacttatcatattgtgaacttgtgatctatgttatcaatttgtaatattgtgaacttgtgatatttgtgatcaaactattatattgtgaacttgtggtctttgtgatcaattttttatattgtgaattgtgaacttgtggtctttgtgatatttgtaaactttgttgtattctgaacttgttatattgacatatggttaccgattgtatttaaggttccgaccggtaccgatgtattttctgtaccgaactttcgattccgatgtttccgaaataccgatatcgtttctgtttccgaagttaccgtttccgatttcgtttccgataaaaaaaatatggaaacggtaacggttttag

SEQ ID NO: 53291 - DNA, 755 bp, Zea Mays
cacggcagtacggtccacacagacacagcgcggagccgccacttctcttctcagcgctcccaatctggcggcggcggcacgccggcacccacccggttccaaggctaagagtgttgctattcctaatatggtttatgaaatggatgaacttgaggctcttgcaagaaatatttcatttgaggatgaagacctagatgatgatgatcatgatgatggacctgaggcatcgttgtaagcttgttgatgaagatctagatgataataacgtaccatgaatgctatgaatgtttcttattgtacttgctccgtaatgttttgtgaccttgcgaacttgggacttgtggctttgtgaactttatgatgaacttgttatattgtgtacttgtgttctttgtgatcaacttatcatattgtgaacttgtgatctatgttatcaatttgtaatattgtgaacttgtgatatttgtgatcaaactattatattgtgaacttgtggtctttgtgatcaattttttatattgtgaattgtgaacttgtggtctttgtgatatttgtaaactttgttgtattctgaacttgttatattgacatatggttaccgattgtatttaaggttccgaccggtaccgatgtattttctgtaccgaactttcgattccgatgtttccgaaataccgatatcgtttctgtttccgaagttaccgtttccgatttcgtttccgataaaaaaaatatggaaacggtaacggttttag

SEQ ID NO: 53292 - DNA, 3617 bp, Zea Mays
ctcgatgcggtgggcgatcgaaggcgcaacgttggtgtgaagacggtgcggcctataagaatgtgttggtgtcttcacagtcccttgtttctcgtctcgaggaagggaatggtgatgacagttgggtgaaggtggaaggtcatcgagctcgtcgcttagcccgctgcccttccaagccagctcccaggcccgttcctgttgatctgcgggtaagatgcttcaattgattctttttttatcaccgagcggcgaggtgtcggaaccgtgtacggtgcttcctctgtcggctgccggggcaccgtgtttacgtgtgcccacaccggcagacagtctaggtcgttcctaggcgcaagttgatgtggcggcgagtctccaaggaagtcccggcaggcgctagtgcggagcatgccatggcgggcggctcagcgttgggtggttccgctaccactgatggtgggaagcgacatactcgtcgcggacagcgaaagcgtaggatcaaggctggtgatggacttggcgatcatggcgtggccggcagcgttccattgctgctatcattgaagaattcgtcgcctactgctttggatgatgctcgacctttgagaatcattgggcgttctgggaagatcgatcgtgctgatattgagcttcattgtgctctcatcgtcagcgttattggacagaagggctctggtcgcgccagcgaggtccgggatgcgctcgccttgaggtttgaccttgacgctgatgcgctccacctacgtaatgttgcgtcaggttccttcctcttcttcccttcagaggacctagctattcgagtcttcaatgggggagcaccacttcacgtccctcctctccggatgcatgttaagaggtggtctcgtcaagcttttgcttccggtagcagtgtcatgccttccctaatcgacattgagctctagggtgttcctgctcacctctggggaattgagacgatggaggctctgcttggttcattctgtctgttatcaagttgaaggcatggtgccactctcctaatcggctgccggaggtgttgggcctccatgctgtggagccagcggtccttggcgaggacggggattgggttccacgttcgttggtgttccctgtgacggtgaaggttcttcgacccttagtaaccgggaaccgggaacttggccacgttcctcgttccgggaacgttcgttccgttccgagaacgtgggaacaatctcgttccagtagtgttaaatcctagttttagtagcgtaccgtgtaccacgttcccgttcatcgatcccatcgatccgggaacctggttactaagcttcgaccgaagggtgtcctgggggaggagcaacctcctctacctccaccggatctctctaatgatggtcgggatcaagatcgtcgtgaacggcggccacggctgctgggccatcaggcctcatctgctcaggcctcggtgcactagcggctgggccattcaatcggcgccgatgcatggaccttcagatgattcatgctgcccatcaacctcagtgggtgcattggcggcacctgtttttcctaggcgtgtctcttcggtttcattgactggaccagttgatgcccctgctctcccacatgtttcggttgaggagttggcggcgcctggtgttcctgactttttgaattcttgtccgaaggtgtctaccctgggcgtcaaggtgctacatgttgttatggcccctgctctagtgggaccaaatgctcattttatagtgtatcagtctcgcttcgaatctggtattgctgttggggaggctgacctttagtatctaaaccggtgggatcacatatggattctggtgcccctgctgaaatggtcgttgtaccggtggaaggtcaggaggttggcttggatacttcgattatgtctgaacagattgctgctgtgagttgcaatgacaaagattcttcttgtctgttgattggggtcgtctagcaagatgttgttaaggaatcttccagggtgaagagttcgacgactggtgtattgtttgggtcagccagttggagagcgaagccaccatgtttcaaagtctattccagaagaaggtctctgactatgcctgatcatgatgacatcctagtgtagctagctctggatgtatcttgtgaaatttcctcacctttgaaggagttccaaagtatggtcactaagccagttgatggcttgctgccacctccacagactatcaagagaaggaaaaagaccctaccaagtaattttcagcccaggcgaagcaggagggtggtcaaattccctccagagctcgaattcgaatcggctgcccaggtctgcaggcatctaggtttctgtgatgttaatgaagttatttccctccaggacgccagaaagtatgtgaagttatttgatattgggctctctagcaatcacattgctgcgttggcagctctatttggctgggtgtttcctcaagacagacctgtttaggtgctgtttttggtgatatgctggtagtcttccatttgtttttatatggagtctagctgttttctgatatggaatgcaagaggtctgaatgaccatgcgaaaagagactcagttaaatatctggtggtcgatattaggccttcaatcgtttgcctgcaggaaaccaaattgtgttctatttcagactttgatattctttccattcttgggtccgggtttagtaattttgtatatagcccagatgttggaaccagaggagtgttgatatcttggcgtgatggggctttttcttcagtggcttcagttatcaagcagttttttgtttcagttcaattccaggaagggaatggtgattgctggtggttcatcaggacaatcttaagccatctttccttcaagaattaagagagatcagagatgaatgtgagggactgtggatcattggtggtgattttaatctgatttatagggaggaagacaagaacgatcccaatataaacagggctatgctgggtagcttccgtggacttgttaattccttgaatctgaaggaagttccattgaagggaaggagatatacttggtccaatcagaggaatgatcccactcttgttaagttggaccatgtattccgcacaagcagttgggaggatttatttttggatgcttctcttcatagtaatgctaccacatcttcatatcattgtcccttaaccctcaaagtcagagaggtctgcatggggaagcgatggttccacttcaagagtttttggcttgaattccctgggtttctggaggtggtggctgcatcttggaacctgccagttcagagctcctgtcctctgaaaagggtgtcattgaagctaaaaagattggctcgtgtaaaaagctatagcagagctataccaaagctatgatgggcgctttagaatcacatgaatatagttaataaagaataaacaaacaatagttcttggtctatgcccacttagttcacttcaaaaacaaaccattaataagaaaaaataagaaagaatcttgtaccaaccacaagcagaaaaagattaaaaaaccaagaaaaaaacttagcaaacagttctttttaagttaaaaatat

SEQ ID NO: 53293 - DNA, 3410 bp, Zea Mays
aattcaatccattcacatcacagctagctagctatgtatgaggttacctgtccattcttcaatcctctacgaagtgagtagtccatggaatctgccatagctgcggttgcaggtgagctcgtcagccggttcatctccttcgcgttgaacagatgctgctcctcaagctacgaaagatcggaggagaagcgggagaggctgcggcacctcctgatgaggtctcacaccgtcgtcgaggaggcagatgcacggcacatcaccaactccgggatgctgacgcagctgaaggtgctgtcggaggccatgtaccagggctaccatgcgctggacgccctgagattccagctcgacgacgagttcttgctccggcggcgaaaggggagggcaaggcacaggccgcactggagaacctggaaacagccatggcgaacagcgcagagttcgtcgcgcttctgtgcgggtgtgagcgcctgtcccgtcggccctacgacgcgtacctctacctcgggagtatcatgtttggccgacacgccgagaagcaaaggctcctcaacttcttgctgcagcagcagccaggcgacgacggcgcaccgcctcccgtcctcccaatcgtcggcgctcttgcggccgggaagaaaactctggtcgcccacgtgtgcgccgacgacagggtgcgctcgaaattcgcttcggtgctccatctgagaggagacgacttcctcctgaacaccgtccaccatgagaaggccatgctgctgggggtatcgtcactcgtagttgtcgagcttgtctcggacgtaggcgacgaggaatgggacgcgttctactcgttcgtggcgagagcggctagtgcaggaagcaaggtgatcgtcatagccaagcatgcaagatcagtagcaaggtttggtgggtcagcaagaccaccaatctttctcggcgctctgtcgtacgaggagttctggtacctgttcaagaacctggcgttccaagccgcggacccgggcgagcatccaaggctagtgcacatagcagaggggtttgctaaggaactgcaccagggtggatcgcttgtcgcagcgaacgcgttggctgatgtgctgagaagaaacctgaacgctcaggtctggctgtcgatactgaacaggtgcagaagagtggtcgagaagaacctctgcgcctacgggcagcaaccgaagctgctcctggagcaaggccgtgaggtggacataacggagttcgtcgttccgagccctgctggtattggtcaccttcgcatgataccttgtactagtagaggtagtagcaaggcttactctcgagttgtcaatgatctaccaaaggtggcgtttggagagctactgttagatccttctgttaggcccaaaggagaatttagtctgctgacgtggaaatcaaggttacccccttatacttcattcatcaacttcgttccagattgcaccgcagacatgcctcaaggacatagcttgtcaggcaggaagcgccaagcagtgcctttctgataacacaatgtatttacatgtcggatgtactgttttcagacatctagctacagtgattattgaacagtttgcaagctactgctggaatgttgtttacaaaaccagacaggagtggtgttgtttactgtttcaagagagacactcagacagaaatagtgcgatgtggaactaaccaactttacacctctccactttcgacccttcaacactacaattttacttggccaaacaacattttttttcttttgctaaggaaaatgtgttgcacaaggccgggtatcgatttgcaccccctcgccctctaaaatactagtcagtagtcatatgaccatagatggtcatgcacgtatggtacaggcacaactcatataataaagctcgttatcccccattgttgccattcaagttggtccacatgatctgacaacatgagaaaagtgaagtctttacagacaagtatgctgcatcgacgacgaccaattcacatggtccctagttcccgttcctgtgactctcctcatctaccgcgtcctcaaaacgttggtcattgatctggagctgcacatataaataccagttgcgttaccaatcaacttggaaagatcgaaaatatatatcagttgcgttaccaatcaacttggaaacgtcgaaggacccagatccaatggcttaggctaccaagggaggctatatctgaacttcaaatattacagtcctgatgaagtatttccatcaggttcatagatgatgctccctctgtcccaaactaaaattcgttgactttttaatgggttggtgtatgtgttctatatatatgtctacattcatcatctagttgaatatagacataaatcaagagctaaaacaaatatgtatatgccttcataaatatactgcatgccaatacagtagggaattcagaaattgcaaaatagcacccaaataacactcttgaacagggggtgcgtgggcagacacatccagacccacaaccaagttagcatcagttcagcctaaataacatgttctgctctggttcatttaagaaaatactcgggaattagattctaattagatcttaaaatgttagcaacttcctaaactatagttctgcaaacatgttctcacaacaatcgacctatggtaggtagcagaagatatgaagacgaaacaaacattaaacaaattaaaggcagtgacaaccaaacatataaggacagctcaggctgccagatcaaagaagaaatagtgtgttggggagagccctgaccgaaggtccatattaacaagggattgtctagtttacaatttcagggtaacaaacagaatcaagttcaaagcacaagggagcttcggatcatggaggaagttgaagcttcagatggatataagctgaagctctcaaatcttcaaagcgccgtacggcacgtcaaggacatcgaatgatgaaactgcacttctatttctatgagcaacatttatgtaataggaagggtagaactgtaatttcatacaaagatgtatattagtttgagcctatagatagatgaacaatgtccattcgggcatctctgcatttgtgtcccctccccgtgtttagagaacctccaaggtatatgcttccaaaggttactgactactcaacttccattgtattcaagtctttccctaagatgcaattattggcaatgtgctttactaggttattcgattgaaggaacatgcattccaccttcaaccaatttggtgcaactcatcttttacactttgtaacttctcatgaatttaggtatattgttagaatgggtgttcctatattatccatgtatgtgggctgctcgcacattagagttagtgttcccctaggtctatatatgtaatcatcct

SEQ ID NO: 53294 - DNA, 2184 bp, Zea Mays
cgcatatacctaatatacacagatttcttcatcatatctgcctgcgtccctatccctccgtggccgatcggcggccgccgaactactgcactacagcagcggaaggggctcgtaccgtcgcatgtatacggcagccgaccaaccaaccaactccccggcagccgcaaatccttccgtcccaccgggaaacatccctctccctctgacgctgctgctactcaccctctcggatccctttccaccccacctcccagatgcggctggcgacgacagcgccggcgcctccgcctccggatccgttgatctagttgctgctgcttgattggggttaggaggaggtggaagaggagggaataggagatgttgttctggaaggacggcggcggtactggtggcggcaacggacgggaccttagcggcgggccgccctgcggccaggtgttggcaaatcttcattggtgcatctcttactgaaagattctgcagtggctcgaccagcccaaacaattgggtgtgcagttggtgttaaacatattacttacagtagcccagggagttcatctaatagcgtcaagggtgatgctgaaaggaacttctttgttgagctttgggatgtttctggacatgagcgctacaaagagtgccgttcacttttttattcacaaattaatggtgtcatatttgtttatgacctctcccagaggaaaacaaagacaaatttgaacaagtgggcagtggaggtttctgaatctgggaccttttcagctcctcttgggtctggtggtcccggtggccttccagttccttacctagttattgccaacaaagtggatattgctccaagagatggtagaagagtgagcagtggtaatcttgttgatgttgctcgtcaatgggttgaaaaacaaggtctgcttccatccagtgaagtgcttccacttgcagataactttcctggcaattctggtttgctcacggtaaagcttctctatagtctatgtaccaatatttgctgtctgatgtcttgctttaactgactgcagtgtggtgatccttaggttgtctggcttgtggagaaacaagaattcctgtttttttattgaatatgtatgtgctatgctatttaaagtttgaaataacaggtgtgacctttgaatacaggctgccaaagaggcaagatatgataaagaagctctaatcaagttcttccgcatgttgataaggagaaggtatttttcgaatgagcttcctgcccctagcccatggtcactcactcccagggaagataccattcttcccgtagaaactgtgaacgatgatgacatgttccaaagaaaaagctacggcggacagagctacaaatacaatggggttaccccactgcctgcacagcggaacctaactccgccccccacactctatccacagcagccaatgtcctcttcatcagaaaactacagataccacagattttcctcttcgtcaatacctgattcaagtggtggttcaaaaagccgagcgaaccttaatatatgatgggatatggcgccagagcattatgtttgtgggatcactagtgataattctttggttcttctctgtatatctcctaattttgtgtatgaattcaatatagttatttaggaaaacacattacatggtcagatggtctacactgtgcaacggcaatctgaatcaatcttttttcctgagtcccttcaagtcacctgggagaaatcaagtctcgtggtgttatggggcacagcaactttatataaatcagcattcagtctgatgggttttcactctatctggttccttatagacagattaaaggcatgtttggttcattacctcaattgccacattttgcctaacttttctacctaaggttagttattcaattcgaacgattaaccttaggcaaagtgtggcacatttagccacaaaccaaacatgccctatgattgtcaagcacatattttgttggcttgagaaatgtgtttggtataggcgaaccctactggcagggattttcgacaaatttgaattttagtttgaaaaaagtagcacgtggagtccacatttgtcattaattgctactttctccgttttcaagttgtaagacatttcggattttatagatatattgtttttataaacatactatggcgttgtttgaaa

SEQ ID NO: 53295 - DNA, 3637 bp, Zea Mays
tttatactctgggacataaatactaggatcttacatcgtttctggacaacactacagggatcttgtgaagacataggatggttgcaaagaactcgggcatcacttcgttcagttgatgggacaggtcacttcaaggagattttgcatgagataaggtggaacaatcacttctcatcacaggttttggatatgaacatgatgatgctaggatgaccaatataaatttgtttaaggaatttactgccctaagcagggtaagtgtttcctgaactacaattgttttttttggctttttgcagatctgcacatctgaatttcctattatcctgttgggctgcctcttttttggagtgactgtagcaaccacttctaattcattttcaattgtattgaactggatgttgaccttcctagcataattagctctattttttaaaaaaatagttcattatgtatgtttctattttttatggtaccgcctatgtttatataaatttagcctagcactgcttgaataacaagtgattgaatgaggctcatatgcaaccattaaatcaatatttatgaaccaatgtttgttaaagtaataaaacatttacaaggaccatcgatgacctcaagaagctggtggtggcgtagatgggaacgcaccccgagaagatttgcatctagaggtggtgaccccacctctgtcctcaaccgccacctcgtacctcgtcttcggcgccgccggctcctgccccccttggcacgccttcggggtcctcgctggcggcaagcacctccgtcccggaggcatctgccgctgcagcatagaccaccgcgtcctcgctcagcagcaccgatgtcgatgatggcaacaaggaggacggctccgcgagcacccccgagatctgctgctgccactcccacgcagctcttgcttgtgagatctgtgtgcaggttgatgtcctcgtggcgccacgccgacctcaccgccaccaagcgcgccacccatgtcctcaccgacctcgccaaaaactataagaataggtgtagtcactgtcggggtgtacatccaattgagttttgagttggtgtttagctttcccttaccagggacggatcaaagcaccgtaataagtgtcgatatagctctttcaattgcgcctattgttttgtgcgggctatatggatcaaggaaccctctttgcagcagaggtttgttttgtgttctgctgctagtagtcgcatgtcagtttaatcttttgagttctggaagctgttggtcccttaggtgtttgggagatccttttgaatcgaagcacacacactcaggtgctatgacctttggcatttcatagttgcatatttaactggtgtgcgaagagcaccaggatagcacccttgcagcaggaacttacttttggttgcttttctgttgcctgtcatatcccgatatttgtttcctgcaaatttactttgtttaattgtattctattgattttacagcttttgtacttgtacagttacattgtcatctggtttctattgcacgtgtagctgattagttgtagtcactatcttgcaagcatagatattagggaggtattatgtccagtcaagttttgtgttggctatgtgtagcgaattaggattgcttttcctgggatggatcagagcacatgtactgtggcgatatagttgtttcaatagtatagttgccaaattttatgtgtgtgctatatagaccagggaacccacttagaagcagaaaattttctgtgtgcgcgcgaaattttctgtgtgtgctaacaaattgcaggcaaccatcttaacaacaaaagaggctcgtacaatagcagagatgatgctaaaccacttgtgcatgcaaagtatcaaaaaggagaccagacacatgttgatgaaacatctaaaaaggtgttggcaaatcttcattggtgcatctcttactgaaagattctgcagtggctcgaccagcccaaacaattgggtgtgcagttggtgttaaacatattacttacagtagcccagggagttcatctaatagcgtcaagggtgatgctgaaaggaacttctttgttgagctttgggatgtttctggacatgagcgctacaaagagtgccgttcacttttttattcacaaattaatgaggaaaacaaagacaaatttgaacaagtgggcagtggaggtttctgaatctgggaccttttcagctcctcttgggtctggtggtcccggtggccttccagttccttacctagttattgccaacaaagtggatattgctccaagagatggtagaagagtgagcagtggtaatcttgttgatgttgctcgtcaatgggttgaaaaacaaggtctgcttccatccagtgaagtgcttccacttgcagataactttcctggcaattctggtttgctcacggtaaagcttctctatagtctatgtaccaatatttgctgtctgatgtcttgctttaactgactgcagtgtggtgatccttaggttgtctggcttgtggagaaacaagaattcctgtttttttattgaatatgtatgtgctatgctatttaaagtttgaaataacaggtgtgacctttgaatacaggctgccaaagaggcaagatatgataaagaagctctaatcaagttcttccgcatgttgataaggagaaggtatttttcgaatgagcttcctgcccctagcccatggtcactcactcccagggaagataccattcttcccgtagaaactgtgaacgatgatgacatgttccaaagaaaaagctacggcggacagagctacaaatacaatggggttaccccactgcctgcacagcggaacctaactccgccccccacactctatccacagcagccaatgtcctcttcatcagaaaactacagataccacagattttcctcttcgtcaatacctgattcaagtggtggttcaaaaagccgagcgaaccttaatatatgatgggatatggcgccagagcattatgtttgtgggatcactagtgataattctttggttcttctctgtatatctcctaattttgtgtatgaattcaatatagttatttaggaaaacacattacatggtcagatggtctacactgtgcaacggcaatctgaatcaatcttttttcctgagtcccttcaagtcacctgggagaaatcaagtctcgtggtgttatggggcacagcaactttatataaatcagcattcagtctgatgggttttcactctatctggttccttatagacagattaaaggcatgtttggttcattacctcaattgccacattttgcctaacttttctacctaaggttagttattcaattcgaacgattaaccttaggcaaagtgtggcacatttagccacaaaccaaacatgccctatgattgtcaagcacatattttgttggcttgagaaatgtgtttggtataggcgaaccctactggcagggattttcgacaaatttgaattttagtttgaaaaaagtagcacgtggagtccacatttgtcattaattgctactttctccgttttcaagttgtaagacatttcggattttatagatatattgtttttataaacatactatggcgttgtttgaaa

SEQ ID NO: 53296 - DNA, 4949 bp, Zea Mays
atcgcgcggtgcacgttctgccgctccgctcacgcccgcggccgaacgctcccccgcaccttccatcctccgcgcagccacagctgcgattccctgctccccgcaccttccatcctctgcgcagccacagccgcgattcccgccgccccgccgcgctcaccttccctcccgcggcagagtgctccctcgacggggccgccccaaccatcgccctcctcatccgccatcgcgatccactcctcgacgcaatccatctaccccacagaactgctgccggcgtggcagatctcctcctcggcacctagatctcctcggcgcgatcaacggctgagcccgctgcccccaccacacaaccgatatgctctccatggaaggtcagggacctgctcgcccatgatctccatggaaggtggtctactgtcgacggcctctccctcgtgctccttcgtcaaccccgtccgccgcgccgccgagccccgagatcgcgccgatccgccattctcgcgccctcgccccgacacgcgctcaccaccggccctcaccaacctccactcgcgttccccacaccaccctccaccccatccgcgtccgccccatccgtagcacgcgggctgcagccgccccatccctaaaatgtgggcgctggcgctaccacggctccgcaccatgcctccgcgctgccagacagcgccgggcgataccatgcccccaccccggcttcttcctgccagtgaggagcagcggaagcccgaaccgaatccaaccgagtcatctcaacgactccgccagtttccaatcgccccttttttaggcgttcaagttccttcgagatgatgacaagcagaggagagagatagcgtctccttcaatccctctggcgacaccaacaacgcatccccgtggccatcctcgattctccttgccaaggaggcgacagccaagtcgtcgcggtcacggccggcgatccactcgagggtgttcctggtgagtagcaccactgcggtggggatcggggatgggggaggcggcaatggcgatggcggggtgcagctcgccgacaaccttaagatcttcaaggctgacaacttcgatctcgacgtctagattccttccaaggctctgtgcagctgttcatccatttctcccttcgatgtcggtgtttgtccctgctatgtgtgttggatcaccattgacatatatgtggaagtaggttctctgctgaaagaatacatacctgtaacaaactggggattagaccggcatacagtgctggtaccccaccttggtcgacaatcttaaggcatgttgcaagcgcattcattctggttgcttttacttgcatctgtagctgcctaaggaccacttcaaatgtgtatgtagcagcttcagcacagcaaccagcaatggccccatagagagaatgcagataagccatcttcagtatgccatacactccatagaatacaacgccagaggatgccatactgataagagaaggcaccaatcccttatacagcgagaagaatccttcagtttggatcatgtggcgggcaacaccaatgaccccacctaaagcttcaccaccaggagcatccatctttgtcctgatctgaaaccaacagctcaaatcaggttgattagcccttgacatttatcaccaagggacaaagcacactaactgctttatactctgggacataaatactaggatcttacatcgtttctggacaacactacagggatcttgtgaagacataggatggttgcaaagaactcgggcatcacttcgttcagttgatgggacaggtcacttcaaggagattttgcatgagataaggtggaacaatcacttctcatcacaggttttggatatgaacatgatgatgctaggatgaccaatataaatttgtttaaggaatttactgccctaagcagggaccatcgatgacctcaagaagctggtggtggcgtagatgggaacgcaccccgagaagatttgcatctagaggtggtgaccccacctctgtcctcaaccgccacctcgtacctcgtcttcggcgccgccggctcctgccccccttggcacgccttcggggtcctcgctggcggcaagcacctccgtcccggaggcatctgccgctgcagcatagaccaccgcgtcctcgctcagcagcaccgatgtcgatgatggcaacaaggaggacggctccgcgagcacccccgagatctgctgctgccactcccacgcagctcttgcttgtgagatctgtgtgcaggttgatgtcctcgtggcgccacgccgacctcaccgccaccaagcgcgccacccatgtcctcaccgacctcgccaaaaactataagaataggtgtagtcactgtcggggtgtacatccaattgagttttgagttggtgtttagctttcccttaccagggacggatcaaagcaccgtaataagtgtcgatatagctctttcaattgcgcctattgttttgtgcgggctatatggatcaaggaaccctctttgcagcagaggtttgttttgtgttctgctgctagtagtcgcatgtcagtttaatcttttgagttctggaagctgttggtcccttaggtgtttgggagatccttttgaatcgaagcacacacactcaggtgctatgacctttggcatttcatagttgcatatttaactggtgtgcgaagagcaccaggatagcacccttgcagcaggaacttacttttggttgcttttctgttgcctgtcatatcccgatatttgtttcctgcaaatttactttgtttaattgtattctattgattttacagcttttgtacttgtacagttacattgtcatctggtttctattgcacgtgtagctgattagttgtagtcactatcttgcaagcatagatattagggaggtattatgtccagtcaagttttgtgttggctatgtgtagcgaattaggattgcttttcctgggatggatcagagcacatgtactgtggcgatatagttgtttcaatagtatagttgccaaattttatgtgtgtgctatatagaccagggaacccacttagaagcagaaaattttctgtgtgcgcgcgaaattttctgtgtgtgctaacaaattgcaggcaaccatcttaacaacaaaagaggctcgtacaatagcagagatgatgctaaaccacttgtgcatgcaaagtatcaaaaaggagaccagacacatgttgatgaaacatctaaaaaggtgttggcaaatcttcattggtgcatctcttactgaaagattctgcagtggctcgaccagcccaaacaattgggtgtgcagttggtgttaaacatattacttacagtagcccagggagttcatctaatagcgtcaagggtgatgctgaaaggaacttctttgttgagctttgggatgtttctggacatgagcgctacaaagagtgccgttcacttttttattcacaaattaatggtgtcatatttgtttatgacctctcccagaggaaaacaaagacaaatttgaacaagtgggcagtggaggtttctgaatctgggaccttttcagctcctcttgggtctggtggtcccggtggccttccagttccttacctagttattgccaacaaagtggatattgctccaagagatggtagaagagtgagcagtggtaatcttgttgatgttgctcgtcaatgggttgaaaaacaaggtctgcttccatccagtgaagtgcttccacttgcagataactttcctggcaattctggtttgctcacggctgccaaagaggcaagatatgataaagaagctctaatcaagttcttccgcatgttgataaggagaaggtatttttcgaatgagcttcctgcccctagcccatggtcactcactcccagggaagataccattcttcccgtagaaactgtgaacgatgatgacatgttccaaagaaaaagctacggcggacagagctacaaatacaatggggttaccccactgcctgcacagcggaacctaactccgccccccacactctatccacagcagccaatgtcctcttcatcagaaaactacagataccacagattttcctcttcgtcaatacctgattcaagtggtggttcaaaaagccgagcgaaccttaatatatgatgggatatgtaagtccttatccattatcacctggagtgtgggaaaaaaacatgacacctgggttttttggttctcaggtttttgatctttttgagttgttcatctgtctttgatttgattgtaatatgtgcatgttgacagggcgccagagcattatgtttgtgggatcactagtgataattctttggttcttctctgtatatctcctaattttgtgtatgaattcaatatagttatttaggaaaacacattacatggtcagatggtctacactgtgcaacggcaatctgaatcaatcttttttcctgagtcccttcaagtcacctgggagaaatcaagtctcgtggtgttatggggcacagcaactttatataaatcagcattcagtctgatgggttttcactctatctggttccttatagacagattaaaggcatgtttggttcattacctcaattgccacattttgcctaacttttctacctaaggttagttattcaattcgaacgattaaccttaggcaaagtgtggcacatttagccacaaaccaaacatgccctatgattgtcaagcacatattttgttggcttgagaaatgtgtttggtataggcgaaccctactggcagggattttcgacaaatttgaattttagtttgaaaaaagtagcacgtggagtccacatttgtcattaattgctactttctccgttttcaagttgtaagacatttcggattttatagatatattgtttttataaacatactatggcgttgtttgaaa

SEQ ID NO: 53297 - DNA, 4703 bp, Zea Mays
atcgcgcggtgcacgttctgccgctccgctcacgcccgcggccgaacgctcccccgcaccttccatcctccgcgcagccacagctgcgattccctgctccccgcaccttccatcctctgcgcagccacagccgcgattcccgccgccccgccgcgctcaccttccctcccgcggcagagtgctccctcgacggggccgccccaaccatcgccctcctcatccgccatcgcgatccactcctcgacgcaatccatctaccccacagaactgctgccggcgtggcagatctcctcctcggcacctagatctcctcggcgcgatcaacggctgagcccgctgcccccaccacacaaccgatatgctctccatggaaggtcagggacctgctcgcccatgatctccatggaaggtggtctactgtcgacggcctctccctcgtgctccttcgtcaaccccgtccgccgcgccgccgagccccgagatcgcgccgatccgccattctcgcgccctcgccccgacacgcgctcaccaccggccctcaccaacctccactcgcgttccccacaccaccctccaccccatccgcgtccgccccatccgtagcacgcgggctgcagccgccccatccctaaaatgtgggcgctggcgctaccacggctccgcaccatgcctccgcgctgccagacagcgccgggcgataccatgcccccaccccggcttcttcctgccagtgtaatcggccactacttctccactgctgctcgccgtctcctcaaccaccgctgcgccacacaatcctcccgcgacgtgtctgattcaagccaggatgtctcacaggaggagcagcggaagcccgaaccgaatccaaccgagtcatctcaacgactccgccagtttccaatcgccccttttttaggcgttcaagttccttcgagatgatgacaagcagaggagagagatagcgtctccttcaatccctctggcgacaccaacaacgcatccccgtggccatcctcgattctccttgccaaggaggcgacagccaagtcgtcgcggtcacggccggcgatccactcgagggtgttcctggtgagtagcaccactgcggtggggatcggggatgggggaggcggcaatggcgatggcggggtgcagctcgccgacaaccttaagatcttcaaggctgacaacttcgatctcgacgtctagattccttccaaggctctgtgcagctgttcatccatttctcccttcgatgtcggtgtttgtccctgctatgtgtgttggatcaccattgacatatatgtggaactgcctaaggaccacttcaaatgtgtatgtagcagcttcagcacagcaaccagcaatggccccatagagagaatgcagataagccatcttcagtatgccatacactccatagaatacaacgccagaggatgccatactgataagagaaggcaccaatcccttatacagcgagaagaatccttcagtttggatcatgtggcgggcaacaccaatgaccccacctaaagcttcaccaccaggagcatccatctttgtcctgatctgaaaccaacagctcaaatcaggatcttacatcgtttctggacaacactacagggatcttgtgaagacataggatggttgcaaagaactcgggcatcacttcgttcagttgatgggacaggtcacttcaaggagattttgcatgagataaggtggaacaatcacttctcatcacaggttttggatatgaacatgatgatgctaggatgaccaatataaatttgtttaaggaatttactgccctaagcagggaccatcgatgacctcaagaagctggtggtggcgtagatgggaacgcaccccgagaagatttgcatctagaggtggtgaccccacctctgtcctcaaccgccacctcgtacctcgtcttcggcgccgccggctcctgccccccttggcacgccttcggggtcctcgctggcggcaagcacctccgtcccggaggcatctgccgctgcagcatagaccaccgcgtcctcgctcagcagcaccgatgtcgatgatggcaacaaggaggacggctccgcgagcacccccgagatctgctgctgccactcccacgcagctcttgcttgtgagatctgtgtgcaggttgatgtcctcgtggcgccacgccgacctcaccgccaccaagcgcgccacccatgtcctcaccgacctcgccaaaaactataagaataggtgtagtcactgtcggggtgtacatccaattgagttttgagttggtgtttagctttcccttaccagggacggatcaaagcaccgtaataagtgtcgatatagctctttcaattgcgcctattgttttgtgcgggctatatggatcaaggaaccctctttgcagcagaggtttgttttgtgttctgctgctagtagtcgcatgtcagtttaatcttttgagttctggaagctgttggtcccttaggtgtttgggagatccttttgaatcgaagcacacacactcaggtgctatgacctttggcatttcatagttgcatatttaactggtgtgcgaagagcaccaggatagcacccttgcagcaggaacttacttttggttgcttttctgttgcctgtcatatcccgatatttgtttcctgcaaatttactttgtttaattgtattctattgattttacagcttttgtacttgtacagttacattgtcatctggtttctattgcacgtgtagctgattagttgtagtcactatcttgcaagcatagatattagggaggtattatgtccagtcaagttttgtgttggctatgtgtagcgaattaggattgcttttcctgggatggatcagagcacatgtactgtggcgatatagttgtttcaatagtatagttgccaaattttatgtgtgtgctatatagaccagggaacccacttagaagcagaaaattttctgtgtgcgcgcgaaattttctgtgtgtgctaacaaattgcaggcaaccatcttaacaacaaaagaggctcgtacaatagcagagatgatgctaaaccacttgtgcatgcaaagtatcaaaaaggagaccagacacatgttgatgaaacatctaaaaaggtgttggcaaatcttcattggtgcatctcttactgaaagattctgcagtggctcgaccagcccaaacaattgggtgtgcagttggtgttaaacatattacttacagtagcccagggagttcatctaatagcgtcaagggtgatgctgaaaggaacttctttgttgagctttgggatgtttctggacatgagcgctacaaagagtgccgttcacttttttattcacaaattaatggtgtcatatttgtttatgacctctcccagaggaaaacaaagacaaatttgaacaagtgggcagtggaggtttctgaatctgggaccttttcagctcctcttgggtctggtggtcccggtggccttccagttccttacctagttattgccaacaaagtggatattgctccaagagatggtagaagagtgagcagtggtaatcttgttgatgttgctcgtcaatgggttgaaaaacaaggtctgcttccatccagtgaagtgcttccacttgcagataactttcctggcaattctggtttgctcacggctgccaaagaggcaagatatgataaagaagctctaatcaagttcttccgcatgttgataaggagaaggtatttttcgaatgagcttcctgcccctagcccatggtcactcactcccagggaagataccattcttcccgtagaaactgtgaacgatgatgacatgttccaaagaaaaagctacggcggacagagctacaaatacaatggggttaccccactgcctgcacagcggaacctaactccgccccccacactctatccacagcagccaatgtcctcttcatcagaaaactacagataccacagattttcctcttcgtcaatacctgattcaagtggtggttcaaaaagccgagcgaaccttaatatatgatgggatatggcgccagagcattatgtttgtgggatcactagtgataattctttggttcttctctgtatatctcctaattttgtgtatgaattcaatatagttatttaggaaaacacattacatggtcagatggtctacactgtgcaacggcaatctgaatcaatcttttttcctgagtcccttcaagtcacctgggagaaatcaagtctcgtggtgttatggggcacagcaactttatataaatcagcattcagtctgatgggttttcactctatctggttccttatagacagattaaaggcatgtttggttcattacctcaattgccacattttgcctaacttttctacctaaggttagttattcaattcgaacgattaaccttaggcaaagtgtggcacatttagccacaaaccaaacatgccctatgattgtcaagcacatattttgttggcttgagaaatgtgtttggtataggcgaaccctactggcagggattttcgacaaatttgaattttagtttgaaaaaagtagcacgtggagtccacatttgtcattaattgctactttctccgttttcaagttgtaagacatttcggattttatagatatattgtttttataaacatactatggcgttgtttgaaa

SEQ ID NO: 53298 - DNA, 5155 bp, Zea Mays
atcgcgcggtgcacgttctgccgctccgctcacgcccgcggccgaacgctcccccgcaccttccatcctccgcgcagccacagctgcgattccctgctccccgcaccttccatcctctgcgcagccacagccgcgattcccgccgccccgccgcgctcaccttccctcccgcggcagagtgctccctcgacggggccgccccaaccatcgccctcctcatccgccatcgcgatccactcctcgacgcaatccatctaccccacagaactgctgccggcgtggcagatctcctcctcggcacctagatctcctcggcgcgatcaacggctgagcccgctgcccccaccacacaaccgatatgctctccatggaaggtcagggacctgctcgcccatgatctccatggaaggtggtctactgtcgacggcctctccctcgtgctccttcgtcaaccccgtccgccgcgccgccgagccccgagatcgcgccgatccgccattctcgcgccctcgccccgacacgcgctcaccaccggccctcaccaacctccactcgcgttccccacaccaccctccaccccatccgcgtccgccccatccgtagcacgcgggctgcagccgccccatccctaaaatgtgggcgctggcgctaccacggctccgcaccatgcctccgcgctgccagacagcgccgggcgataccatgcccccaccccggcttcttcctgccagtgaggagcagcggaagcccgaaccgaatccaaccgagtcatctcaacgactccgccagtttccaatcgccccttttttaggcgttcaagttccttcgagatgatgacaagcagaggagagagatagcgtctccttcaatccctctggcgacaccaacaacgcatccccgtggccatcctcgattctccttgccaaggaggcgacagccaagtcgtcgcggtcacggccggcgatccactcgagggtgttcctggtgagtagcaccactgcggtggggatcggggatgggggaggcggcaatggcgatggcggggtgcagctcgccgacaaccttaagatcttcaaggctgacaacttcgatctcgacgtctagattccttccaaggctctgtgcagctgttcatccatttctcccttcgatgtcggtgtttgtccctgctatgtgtgttggatcaccattgacatatatgtggaactgcctaaggaccacttcaaatgtgtatgtagcagcttcagcacagcaaccagcaatggccccatagagagaatgcagataagccatcttcagtatgccatacactccatagaatacaacgccagaggatgccatactgataagagaaggcaccaatcccttatacagcgagaagaatccttcagtttggatcatgtggcgggcaacaccaatgaccccacctaaagcttcaccaccaggagcatccatctttgtcctgatctgaaaccaacagctcaaatcaggttgattagcccttgacatttatcaccaagggacaaagcacactaactgctttatactctgggacataaatactaggatcttacatcgtttctggacaacactacagggatcttgtgaagacataggatggttgcaaagaactcgggcatcacttcgttcagttgatgggacaggtcacttcaaggagattttgcatgagataaggtggaacaatcacttctcatcacaggttttggatatgaacatgatgatgctaggatgaccaatataaatttgtttaaggaatttactgccctaagcagggtaagtgtttcctgaactacaattgttttttttggctttttgcagatctgcacatctgaatttcctattatcctgttgggctgcctcttttttggagtgactgtagcaaccacttctaattcattttcaattgtattgaactggatgttgaccttcctagcataattagctctattttttaaaaaaatagttcattatgtatgtttctattttttatggtaccgcctatgtttatataaatttagcctagcactgcttgaataacaagtgattgaatgaggctcatatgcaaccattaaatcaatatttatgaaccaatgtttgttaaagtaataaaacatttacaaggaccatcgatgacctcaagaagctggtggtggcgtagatgggaacgcaccccgagaagatttgcatctagaggtggtgaccccacctctgtcctcaaccgccacctcgtacctcgtcttcggcgccgccggctcctgccccccttggcacgccttcggggtcctcgctggcggcaagcacctccgtcccggaggcatctgccgctgcagcatagaccaccgcgtcctcgctcagcagcaccgatgtcgatgatggcaacaaggaggacggctccgcgagcacccccgagatctgctgctgccactcccacgcagctcttgcttgtgagatctgtgtgcaggttgatgtcctcgtggcgccacgccgacctcaccgccaccaagcgcgccacccatgtcctcaccgacctcgccaaaaactataagaataggtgtagtcactgtcggggtgtacatccaattgagttttgagttggtgtttagctttcccttaccagggacggatcaaagcaccgtaataagtgtcgatatagctctttcaattgcgcctattgttttgtgcgggctatatggatcaaggaaccctctttgcagcagaggtttgttttgtgttctgctgctagtagtcgcatgtcagtttaatcttttgagttctggaagctgttggtcccttaggtgtttgggagatccttttgaatcgaagcacacacactcaggtgctatgacctttggcatttcatagttgcatatttaactggtgtgcgaagagcaccaggatagcacccttgcagcaggaacttacttttggttgcttttctgttgcctgtcatatcccgatatttgtttcctgcaaatttactttgtttaattgtattctattgattttacagcttttgtacttgtacagttacattgtcatctggtttctattgcacgtgtagctgattagttgtagtcactatcttgcaagcatagatattagggaggtattatgtccagtcaagttttgtgttggctatgtgtagcgaattaggattgcttttcctgggatggatcagagcacatgtactgtggcgatatagttgtttcaatagtatagttgccaaattttatgtgtgtgctatatagaccagggaacccacttagaagcagaaaattttctgtgtgcgcgcgaaattttctgtgtgtgctaacaaattgcaggcaaccatcttaacaacaaaagaggctcgtacaatagcagagatgatgctaaaccacttgtgcatgcaaagtatcaaaaaggagaccagacacatgttgatgaaacatctaaaaaggtgttggcaaatcttcattggtgcatctcttactgaaagattctgcagtggctcgaccagcccaaacaattgggtgtgcagttggtgttaaacatattacttacagtagcccagggagttcatctaatagcgtcaagggtgatgctgaaaggaacttctttgttgagctttgggatgtttctggacatgagcgctacaaagagtgccgttcacttttttattcacaaattaatggtgtcatatttgtttatgacctctcccagaggaaaacaaagacaaatttgaacaagtgggcagtggaggtttctgaatctgggaccttttcagctcctcttgggtctggtggtcccggtggccttccagttccttacctagttattgccaacaaagtggatattgctccaagagatggtagaagagtgagcagtggtaatcttgttgatgttgctcgtcaatgggttgaaaaacaaggtctgcttccatccagtgaagtgcttccacttgcagataactttcctggcaattctggtttgctcacggctgccaaagaggcaagatatgataaagaagctctaatcaagttcttccgcatgttgataaggagaaggtatttttcgaatgagcttcctgcccctagcccatggtcactcactcccagggaagataccattcttcccgtagaaactgtgaacgatgatgacatgttccaaagaaaaagctacggcggacagagctacaaatacaatggggttaccccactgcctgcacagcggaacctaactccgccccccacactctatccacagcagccaatgtcctcttcatcagaaaactacagataccacagattttcctcttcgtcaatacctgattcaagtggtggttcaaaaagccgagcgaaccttaatatatgatgggatatgtaagtccttatccattatcacctggagtgtgggaaaaaaacatgacacctgggttttttggttctcaggtttttgatctttttgagttgttcatctgtctttgatttgattgtaatatgtgcatgttgacagggcgccagagcattatgtttgtgggatcactagtgataattctttggttcttctctgtatatctcctaattttgtgtatgaattcaatatagttatttaggaaaacacattacatggtcagatggtctacactgtgcaacggcaatctgaatcaatcttttttcctgagtcccttcaagtcacctgggagaaatcaagtctcgtggtgttatggggcacagcaactttatataaatcagcattcagtctgatgggttttcactctatctggttccttatagacagattaaaggcatgtttggttcattacctcaattgccacattttgcctaacttttctacctaaggttagttattcaattcgaacgattaaccttaggcaaagtgtggcacatttagccacaaaccaaacatgccctatgattgtcaagcacatattttgttggcttgagaaatgtgtttggtataggcgaaccctactggcagggattttcgacaaatttgaattttagtttgaaaaaagtagcacgtggagtccacatttgtcattaattgctactttctccgttttcaagttgtaagacatttcggattttatagatatattgtttttataaacatactatggcgttgtttgaaa

SEQ ID NO: 53299 - DNA, 2282 bp, Zea Mays
atactctgggacataaatactagggatcttgtgaagacataggatggttgcaaagaactcgggcatcacttcgttcagttgatgggacaggtcacttcaaggagattttgcatgagataaggttttggatatgaacatgatgatgctaggatgaccaatataaatttgtttaaggaatttactgccctaagcagggtaagtgtttcctgaactacaattgttttttttggctttttgcagatctgcacatctgaatttcctattatcctgttgggctgcctcttttttggagtgactgtagcaaccacttctaattcattttcaattgtattgaactggatgttgaccttcctagcataattagctctattttttaaaaaaatagttcattatgtatgtttctattttttatggtaccgcctatgtttatataaatttagcctagcactgcttgaataacaagtgattgaatgaggctcatatgcaaccattaaatcaatatttatgaaccaatgtttgttaaagtaataaaacatttacaaggaccatcgatgacctcaagaagctggtggtggcgtagatgggaacgcaccccgagaagatttgcatctagaggtggtgaccccacctctgtcctcaaccgccacctcgtacctcgtcttcggcgccgccggctcctgccccccttggcacgccttcggggtcctcgctggcggcaagcacctccgtcccggaggcatctgccgctgcagcatagaccaccgcgtcctcgctcagcagcaccgatgtcgatgatggcaacaaggaggacggctccgcgagcacccccgagatctgctgctgccactcccacgcagctcttgcttgtgagatctgtgtgcaggttgatgtcctcgtggcgccacgccgacctcaccgccaccaagcgcgccacccatgtcctcaccgacctcgccaaaaactataagaataggtgtagtcactgtcggggtgtacatccaattgagttttgagttggtgtttagctttcccttaccagggacggatcaaagcaccgtaataagtgtcgatatagctctttcaattgcgcctattgttttgtgcgggctatatggatcaaggaaccctctttgcagcagaggtttgttttgtgttctgctgctagtagtcgcatgtcagtttaatcttttgagttctggaagctgttggtcccttaggtgtttgggagatccttttgaatcgaagcacacacactcaggtgctatgacctttggcatttcatagttgcatatttaactggtgtgcgaagagcaccaggatagcacccttgcagcaggaacttacttttggttgcttttctgttgcctgtcatatcccgatatttgtttcctgcaaatttactttgtttaattgtattctattgattttacagcttttgtacttgtacagttacattgtcatctggtttctattgcacgtgtagctgattagttgtagtcactatcttgcaagcatagatattagggaggtattatgtccagtcaagttttgtgttggctatgtgtagcgaattaggattgcttttcctgggatggatcagagcacatgtactgtggcgatatagttgtttcaatagtatagttgccaaattttatgtgtgtgctatatagaccagggaacccacttagaagcagaaaattttctgtgtgcgcgcgaaattttctgtgtgtgctaacaaattgcaggcaaccatcttaacaacaaaagaggctcgtacaatagcagagatgatgctaaaccacttgtgcatgcaaagtatcaaaaaggagaccagacacatgttgatgaaacatctaaaaaggtcctggaatctgaatgcacaaatgtggagaccttatagaaaagggcacaagcacacatgcatcttgctgatcttgatttggcggaggcagacatcaagaaagctctagataaactacagatccagacatgttaatcatatgtactactgaagttggcttaatgaaatcttttgagaataacttgcctatttaacttgtgtcctttttgatggtggcgttgtttgttagctacaaaatcatcaatcaaagattgtaattatatcatatcactgttttctattaatttttaagctgccgtagcaaggcacgggcatcctactagttcccgtatatggtacaaaatgcaacattcgtctcaggatttatgtttctcgactatggtgacaggcctgttttcatccttctttcttcgttgtcttg

SEQ ID NO: 53300 - DNA, 2738 bp, Zea Mays
gaataattcatgggatcaatgatccatataatttatgattccttccaaggctctgtgcagctgttcatccatttctcccttcgatgtcggtgtttgtccctgctatgtgtgttggatcaccattgacatatatgtggaactgcctaaggaccacttcaaatgtgtatgtagcagcttcagcacagcaaccagcaatggccccatagagagaatgcagataagccatcttcagtatgccatacactccatagaatacaacgccagaggatgccatactgataagagaaggcaccaatcccttatacagcgagaagaatccttcagtttggatcatgtggcgggcaacaccaatgaccccacctaaagcttcaccaccaggagcatccatctttgtcctgatctgaaaccaacagctcaaatcaggatcttacatcgtttctggacaacactacagggatcttgtgaagacataggatggttgcaaagaactcgggcatcacttcgttcagttgatgggacaggtcacttcaaggagattttgcatgagataaggtggaacaatcacttctcatcacaggttttggatatgaacatgatgatgctaggatgaccaatataaatttgtttaaggaatttactgccctaagcagggtaagtgtttcctgaactacaattgttttttttggctttttgcagatctgcacatctgaatttcctattatcctgttgggctgcctcttttttggagtgactgtagcaaccacttctaattcattttcaattgtattgaactggatgttgaccttcctagcataattagctctattttttaaaaaaatagttcattatgtatgtttctattttttatggtaccgcctatgtttatataaatttagcctagcactgcttgaataacaagtgattgaatgaggctcatatgcaaccattaaatcaatatttatgaaccaatgtttgttaaagtaataaaacatttacaaggaccatcgatgacctcaagaagctggtggtggcgtagatgggaacgcaccccgagaagatttgcatctagaggtggtgaccccacctctgtcctcaaccgccacctcgtacctcgtcttcggcgccgccggctcctgccccccttggcacgccttcggggtcctcgctggcggcaagcacctccgtcccggaggcatctgccgctgcagcatagaccaccgcgtcctcgctcagcagcaccgatgtcgatgatggcaacaaggaggacggctccgcgagcacccccgagatctgctgctgccactcccacgcagctcttgcttgtgagatctgtgtgcaggttgatgtcctcgtggcgccacgccgacctcaccgccaccaagcgcgccacccatgtcctcaccgacctcgccaaaaactataagaataggtgtagtcactgtcggggtgtacatccaattgagttttgagttggtgtttagctttcccttaccagggacggatcaaagcaccgtaataagtgtcgatatagctctttcaattgcgcctattgttttgtgcgggctatatggatcaaggaaccctctttgcagcagaggtttgttttgtgttctgctgctagtagtcgcatgtcagtttaatcttttgagttctggaagctgttggtcccttaggtgtttgggagatccttttgaatcgaagcacacacactcaggtgctatgacctttggcatttcatagttgcatatttaactggtgtgcgaagagcaccaggatagcacccttgcagcaggaacttacttttggttgcttttctgttgcctgtcatatcccgatatttgtttcctgcaaatttactttgtttaattgtattctattgattttacagcttttgtacttgtacagttacattgtcatctggtttctattgcacgtgtagctgattagttgtagtcactatcttgcaagcatagatattagggaggtattatgtccagtcaagttttgtgttggctatgtgtagcgaattaggattgcttttcctgggatggatcagagcacatgtactgtggcgatatagttgtttcaatagtatagttgccaaattttatgtgtgtgctatatagaccagggaacccacttagaagcagaaaattttctgtgtgcgcgcgaaattttctgtgtgtgctaacaaattgcaggcaaccatcttaacaacaaaagaggctcgtacaatagcagagatgatgctaaaccacttgtgcatgcaaagtatcaaaaaggagaccagacacatgttgatgaaacatctaaaaaggtcctggaatctgaatgcacaaatgtggagaccttatagaaaagggcacaagcacacatgcatcttgctgatcttgatttggcggaggcagacatcaagaaagctctagataaactacagatccagacatgttaatcatatgtactactgaagttggcttaatgaaatcttttgagaataacttgcctatttaacttgtgtcctttttgatggtggcgttgtttgttagctacaaaatcatcaatcaaagattgtaattatatcatatcactgttttctattaatttttaagctgccgtagcaaggcacgggcatcctactagttcccgtatatggtacaaaatgcaacattcgtctcaggatttatgtttctcgactatggtgacaggcctgttttcatccttctttcttcgttgtcttg

SEQ ID NO: 53301 - DNA, 4097 bp, Zea Mays
atcgcgcggtgcacgttctgccgctccgctcacgcccgcggccgaacgctcccccgcaccttccatcctccgcgcagccacagctgcgattccctgctccccgcaccttccatcctctgcgcagccacagccgcgattcccgccgccccgccgcgctcaccttccctcccgcggcagagtgctccctcgacggggccgccccaaccatcgccctcctcatccgccatcgcgatccactcctcgacgcaatccatctaccccacagaactgctgccggcgtggcagatctcctcctcggcacctagatctcctcggcgcgatcaacggctgagcccgctgcccccaccacacaaccgatatgctctccatggaaggtcagggacctgctcgcccatgatctccatggaaggtggtctactgtcgacggcctctccctcgtgctccttcgtcaaccccgtccgccgcgccgccgagccccgagatcgcgccgatccgccattctcgcgccctcgccccgacacgcgctcaccaccggccctcaccaacctccactcgcgttccccacaccaccctccaccccatccgcgtccgccccatccgtagcacgcgggctgcagccgccccatccctaaaatgtgggcgctggcgctaccacggctccgcaccatgcctccgcgctgccagacagcgccgggcgataccatgcccccaccccggcttcttcctgccagtgtaatcggccactacttctccactgctgctcgccgtctcctcaaccaccgctgcgccacacaatcctcccgcgacgtgtctgattcaagccaggatgtctcacaggaggagcagcggaagcccgaaccgaatccaaccgagtcatctcaacgactccgccagtttccaatcgccccttttttaggcgttcaagttccttcgagatgatgacaagcagaggagagagatagcgtctccttcaatccctctggcgacaccaacaacgcatccccgtggccatcctcgattctccttgccaaggaggcgacagccaagtcgtcgcggtcacggccggcgatccactcgagggtgttcctggtgagtagcaccactgcggtggggatcggggatgggggaggcggcaatggcgatggcggggtgcagctcgccgacaaccttaagatcttcaaggctgacaacttcgatctcgacgtctagattccttccaaggctctgtgcagctgttcatccatttctcccttcgatgtcggtgtttgtccctgctatgtgtgttggatcaccattgacatatatgtggaagtaggttctctgctgaaagaatacatacctgtaacaaactggggattagaccggcatacagtgctggtaccccaccttggtcgacaatcttaaggcatgttgcaagcgcattcattctggttgcttttacttgcatctgtagctgcctaaggaccacttcaaatgtgtatgtagcagcttcagcacagcaaccagcaatggccccatagagagaatgcagataagccatcttcagtatgccatacactccatagaatacaacgccagaggatgccatactgataagagaaggcaccaatcccttatacagcgagaagaatccttcagtttggatcatgtggcgggcaacaccaatgaccccacctaaagcttcaccaccaggagcatccatctttgtcctgatctgaaaccaacagctcaaatcaggttgattagcccttgacatttatcaccaagggacaaagcacactaactgctttatactctgggacataaatactagggatcttgtgaagacataggatggttgcaaagaactcgggcatcacttcgttcagttgatgggacaggtcacttcaaggagattttgcatgagataaggtggaacaatcacttctcatcacaggttttggatatgaacatgatgatgctaggatgaccaatataaatttgtttaaggaatttactgccctaagcagggtaagtgtttcctgaactacaattgttttttttggctttttgcagatctgcacatctgaatttcctattatcctgttgggctgcctcttttttggagtgactgtagcaaccacttctaattcattttcaattgtattgaactggatgttgaccttcctagcataattagctctattttttaaaaaaatagttcattatgtatgtttctattttttatggtaccgcctatgtttatataaatttagcctagcactgcttgaataacaagtgattgaatgaggctcatatgcaaccattaaatcaatatttatgaaccaatgtttgttaaagtaataaaacatttacaaggaccatcgatgacctcaagaagctggtggtggcgtagatgggaacgcaccccgagaagatttgcatctagaggtggtgaccccacctctgtcctcaaccgccacctcgtacctcgtcttcggcgccgccggctcctgccccccttggcacgccttcggggtcctcgctggcggcaagcacctccgtcccggaggcatctgccgctgcagcatagaccaccgcgtcctcgctcagcagcaccgatgtcgatgatggcaacaaggaggacggctccgcgagcacccccgagatctgctgctgccactcccacgcagctcttgcttgtgagatctgtgtgcaggttgatgtcctcgtggcgccacgccgacctcaccgccaccaagcgcgccacccatgtcctcaccgacctcgccaaaaactataagaataggtgtagtcactgtcggggtgtacatccaattgagttttgagttggtgtttagctttcccttaccagggacggatcaaagcaccgtaataagtgtcgatatagctctttcaattgcgcctattgttttgtgcgggctatatggatcaaggaaccctctttgcagcagaggtttgttttgtgttctgctgctagtagtcgcatgtcagtttaatcttttgagttctggaagctgttggtcccttaggtgtttgggagatccttttgaatcgaagcacacacactcaggtgctatgacctttggcatttcatagttgcatatttaactggtgtgcgaagagcaccaggatagcacccttgcagcaggaacttacttttggttgcttttctgttgcctgtcatatcccgatatttgtttcctgcaaatttactttgtttaattgtattctattgattttacagcttttgtacttgtacagttacattgtcatctggtttctattgcacgtgtagctgattagttgtagtcactatcttgcaagcatagatattagggaggtattatgtccagtcaagttttgtgttggctatgtgtagcgaattaggattgcttttcctgggatggatcagagcacatgtactgtggcgatatagttgtttcaatagtatagttgccaaattttatgtgtgtgctatatagaccagggaacccacttagaagcagaaaattttctgtgtgcgcgcgaaattttctgtgtgtgctaacaaattgcaggcaaccatcttaacaacaaaagaggctcgtacaatagcagagatgatgctaaaccacttgtgcatgcaaagtatcaaaaaggagaccagacacatgttgatgaaacatctaaaaaggtcctggaatctgaatgcacaaatgtggagaccttatagaaaagggcacaagcacacatgcatcttgctgatcttgatttggcggaggcagacatcaagaaagctctagataaactacagatccagacatgttaatcatatgtactactgaagttggcttaatgaaatcttttgagaataacttgcctatttaacttgtgtcctttttgatggtggcgttgtttgttagctacaaaatcatcaatcaaagattgtaattatatcatatcactgttttctattaatttttaagctgccgtagcaaggcacgggcatcctactagttcccgtatatggtacaaaatgcaacattcgtctcaggatttatgtttctcgactatggtgacaggcctgttttcatccttctttcttcgttgtcttg

SEQ ID NO: 53302 - DNA, 3540 bp, Zea Mays
atcgcgcggtgcacgttctgccgctccgctcacgcccgcggccgaacgctcccccgcaccttccatcctccgcgcagccacagctgcgattccctgctccccgcaccttccatcctctgcgcagccacagccgcgattcccgccgccccgccgcgctcaccttccctcccgcggcagagtgctccctcgacggggccgccccaaccatcgccctcctcatccgccatcgcgatccactcctcgacgcaatccatctaccccacagaactgctgccggcgtggcagatctcctcctcggcacctagatctcctcggcgcgatcaacggctgagcccgctgcccccaccacacaaccgatatgctctccatggaaggtcagggacctgctcgcccatgatctccatggaaggtggtctactgtcgacggcctctccctcgtgctccttcgtcaaccccgtccgccgcgccgccgagccccgagatcgcgccgatccgccattctcgcgccctcgccccgacacgcgctcaccaccggccctcaccaacctccactcgcgttccccacaccaccctccaccccatccgcgtccgccccatccgtagcacgcgggctgcagccgccccatccctaaaatgtgggcgctggcgctaccacggctccgcaccatgcctccgcgctgccagacagcgccgggcgataccatgcccccaccccggcttcttcctgccagtgtaatcggccactacttctccactgctgctcgccgtctcctcaaccaccgctgcgccacacaatcctcccgcgacgtgtctgattcaagccaggatgtctcacaggaggagcagcggaagcccgaaccgaatccaaccgagtcatctcaacgactccgccagtttccaatcgccccttttttaggcgttcaagttccttcgagatgatgacaagcagaggagagagatagcgtctccttcaatccctctggcgacaccaacaacgcatccccgtggccatcctcgattctccttgccaaggaggcgacagccaagtcgtcgcggtcacggccggcgatccactcgagggtgttcctggtgagtagcaccactgcggtggggatcggggatgggggaggcggcaatggcgatggcggggtgcagctcgccgacaaccttaagatcttcaaggctgacaacttcgatctcgacgtctagattccttccaaggctctgtgcagctgttcatccatttctcccttcgatgtcggtgtttgtccctgctatgtgtgttggatcaccattgacatatatgtggaactgcctaaggaccacttcaaatgtgtatgtagcagcttcagcacagcaaccagcaatggccccatagagagaatgcagataagccatcttcagtatgccatacactccatagaatacaacgccagaggatgccatactgataagagaaggcaccaatcccttatacagcgagaagaatccttcagtttggatcatgtggcgggcaacaccaatgaccccacctaaagcttcaccaccaggagcatccatctttgtcctgatctgaaaccaacagctcaaatcaggatcttacatcgtttctggacaacactacagggatcttgtgaagacataggatggttgcaaagaactcgggcatcacttcgttcagttgatgggacaggtcacttcaaggagattttgcatgagataaggtggaacaatcacttctcatcacaggttttggatatgaacatgatgatgctaggatgaccaatataaatttgtttaaggaatttactgccctaagcaggctggtggtggcgtagatgggaacgcaccccgagaagatttgcatctagaggtggtgaccccacctctgtcctcaaccgccacctcgtacctcgtcttcggcgccgccggctcctgccccccttggcacgccttcggggtcctcgctggcggcaagcacctccgtcccggaggcatctgccgctgcagcatagaccaccgcgtcctcgctcagcagcaccgatgtcgatgatggcaacaaggaggacggctccgcgagcacccccgagatctgctgctgccactcccacgcagctcttgcttgtgagatctgtgtgcaggttgatgtcctcgtggcgccacgccgacctcaccgccaccaagcgcgccacccatgtcctcaccgacctcgccaaaaactataagaataggtgtagtcactgtcggggtgtacatccaattgagttttgagttggtgtttagctttcccttaccagggacggatcaaagcaccgtaataagtgtcgatatagctctttcaattgcgcctattgttttgtgcgggctatatggatcaaggaaccctctttgcagcagaggtttgttttgtgttctgctgctagtagtcgcatgtcagtttaatcttttgagttctggaagctgttggtcccttaggtgtttgggagatccttttgaatcgaagcacacacactcaggtgctatgacctttggcatttcatagttgcatatttaactggtgtgcgaagagcaccaggatagcacccttgcagcaggaacttacttttggttgcttttctgttgcctgtcatatcccgatatttgtttcctgcaaatttactttgtttaattgtattctattgattttacagcttttgtacttgtacagttacattgtcatctggtttctattgcacgtgtagctgattagttgtagtcactatcttgcaagcatagatattagggaggtattatgtccagtcaagttttgtgttggctatgtgtagcgaattaggattgcttttcctgggatggatcagagcacatgtactgtggcgatatagttgtttcaatagtatagttgccaaattttatgtgtgtgctatatagaccagggaacccacttagaagcagaaaattttctgtgtgcgcgcgaaattttctgtgtgtgctaacaaattgcaggcaaccatcttaacaacaaaagaggctcgtacaatagcagagatgatgctaaaccacttgtgcatgcaaagtatcaaaaaggagaccagacacatgttgatgaaacatctaaaaaggtcctggaatctgaatgcacaaatgtggagaccttatagaaaagggcacaagcacacatgcatcttgctgatcttgatttggcggaggcagacatcaagaaagctctagataaactacagatccagacatgttaatcatatgtactactgaagttggcttaatgaaatcttttgagaataacttgcctatttaacttgtgtcctttttgatggtggcgttgtttgttagctacaaaatcatcaatcaaagattgtaattatatcatatcactgttttctattaatttttaagctgccgtagcaaggcacgggcatcctactagttcccgtatatggtacaaaatgcaacattcgtctcaggatttatgtttctcgactatggtgacaggcctgttttcatccttctttcttcgttgtcttg

SEQ ID NO: 53303 - DNA, 3457 bp, Zea Mays
atcgcgcggtgcacgttctgccgctccgctcacgcccgcggccgaacgctcccccgcaccttccatcctccgcgcagccacagctgcgattccctgctccccgcaccttccatcctctgcgcagccacagccgcgattcccgccgccccgccgcgctcaccttccctcccgcggcagagtgctccctcgacggggccgccccaaccatcgccctcctcatccgccatcgcgatccactcctcgacgcaatccatctaccccacagaactgctgccggcgtggcagatctcctcctcggcacctagatctcctcggcgcgatcaacggctgagcccgctgcccccaccacacaaccgatatgctctccatggaaggtcagggacctgctcgcccatgatctccatggaaggtggtctactgtcgacggcctctccctcgtgctccttcgtcaaccccgtccgccgcgccgccgagccccgagatcgcgccgatccgccattctcgcgccctcgccccgacacgcgctcaccaccggccctcaccaacctccactcgcgttccccacaccaccctccaccccatccgcgtccgccccatccgtagcacgcgggctgcagccgccccatccctaaaatgtgggcgctggcgctaccacggctccgcaccatgcctccgcgctgccagacagcgccgggcgataccatgcccccaccccggcttcttcctgccagtgaggagcagcggaagcccgaaccgaatccaaccgagtcatctcaacgactccgccagtttccaatcgccccttttttaggcgttcaagttccttcgagatgatgacaagcagaggagagagatagcgtctccttcaatccctctggcgacaccaacaacgcatccccgtggccatcctcgattctccttgccaaggaggcgacagccaagtcgtcgcggtcacggccggcgatccactcgagggtgttcctggtgagtagcaccactgcggtggggatcggggatgggggaggcggcaatggcgatggcggggtgcagctcgccgacaaccttaagatcttcaaggctgacaacttcgatctcgacgtctagattccttccaaggctctgtgcagctgttcatccatttctcccttcgatgtcggtgtttgtccctgctatgtgtgttggatcaccattgacatatatgtggaactgcctaaggaccacttcaaatgtgtatgtagcagcttcagcacagcaaccagcaatggccccatagagagaatgcagataagccatcttcagtatgccatacactccatagaatacaacgccagaggatgccatactgataagagaaggcaccaatcccttatacagcgagaagaatccttcagtttggatcatgtggcgggcaacaccaatgaccccacctaaagcttcaccaccaggagcatccatctttgtcctgatctgaaaccaacagctcaaatcaggatcttacatcgtttctggacaacactacagggatcttgtgaagacataggatggttgcaaagaactcgggcatcacttcgttcagttgatgggacaggtcacttcaaggagattttgcatgagataaggtggaacaatcacttctcatcacaggttttggatatgaacatgatgatgctaggatgaccaatataaatttgtttaaggaatttactgccctaagcagggaccatcgatgacctcaagaagctggtggtggcgtagatgggaacgcaccccgagaagatttgcatctagaggtggtgaccccacctctgtcctcaaccgccacctcgtacctcgtcttcggcgccgccggctcctgccccccttggcacgccttcggggtcctcgctggcggcaagcacctccgtcccggaggcatctgccgctgcagcatagaccaccgcgtcctcgctcagcagcaccgatgtcgatgatggcaacaaggaggacggctccgcgagcacccccgagatctgctgctgccactcccacgcagctcttgcttgtgagatctgtgtgcaggttgatgtcctcgtggcgccacgccgacctcaccgccaccaagcgcgccacccatgtcctcaccgacctcgccaaaaactataagaataggtgtagtcactgtcggggtgtacatccaattgagttttgagttggtgtttagctttcccttaccagggacggatcaaagcaccgtaataagtgtcgatatagctctttcaattgcgcctattgttttgtgcgggctatatggatcaaggaaccctctttgcagcagaggtttgttttgtgttctgctgctagtagtcgcatgtcagtttaatcttttgagttctggaagctgttggtcccttaggtgtttgggagatccttttgaatcgaagcacacacactcaggtgctatgacctttggcatttcatagttgcatatttaactggtgtgcgaagagcaccaggatagcacccttgcagcaggaacttacttttggttgcttttctgttgcctgtcatatcccgatatttgtttcctgcaaatttactttgtttaattgtattctattgattttacagcttttgtacttgtacagttacattgtcatctggtttctattgcacgtgtagctgattagttgtagtcactatcttgcaagcatagatattagggaggtattatgtccagtcaagttttgtgttggctatgtgtagcgaattaggattgcttttcctgggatggatcagagcacatgtactgtggcgatatagttgtttcaatagtatagttgccaaattttatgtgtgtgctatatagaccagggaacccacttagaagcagaaaattttctgtgtgcgcgcgaaattttctgtgtgtgctaacaaattgcaggcaaccatcttaacaacaaaagaggctcgtacaatagcagagatgatgctaaaccacttgtgcatgcaaagtatcaaaaaggagaccagacacatgttgatgaaacatctaaaaaggtcctggaatctgaatgcacaaatgtggagaccttatagaaaagggcacaagcacacatgcatcttgctgatcttgatttggcggaggcagacatcaagaaagctctagataaactacagatccagacatgttaatcatatgtactactgaagttggcttaatgaaatcttttgagaataacttgcctatttaacttgtgtcctttttgatggtggcgttgtttgttagctacaaaatcatcaatcaaagattgtaattatatcatatcactgttttctattaatttttaagctgccgtagcaaggcacgggcatcctactagttcccgtatatggtacaaaatgcaacattcgtctcaggatttatgtttctcgactatggtgacaggcctgttttcatccttctttcttcgttgtcttg

SEQ ID NO: 53304 - DNA, 3854 bp, Zea Mays
atcgcgcggtgcacgttctgccgctccgctcacgcccgcggccgaacgctcccccgcaccttccatcctccgcgcagccacagctgcgattccctgctccccgcaccttccatcctctgcgcagccacagccgcgattcccgccgccccgccgcgctcaccttccctcccgcggcagagtgctccctcgacggggccgccccaaccatcgccctcctcatccgccatcgcgatccactcctcgacgcaatccatctaccccacagaactgctgccggcgtggcagatctcctcctcggcacctagatctcctcggcgcgatcaacggctgagcccgctgcccccaccacacaaccgatatgctctccatggaaggtcagggacctgctcgcccatgatctccatggaaggtggtctactgtcgacggcctctccctcgtgctccttcgtcaaccccgtccgccgcgccgccgagccccgagatcgcgccgatccgccattctcgcgccctcgccccgacacgcgctcaccaccggccctcaccaacctccactcgcgttccccacaccaccctccaccccatccgcgtccgccccatccgtagcacgcgggctgcagccgccccatccctaaaatgtgggcgctggcgctaccacggctccgcaccatgcctccgcgctgccagacagcgccgggcgataccatgcccccaccccggcttcttcctgccagtgtaatcggccactacttctccactgctgctcgccgtctcctcaaccaccgctgcgccacacaatcctcccgcgacgtgtctgattcaagccaggatgtctcacaggaggagcagcggaagcccgaaccgaatccaaccgagtcatctcaacgactccgccagtttccaatcgccccttttttaggcgttcaagttccttcgagatgatgacaagcagaggagagagatagcgtctccttcaatccctctggcgacaccaacaacgcatccccgtggccatcctcgattctccttgccaaggaggcgacagccaagtcgtcgcggtcacggccggcgatccactcgagggtgttcctggtgagtagcaccactgcggtggggatcggggatgggggaggcggcaatggcgatggcggggtgcagctcgccgacaaccttaagatcttcaaggctgacaacttcgatctcgacgtctagattccttccaaggctctgtgcagctgttcatccatttctcccttcgatgtcggtgtttgtccctgctatgtgtgttggatcaccattgacatatatgtggaactgcctaaggaccacttcaaatgtgtatgtagcagcttcagcacagcaaccagcaatggccccatagagagaatgcagataagccatcttcagtatgccatacactccatagaatacaacgccagaggatgccatactgataagagaaggcaccaatcccttatacagcgagaagaatccttcagtttggatcatgtggcgggcaacaccaatgaccccacctaaagcttcaccaccaggagcatccatctttgtcctgatctgaaaccaacagctcaaatcagggatcttgtgaagacataggatggttgcaaagaactcgggcatcacttcgttcagttgatgggacaggtcacttcaaggagattttgcatgagataaggttttggatatgaacatgatgatgctaggatgaccaatataaatttgtttaaggaatttactgccctaagcagggtaagtgtttcctgaactacaattgttttttttggctttttgcagatctgcacatctgaatttcctattatcctgttgggctgcctcttttttggagtgactgtagcaaccacttctaattcattttcaattgtattgaactggatgttgaccttcctagcataattagctctattttttaaaaaaatagttcattatgtatgtttctattttttatggtaccgcctatgtttatataaatttagcctagcactgcttgaataacaagtgattgaatgaggctcatatgcaaccattaaatcaatatttatgaaccaatgtttgttaaagtaataaaacatttacaaggaccatcgatgacctcaagaagctggtggtggcgtagatgggaacgcaccccgagaagatttgcatctagaggtggtgaccccacctctgtcctcaaccgccacctcgtacctcgtcttcggcgccgccggctcctgccccccttggcacgccttcggggtcctcgctggcggcaagcacctccgtcccggaggcatctgccgctgcagcatagaccaccgcgtcctcgctcagcagcaccgatgtcgatgatggcaacaaggaggacggctccgcgagcacccccgagatctgctgctgccactcccacgcagctcttgcttgtgagatctgtgtgcaggttgatgtcctcgtggcgccacgccgacctcaccgccaccaagcgcgccacccatgtcctcaccgacctcgccaaaaactataagaataggtgtagtcactgtcggggtgtacatccaattgagttttgagttggtgtttagctttcccttaccagggacggatcaaagcaccgtaataagtgtcgatatagctctttcaattgcgcctattgttttgtgcgggctatatggatcaaggaaccctctttgcagcagaggtttgttttgtgttctgctgctagtagtcgcatgtcagtttaatcttttgagttctggaagctgttggtcccttaggtgtttgggagatccttttgaatcgaagcacacacactcaggtgctatgacctttggcatttcatagttgcatatttaactggtgtgcgaagagcaccaggatagcacccttgcagcaggaacttacttttggttgcttttctgttgcctgtcatatcccgatatttgtttcctgcaaatttactttgtttaattgtattctattgattttacagcttttgtacttgtacagttacattgtcatctggtttctattgcacgtgtagctgattagttgtagtcactatcttgcaagcatagatattagggaggtattatgtccagtcaagttttgtgttggctatgtgtagcgaattaggattgcttttcctgggatggatcagagcacatgtactgtggcgatatagttgtttcaatagtatagttgccaaattttatgtgtgtgctatatagaccagggaacccacttagaagcagaaaattttctgtgtgcgcgcgaaattttctgtgtgtgctaacaaattgcaggcaaccatcttaacaacaaaagaggctcgtacaatagcagagatgatgctaaaccacttgtgcatgcaaagtatcaaaaaggagaccagacacatgttgatgaaacatctaaaaaggtcctggaatctgaatgcacaaatgtggagaccttatagaaaagggcacaagcacacatgcatcttgctgatcttgatttggcggaggcagacatcaagaaagctctagataaactacagatccagacatgttaatcatatgtactactgaagttggcttaatgaaatcttttgagaataacttgcctatttaacttgtgtcctttttgatggtggcgttgtttgttagctacaaaatcatcaatcaaagattgtaattatatcatatcactgttttctattaatttttaagctgccgtagcaaggcacgggcatcctactagttcccgtatatggtacaaaatgcaacattcgtctcaggatttatgtttctcgactatggtgacaggcctgttttcatccttctttcttcgttgtcttg

SEQ ID NO: 53305 - DNA, 3638 bp, Zea Mays
atcgcgcggtgcacgttctgccgctccgctcacgcccgcggccgaacgctcccccgcaccttccatcctccgcgcagccacagctgcgattccctgctccccgcaccttccatcctctgcgcagccacagccgcgattcccgccgccccgccgcgctcaccttccctcccgcggcagagtgctccctcgacggggccgccccaaccatcgccctcctcatccgccatcgcgatccactcctcgacgcaatccatctaccccacagaactgctgccggcgtggcagatctcctcctcggcacctagatctcctcggcgcgatcaacggctgagcccgctgcccccaccacacaaccgatatgctctccatggaaggtcagggacctgctcgcccatgatctccatggaaggtggtctactgtcgacggcctctccctcgtgctccttcgtcaaccccgtccgccgcgccgccgagccccgagatcgcgccgatccgccattctcgcgccctcgccccgacacgcgctcaccaccggccctcaccaacctccactcgcgttccccacaccaccctccaccccatccgcgtccgccccatccgtagcacgcgggctgcagccgccccatccctaaaatgtgggcgctggcgctaccacggctccgcaccatgcctccgcgctgccagacagcgccgggcgataccatgcccccaccccggcttcttcctgccagtgtaatcggccactacttctccactgctgctcgccgtctcctcaaccaccgctgcgccacacaatcctcccgcgacgtgtctgattcaagccaggatgtctcacaggaggagcagcggaagcccgaaccgaatccaaccgagtcatctcaacgactccgccagtttccaatcgccccttttttaggcgttcaagttccttcgagatgatgacaagcagaggagagagatagcgtctccttcaatccctctggcgacaccaacaacgcatccccgtggccatcctcgattctccttgccaaggaggcgacagccaagtcgtcgcggtcacggccggcgatccactcgagggtgttcctggtgagtagcaccactgcggtggggatcggggatgggggaggcggcaatggcgatggcggggtgcagctcgccgacaaccttaagatcttcaaggctgacaacttcgatctcgacgtctagattccttccaaggctctgtgcagctgttcatccatttctcccttcgatgtcggtgtttgtccctgctatgtgtgttggatcaccattgacatatatgtggaactgcctaaggaccacttcaaatgtgtatgtagcagcttcagcacagcaaccagcaatggccccatagagagaatgcagataagccatcttcagtatgccatacactccatagaatacaacgccagaggatgccatactgataagagaaggcaccaatcccttatacagcgagaagaatccttcagtttggatcatgtggcgggcaacaccaatgaccccacctaaagcttcaccaccaggagcatccatctttgtcctgatctgaaaccaacagctcaaatcaggttgattagcccttgacatttatcaccaagggacaaagcacactaactgctttatactctgggacataaatactaggatcttacatcgtttctggacaacactacagggatcttgtgaagacataggatggttgcaaagaactcgggcatcacttcgttcagttgatgggacaggtcacttcaaggagattttgcatgagataaggtggaacaatcacttctcatcacaggttttggatatgaacatgatgatgctaggatgaccaatataaatttgtttaaggaatttactgccctaagcagggaccatcgatgacctcaagaagctggtggtggcgtagatgggaacgcaccccgagaagatttgcatctagaggtggtgaccccacctctgtcctcaaccgccacctcgtacctcgtcttcggcgccgccggctcctgccccccttggcacgccttcggggtcctcgctggcggcaagcacctccgtcccggaggcatctgccgctgcagcatagaccaccgcgtcctcgctcagcagcaccgatgtcgatgatggcaacaaggaggacggctccgcgagcacccccgagatctgctgctgccactcccacgcagctcttgcttgtgagatctgtgtgcaggttgatgtcctcgtggcgccacgccgacctcaccgccaccaagcgcgccacccatgtcctcaccgacctcgccaaaaactataagaataggtgtagtcactgtcggggtgtacatccaattgagttttgagttggtgtttagctttcccttaccagggacggatcaaagcaccgtaataagtgtcgatatagctctttcaattgcgcctattgttttgtgcgggctatatggatcaaggaaccctctttgcagcagaggtttgttttgtgttctgctgctagtagtcgcatgtcagtttaatcttttgagttctggaagctgttggtcccttaggtgtttgggagatccttttgaatcgaagcacacacactcaggtgctatgacctttggcatttcatagttgcatatttaactggtgtgcgaagagcaccaggatagcacccttgcagcaggaacttacttttggttgcttttctgttgcctgtcatatcccgatatttgtttcctgcaaatttactttgtttaattgtattctattgattttacagcttttgtacttgtacagttacattgtcatctggtttctattgcacgtgtagctgattagttgtagtcactatcttgcaagcatagatattagggaggtattatgtccagtcaagttttgtgttggctatgtgtagcgaattaggattgcttttcctgggatggatcagagcacatgtactgtggcgatatagttgtttcaatagtatagttgccaaattttatgtgtgtgctatatagaccagggaacccacttagaagcagaaaattttctgtgtgcgcgcgaaattttctgtgtgtgctaacaaattgcaggcaaccatcttaacaacaaaagaggctcgtacaatagcagagatgatgctaaaccacttgtgcatgcaaagtatcaaaaaggagaccagacacatgttgatgaaacatctaaaaaggtcctggaatctgaatgcacaaatgtggagaccttatagaaaagggcacaagcacacatgcatcttgctgatcttgatttggcggaggcagacatcaagaaagctctagataaactacagatccagacatgttaatcatatgtactactgaagttggcttaatgaaatcttttgagaataacttgcctatttaacttgtgtcctttttgatggtggcgttgtttgttagctacaaaatcatcaatcaaagattgtaattatatcatatcactgttttctattaatttttaagctgccgtagcaaggcacgggcatcctactagttcccgtatatggtacaaaatgcaacattcgtctcaggatttatgtttctcgactatggtgacaggcctgttttcatccttctttcttcgttgtcttg

SEQ ID NO: 53306 - DNA, 3944 bp, Zea Mays
atcgcgcggtgcacgttctgccgctccgctcacgcccgcggccgaacgctcccccgcaccttccatcctccgcgcagccacagctgcgattccctgctccccgcaccttccatcctctgcgcagccacagccgcgattcccgccgccccgccgcgctcaccttccctcccgcggcagagtgctccctcgacggggccgccccaaccatcgccctcctcatccgccatcgcgatccactcctcgacgcaatccatctaccccacagaactgctgccggcgtggcagatctcctcctcggcacctagatctcctcggcgcgatcaacggctgagcccgctgcccccaccacacaaccgatatgctctccatggaaggtcagggacctgctcgcccatgatctccatggaaggtggtctactgtcgacggcctctccctcgtgctccttcgtcaaccccgtccgccgcgccgccgagccccgagatcgcgccgatccgccattctcgcgccctcgccccgacacgcgctcaccaccggccctcaccaacctccactcgcgttccccacaccaccctccaccccatccgcgtccgccccatccgtagcacgcgggctgcagccgccccatccctaaaatgtgggcgctggcgctaccacggctccgcaccatgcctccgcgctgccagacagcgccgggcgataccatgcccccaccccggcttcttcctgccagtgtaatcggccactacttctccactgctgctcgccgtctcctcaaccaccgctgcgccacacaatcctcccgcgacgtgtctgattcaagccaggatgtctcacaggaggagcagcggaagcccgaaccgaatccaaccgagtcatctcaacgactccgccagtttccaatcgccccttttttaggcgttcaagttccttcgagatgatgacaagcagaggagagagatagcgtctccttcaatccctctggcgacaccaacaacgcatccccgtggccatcctcgattctccttgccaaggaggcgacagccaagtcgtcgcggtcacggccggcgatccactcgagggtgttcctggtgagtagcaccactgcggtggggatcggggatgggggaggcggcaatggcgatggcggggtgcagctcgccgacaaccttaagatcttcaaggctgacaacttcgatctcgacgtctagattccttccaaggctctgtgcagctgttcatccatttctcccttcgatgtcggtgtttgtccctgctatgtgtgttggatcaccattgacatatatgtggaagtaggttctctgctgaaagaatacatacctgtaacaaactggggattagaccggcatacagtgctggtaccccaccttggtcgacaatcttaagcttcagcacagcaaccagcaatggccccatagagagaatgcagataagccatcttcagtatgccatacactccatagaatacaacgccagaggatgccatactgataagagaaggcaccaatcccttatacagcgagaagaatccttcagtttggatcatgtggcgggcaacaccaatgaccccacctaaagcttcaccaccaggagcatccatctttgtcctgatctgaaaccaacagctcaaatcaggatcttacatcgtttctggacaacactacagggatcttgtgaagacataggatggttgcaaagaactcgggcatcacttcgttcagttgatgggacaggtcacttcaaggagattttgcatgagataaggttttggatatgaacatgatgatgctaggatgaccaatataaatttgtttaaggaatttactgccctaagcagggtaagtgtttcctgaactacaattgttttttttggctttttgcagatctgcacatctgaatttcctattatcctgttgggctgcctcttttttggagtgactgtagcaaccacttctaattcattttcaattgtattgaactggatgttgaccttcctagcataattagctctattttttaaaaaaatagttcattatgtatgtttctattttttatggtaccgcctatgtttatataaatttagcctagcactgcttgaataacaagtgattgaatgaggctcatatgcaaccattaaatcaatatttatgaaccaatgtttgttaaagtaataaaacatttacaaggaccatcgatgacctcaagaagctggtggtggcgtagatgggaacgcaccccgagaagatttgcatctagaggtggtgaccccacctctgtcctcaaccgccacctcgtacctcgtcttcggcgccgccggctcctgccccccttggcacgccttcggggtcctcgctggcggcaagcacctccgtcccggaggcatctgccgctgcagcatagaccaccgcgtcctcgctcagcagcaccgatgtcgatgatggcaacaaggaggacggctccgcgagcacccccgagatctgctgctgccactcccacgcagctcttgcttgtgagatctgtgtgcaggttgatgtcctcgtggcgccacgccgacctcaccgccaccaagcgcgccacccatgtcctcaccgacctcgccaaaaactataagaataggtgtagtcactgtcggggtgtacatccaattgagttttgagttggtgtttagctttcccttaccagggacggatcaaagcaccgtaataagtgtcgatatagctctttcaattgcgcctattgttttgtgcgggctatatggatcaaggaaccctctttgcagcagaggtttgttttgtgttctgctgctagtagtcgcatgtcagtttaatcttttgagttctggaagctgttggtcccttaggtgtttgggagatccttttgaatcgaagcacacacactcaggtgctatgacctttggcatttcatagttgcatatttaactggtgtgcgaagagcaccaggatagcacccttgcagcaggaacttacttttggttgcttttctgttgcctgtcatatcccgatatttgtttcctgcaaatttactttgtttaattgtattctattgattttacagcttttgtacttgtacagttacattgtcatctggtttctattgcacgtgtagctgattagttgtagtcactatcttgcaagcatagatattagggaggtattatgtccagtcaagttttgtgttggctatgtgtagcgaattaggattgcttttcctgggatggatcagagcacatgtactgtggcgatatagttgtttcaatagtatagttgccaaattttatgtgtgtgctatatagaccagggaacccacttagaagcagaaaattttctgtgtgcgcgcgaaattttctgtgtgtgctaacaaattgcaggcaaccatcttaacaacaaaagaggctcgtacaatagcagagatgatgctaaaccacttgtgcatgcaaagtatcaaaaaggagaccagacacatgttgatgaaacatctaaaaaggtcctggaatctgaatgcacaaatgtggagaccttatagaaaagggcacaagcacacatgcatcttgctgatcttgatttggcggaggcagacatcaagaaagctctagataaactacagatccagacatgttaatcatatgtactactgaagttggcttaatgaaatcttttgagaataacttgcctatttaacttgtgtcctttttgatggtggcgttgtttgttagctacaaaatcatcaatcaaagattgtaattatatcatatcactgttttctattaatttttaagctgccgtagcaaggcacgggcatcctactagttcccgtatatggtacaaaatgcaacattcgtctcaggatttatgtttctcgactatggtgacaggcctgttttcatccttctttcttcgttgtcttg

SEQ ID NO: 53307 - DNA, 3426 bp, Zea Mays
atcgcgcggtgcacgttctgccgctccgctcacgcccgcggccgaacgctcccccgcaccttccatcctccgcgcagccacagctgcgattccctgctccccgcaccttccatcctctgcgcagccacagccgcgattcccgccgccccgccgcgctcaccttccctcccgcggcagagtgctccctcgacggggccgccccaaccatcgccctcctcatccgccatcgcgatccactcctcgacgcaatccatctaccccacagaactgctgccggcgtggcagatctcctcctcggcacctagatctcctcggcgcgatcaacggctgagcccgctgcccccaccacacaaccgatatgctctccatggaaggtcagggacctgctcgcccatgatctccatggaaggtggtctactgtcgacggcctctccctcgtgctccttcgtcaaccccgtccgccgcgccgccgagccccgagatcgcgccgatccgccattctcgcgccctcgccccgacacgcgctcaccaccggccctcaccaacctccactcgcgttccccacaccaccctccaccccatccgcgtccgccccatccgtagcacgcgggctgcagccgccccatccctaaaatgtgggcgctggcgctaccacggctccgcaccatgcctccgcgctgccagacagcgccgggcgataccatgcccccaccccggcttcttcctgccagtgaggagcagcggaagcccgaaccgaatccaaccgagtcatctcaacgactccgccagtttccaatcgccccttttttaggcgttcaagttccttcgagatgatgacaagcagaggagagagatagcgtctccttcaatccctctggcgacaccaacaacgcatccccgtggccatcctcgattctccttgccaaggaggcgacagccaagtcgtcgcggtcacggccggcgatccactcgagggtgttcctggtgagtagcaccactgcggtggggatcggggatgggggaggcggcaatggcgatggcggggtgcagctcgccgacaaccttaagatcttcaaggctgacaacttcgatctcgacgtctagattccttccaaggctctgtgcagctgttcatccatttctcccttcgatgtcggtgtttgtccctgctatgtgtgttggatcaccattgacatatatgtggaactgcctaaggaccacttcaaatgtgtatgtagcagcttcagcacagcaaccagcaatggccccatagagagaatgcagataagccatcttcagtatgccatacactccatagaatacaacgccagaggatgccatactgataagagaaggcaccaatcccttatacagcgagaagaatccttcagtttggatcatgtggcgggcaacaccaatgaccccacctaaagcttcaccaccaggagcatccatctttgtcctgatctgaaaccaacagctcaaatcagggatcttgtgaagacataggatggttgcaaagaactcgggcatcacttcgttcagttgatgggacaggtcacttcaaggagattttgcatgagataaggtggaacaatcacttctcatcacaggttttggatatgaacatgatgatgctaggatgaccaatataaatttgtttaaggaatttactgccctaagcagggaccatcgatgacctcaagaagctggtggtggcgtagatgggaacgcaccccgagaagatttgcatctagaggtggtgaccccacctctgtcctcaaccgccacctcgtacctcgtcttcggcgccgccggctcctgccccccttggcacgccttcggggtcctcgctggcggcaagcacctccgtcccggaggcatctgccgctgcagcatagaccaccgcgtcctcgctcagcagcaccgatgtcgatgatggcaacaaggaggacggctccgcgagcacccccgagatctgctgctgccactcccacgcagctcttgcttgtgagatctgtgtgcaggttgatgtcctcgtggcgccacgccgacctcaccgccaccaagcgcgccacccatgtcctcaccgacctcgccaaaaactataagaataggtgtagtcactgtcggggtgtacatccaattgagttttgagttggtgtttagctttcccttaccagggacggatcaaagcaccgtaataagtgtcgatatagctctttcaattgcgcctattgttttgtgcgggctatatggatcaaggaaccctctttgcagcagaggtttgttttgtgttctgctgctagtagtcgcatgtcagtttaatcttttgagttctggaagctgttggtcccttaggtgtttgggagatccttttgaatcgaagcacacacactcaggtgctatgacctttggcatttcatagttgcatatttaactggtgtgcgaagagcaccaggatagcacccttgcagcaggaacttacttttggttgcttttctgttgcctgtcatatcccgatatttgtttcctgcaaatttactttgtttaattgtattctattgattttacagcttttgtacttgtacagttacattgtcatctggtttctattgcacgtgtagctgattagttgtagtcactatcttgcaagcatagatattagggaggtattatgtccagtcaagttttgtgttggctatgtgtagcgaattaggattgcttttcctgggatggatcagagcacatgtactgtggcgatatagttgtttcaatagtatagttgccaaattttatgtgtgtgctatatagaccagggaacccacttagaagcagaaaattttctgtgtgcgcgcgaaattttctgtgtgtgctaacaaattgcaggcaaccatcttaacaacaaaagaggctcgtacaatagcagagatgatgctaaaccacttgtgcatgcaaagtatcaaaaaggagaccagacacatgttgatgaaacatctaaaaaggtcctggaatctgaatgcacaaatgtggagaccttatagaaaagggcacaagcacacatgcatcttgctgatcttgatttggcggaggcagacatcaagaaagctctagataaactacagatccagacatgttaatcatatgtactactgaagttggcttaatgaaatcttttgagaataacttgcctatttaacttgtgtcctttttgatggtggcgttgtttgttagctacaaaatcatcaatcaaagattgtaattatatcatatcactgttttctattaatttttaagctgccgtagcaaggcacgggcatcctactagttcccgtatatggtacaaaatgcaacattcgtctcaggatttatgtttctcgactatggtgacaggcctgttttcatccttctttcttcgttgtcttg

SEQ ID NO: 53308 - DNA, 3892 bp, Zea Mays
gtccactatcgcgcggtgcacgttctgccgctccgctcacgcccgcggccgaacgctcccccgcaccttccatcctccgcgcagccacagctgcgattccctgctccccgcaccttccatcctctgcgcagccacagccgcgattcccgccgccccgccgcgctcaccttccctcccgcggcagagtgctccctcgacggggccgccccaaccatcgccctcctcatccgccatcgcgatccactcctcgacgcaatccatctaccccacagaactgctgccggcgtggcagatctcctcctcggcacctagatctcctcggcgcgatcaacggctgagcccgctgcccccaccacacaaccgatatgctctccatggaaggtcagggacctgctcgcccatgatctccatggaaggtggtctactgtcgacggcctctccctcgtgctccttcgtcaaccccgtccgccgcgccgccgagccccgagatcgcgccgatccgccattctcgcgccctcgccccgacacgcgctcaccaccggccctcaccaacctccactcgcgttccccacaccaccctccaccccatccgcgtccgccccatccgtagcacgcgggctgcagccgccccatccctaaaatgtgggcgctggcgctaccacggctccgcaccatgcctccgcgctgccagacagcgccgggcgataccatgcccccaccccggcttcttcctgccagtgtaatcggccactacttctccactgctgctcgccgtctcctcaaccaccgctgcgccacacaatcctcccgcgacgtgtctgattcaagccaggatgtctcacaggaggagcagcggaagcccgaaccgaatccaaccgagtcatctcaacgactccgccagtttccaatcgccccttttttaggcgttcaagttccttcgagatgatgacaagcagaggagagagatagcgtctccttcaatccctctggcgacaccaacaacgcatccccgtggccatcctcgattctccttgccaaggaggcgacagccaagtcgtcgcggtcacggccggcgatccactcgagggtgttcctggtgagtagcaccactgcggtggggatcggggatgggggaggcggcaatggcgatggcggggtgcagctcgccgacaaccttaagatcttcaaggctgacaacttcgatctcgacgtctagattccttccaaggctctgtgcagctgttcatccatttctcccttcgatgtcggtgtttgtccctgctatgtgtgttggatcaccattgacatatatgtggaactgcctaaggaccacttcaaatgtgtatgtagcagcttcagcacagcaaccagcaatggccccatagagagaatgcagataagccatcttcagtatgccatacactccatagaatacaacgccagaggatgccatactgataagagaaggcaccaatcccttatacagcgagaagaatccttcagtttggatcatgtggcgggcaacaccaatgaccccacctaaagcttcaccaccaggagcatccatctttgtcctgatctgaaaccaacagctcaaatcaggatcttacatcgtttctggacaacactacagggatcttgtgaagacataggatggttgcaaagaactcgggcatcacttcgttcagttgatgggacaggtcacttcaaggagattttgcatgagataaggttttggatatgaacatgatgatgctaggatgaccaatataaatttgtttaaggaatttactgccctaagcagggtaagtgtttcctgaactacaattgttttttttggctttttgcagatctgcacatctgaatttcctattatcctgttgggctgcctcttttttggagtgactgtagcaaccacttctaattcattttcaattgtattgaactggatgttgaccttcctagcataattagctctattttttaaaaaaatagttcattatgtatgtttctattttttatggtaccgcctatgtttatataaatttagcctagcactgcttgaataacaagtgattgaatgaggctcatatgcaaccattaaatcaatatttatgaaccaatgtttgttaaagtaataaaacatttacaaggaccatcgatgacctcaagaagctggtggtggcgtagatgggaacgcaccccgagaagatttgcatctagaggtggtgaccccacctctgtcctcaaccgccacctcgtacctcgtcttcggcgccgccggctcctgccccccttggcacgccttcggggtcctcgctggcggcaagcacctccgtcccggaggcatctgccgctgcagcatagaccaccgcgtcctcgctcagcagcaccgatgtcgatgatggcaacaaggaggacggctccgcgagcacccccgagatctgctgctgccactcccacgcagctcttgcttgtgagatctgtgtgcaggttgatgtcctcgtggcgccacgccgacctcaccgccaccaagcgcgccacccatgtcctcaccgacctcgccaaaaactataagaataggtgtagtcactgtcggggtgtacatccaattgagttttgagttggtgtttagctttcccttaccagggacggatcaaagcaccgtaataagtgtcgatatagctctttcaattgcgcctattgttttgtgcgggctatatggatcaaggaaccctctttgcagcagaggtttgttttgtgttctgctgctagtagtcgcatgtcagtttaatcttttgagttctggaagctgttggtcccttaggtgtttgggagatccttttgaatcgaagcacacacactcaggtgctatgacctttggcatttcatagttgcatatttaactggtgtgcgaagagcaccaggatagcacccttgcagcaggaacttacttttggttgcttttctgttgcctgtcatatcccgatatttgtttcctgcaaatttactttgtttaattgtattctattgattttacagcttttgtacttgtacagttacattgtcatctggtttctattgcacgtgtagctgattagttgtagtcactatcttgcaagcatagatattagggaggtattatgtccagtcaagttttgtgttggctatgtgtagcgaattaggattgcttttcctgggatggatcagagcacatgtactgtggcgatatagttgtttcaatagtatagttgccaaattttatgtgtgtgctatatagaccagggaacccacttagaagcagaaaattttctgtgtgcgcgcgaaattttctgtgtgtgctaacaaattgcaggcaaccatcttaacaacaaaagaggctcgtacaatagcagagatgatgctaaaccacttgtgcatgcaaagtatcaaaaaggagaccagacacatgttgatgaaacatctaaaaaggtcctggaatctgaatgcacaaatgtggagaccttatagaaaagggcacaagcacacatgcatcttgctgatcttgatttggcggaggcagacatcaagaaagctctagataaactacagatccagacatgttaatcatatgtactactgaagttggcttaatgaaatcttttgagaataacttgcctatttaacttgtgtcctttttgatggtggcgttgtttgttagctacaaaatcatcaatcaaagattgtaattatatcatatcactgttttctattaatttttaagctgccgtagcaaggcacgggcatcctactagttcccgtatatggtacaaaatgcaacattcgtctcaggatttatgtttctcgactatggtgacaggcctgttttcatccttctttcttcgttgtcttg

SEQ ID NO: 53309 - DNA, 3947 bp, Zea Mays
gtaggcgtccactatcgcgcggtgcacgttctgccgctccgctcacgcccgcggccgaacgctcccccgcaccttccatcctccgcgcagccacagctgcgattccctgctccccgcaccttccatcctctgcgcagccacagccgcgattcccgccgccccgccgcgctcaccttccctcccgcggcagagtgctccctcgacggggccgccccaaccatcgccctcctcatccgccatcgcgatccactcctcgacgcaatccatctaccccacagaactgctgccggcgtggcagatctcctcctcggcacctagatctcctcggcgcgatcaacggctgagcccgctgcccccaccacacaaccgatatgctctccatggaaggtcagggacctgctcgcccatgatctccatggaaggtggtctactgtcgacggcctctccctcgtgctccttcgtcaaccccgtccgccgcgccgccgagccccgagatcgcgccgatccgccattctcgcgccctcgccccgacacgcgctcaccaccggccctcaccaacctccactcgcgttccccacaccaccctccaccccatccgcgtccgccccatccgtagcacgcgggctgcagccgccccatccctaaaatgtgggcgctggcgctaccacggctccgcaccatgcctccgcgctgccagacagcgccgggcgataccatgcccccaccccggcttcttcctgccagtgaggagcagcggaagcccgaaccgaatccaaccgagtcatctcaacgactccgccagtttccaatcgccccttttttaggcgttcaagttccttcgagatgatgacaagcagaggagagcgtctccttcaatccctctggcgacaccaacaacgcatccccgtggccatcctcgattctccttgccaaggaggcgacagccaagtcgtcgcggtcacggccggcgatccactcgagggtgttcctggtgagtagcaccactgcggtggggatcggggatgggggaggcggcaatggcgatggcggggtgcagctcgccgacaaccttaagatcttcaaggctgacaacttcgatctcgacgtctagattccttccaaggctctgtgcagctgttcatccatttctcccttcgatgtcggtgtttgtccctgctatgtgtgttggatcaccattgacatatatgtggaagtaggttctctgctgaaagaatacatacctgtaacaaactggggattagaccggcatacagtgctggtaccccaccttggtcgacaatcttaagcttcagcacagcaaccagcaatggccccatagagagaatgcagataagccatcttcagtatgccatacactccatagaatacaacgccagaggatgccatactgataagagaaggcaccaatcccttatacagcgagaagaatccttcagtttggatcatgtggcgggcaacaccaatgaccccacctaaagcttcaccaccaggagcatccatctttgtcctgatctgaaaccaacagctcaaatcaggttgattagcccttgacatttatcaccaagggacaaagcacactaactgctttatactctgggacataaatactaggatcttacatcgtttctggacaacactacagggatcttgtgaagacataggatggttgcaaagaactcgggcatcacttcgttcagttgatgggacaggtcacttcaaggagattttgcatgagataaggtggaacaatcacttctcatcacaggttttggatatgaacatgatgatgctaggatgaccaatataaatttgtttaaggaatttactgccctaagcagggtaagtgtttcctgaactacaattgttttttttggctttttgcagatctgcacatctgaatttcctattatcctgttgggctgcctcttttttggagtgactgtagcaaccacttctaattcattttcaattgtattgaactggatgttgaccttcctagcataattagctctattttttaaaaaaatagttcattatgtatgtttctattttttatggtaccgcctatgtttatataaatttagcctagcactgcttgaataacaagtgattgaatgaggctcatatgcaaccattaaatcaatatttatgaaccaatgtttgttaaagtaataaaacatttacaaggaccatcgatgacctcaagaagctggtggtggcgtagatgggaacgcaccccgagaagatttgcatctagaggtggtgaccccacctctgtcctcaaccgccacctcgtacctcgtcttcggcgccgccggctcctgccccccttggcacgccttcggggtcctcgctggcggcaagcacctccgtcccggaggcatctgccgctgcagcatagaccaccgcgtcctcgctcagcagcaccgatgtcgatgatggcaacaaggaggacggctccgcgagcacccccgagatctgctgctgccactcccacgcagctcttgcttgtgagatctgtgtgcaggttgatgtcctcgtggcgccacgccgacctcaccgccaccaagcgcgccacccatgtcctcaccgacctcgccaaaaactataagaataggtgtagtcactgtcggggtgtacatccaattgagttttgagttggtgtttagctttcccttaccagggacggatcaaagcaccgtaataagtgtcgatatagctctttcaattgcgcctattgttttgtgcgggctatatggatcaaggaaccctctttgcagcagaggtttgttttgtgttctgctgctagtagtcgcatgtcagtttaatcttttgagttctggaagctgttggtcccttaggtgtttgggagatccttttgaatcgaagcacacacactcaggtgctatgacctttggcatttcatagttgcatatttaactggtgtgcgaagagcaccaggatagcacccttgcagcaggaacttacttttggttgcttttctgttgcctgtcatatcccgatatttgtttcctgcaaatttactttgtttaattgtattctattgattttacagcttttgtacttgtacagttacattgtcatctggtttctattgcacgtgtagctgattagttgtagtcactatcttgcaagcatagatattagggaggtattatgtccagtcaagttttgtgttggctatgtgtagcgaattaggattgcttttcctgggatggatcagagcacatgtactgtggcgatatagttgtttcaatagtatagttgccaaattttatgtgtgtgctatatagaccagggaacccacttagaagcagaaaattttctgtgtgcgcgcgaaattttctgtgtgtgctaacaaattgcaggcaaccatcttaacaacaaaagaggctcgtacaatagcagagatgatgctaaaccacttgtgcatgcaaagtatcaaaaaggagaccagacacatgttgatgaaacatctaaaaaggtcctggaatctgaatgcacaaatgtggagaccttatagaaaagggcacaagcacacatgcatcttgctgatcttgatttggcggaggcagacatcaagaaagctctagataaactacagatccagacatgttaatcatatgtactactgaagttggcttaatgaaatcttttgagaataacttgcctatttaacttgtgtcctttttgatggtggcgttgtttgttagctacaaaatcatcaatcaaagattgtaattatatcatatcactgttttctattaatttttaagctgccgtagcaaggcacgggcatcctactagttcccgtatatggtacaaaatgcaacattcgtctcaggatttatgtttctcgactatggtgacaggcctgttttcatccttctttcttcgttgtcttg

SEQ ID NO: 53310 - DNA, 1687 bp, Zea Mays
gttggatcagaccgtctggtccagcttccagcctccaggcccatgtgaaacggtggatggcccgccctacgcgacccgggttctgcaccctgccgtttcttctccattattcccagcgggcgcgctcgctctctctttctccctcccctcctcgtggcgacgattgggggcagtcgctgccgccgtacgccaggtgcccagatcttcttcatgcccttctccagcgacgagtatcagaagggtgggcgacaacatcccatatgacattgtagcttaccttcatctatttgttagctgtttgtgcttttaaggatgcataagcgtatggcggttttgatggtatccattgtttgaacgatgggaggatagaagaccattctctgcataaatagtgccttgcacgggtaccattcttgttccatccgacgcttcagttggtttgccgctcttggcgagcatcagtttgcagtggcgaacttctcaaaattcgtaaccagattggtacgacagaagagctcttgtgtgtgttggcgtttgaaccagaaaacatgtggcaactttatgatcccctacgagacaagtggataactcttcctgtcatgccatctcagattaggaacatagcccgctttggcgtggcctcagttgctggcaagctctatgtaattggtggtggcagtgatcgagttgatccgcttactggagatcacgacaggatctttgcaagcaatgaggtttggtcttatgatccgctgcaccgtgtgtggtcccagagggctcctatgcttgtggctcgagcgatgtttgcttgttgtgcactggatgggaaaataatcgttgcaggaggcttcactaactgccgcaaatcgatatcaaaggctgagatctatgaccctgaagctggcatatgggagcctcttcctgaccttcgtctggctcatagctctgcatgtactggacttgtcatcaagggtaagatgcatgtattgcataaaggtctatcgacagttcagattctggaagatggtggcagtcattgggctgttgaggatttctcttggttgcaaggcccgatggcgatggtcggtggagagctgtatgtgctgagtaacagctgtattatgaagcaacgtggtgagaacttccctgataagatggtatcgtgtgcatctgagttccagagcaggatcggtttcgggatgattggtgtgggtgacaacatatatttggttggaggagtgattggacctgggccgagaaaccaatgcatcaagctgctctctgatgttgatatcttgaacgtcacaagtgagagaccaacctggagaccagggtcgccgatgacgcattgccgagggagcatctgtggctgcgctttgttgaggatttagcgtcttcccagtgtgatagtgtgagtattccaccattgctgaactgatcggtgacgtcctaagttttattttattttcaaaagggttgttatttacgctttccttttggatcctttgtagcattgagggcatgactcaatgttggattgccaatgagatatatactatattgaccatgaacagtgttccagaacacactatatacttcatcattttcatttggcatttaaatattttggtggttttaaatgacatcttgctggtttgaatagcctttgttgtgtgatttccctcat

SEQ ID NO: 53311 - DNA, 2395 bp, Zea Mays
aaaaaagtcaacttgaatagaaaaaacttaccacaaaggtgcagattgagaaggctttcagagaaggcacagcgcggcaaaatgcacatagcgttttcgtgtcccttgctctaaaactgttagaagaacgagttcatgttgcctgcaaggaaataattacattggaaaaacagaccaagcttcttgaggaagaagagaaagaaaagcgtgaagaagaggagcgcagggagaggaggagaacaaaagaaagagaaaagaagaatagaagaaaagagaggctgaaaggaaaggacagagataaggaaaaaacactggttcggtcaaaaaaaccagatctttcaccattttctctgtgcagccaagcaacaccaagtaataatgagtctcaggatgttctagacttgagatattcagatagtgaagaggaagacaatgttgtggtcggggaacactatcctgattcctctgctgatcaatcttcaagcaaggacagtgatgaacgaagcaatgggcatgaatgcagtgtaacaatagaatttgttccctcagattgtgatagctcattcttatgtgatgagcctaaatcatcaagaaacctgagatttagaagagacttccctgaagagaaagatgctagttattggcatgagggttgctgtgatgattctggagatactcaatggcagtctagagagaggaccagaaataacactagaaattataactctgtatttaatacaaataaccgtacaagagacaggtacaacccctgcagctgtagccatcaagaagactacagatattttaccacagcaactagatcaagtagggagacaaagatgcccaggaaaacagtggctgagaagcccaggttgcaataccgcaggtgctatcctccggatagctttgctgtgtcaaatggaggacgtgttggtggtacaccaaacaaaaacccaggtccaaaacaagtatgggagccaatggatgcaagaaagaagacagggaatgggaatagtgctactggggctgctgatggttcagatcaagtagaatgctcaaataatatcagtgaatgtgaaaagcttgaggcagtgtgtgactctcttgttgaaatttgttctgagatatctgcggaaacctgtaagtcagacacagatcaaccatggagacaaggtgagaagaatcagtctgcttgcagcgatgaatctaaatgcgtggataagccaaattgctccaaggacactggtaggacgacaaacttaaccacttcggatagctcctcgtgtctaagtgagggagatagagacagcagcatgacctcactgagtgttcagaatgtagaatcttcatctgcatctgattcagaagagtcttcagacaggaacaatagcagcccaggcgatataccagcgaagaatgtttctcgtacattacttgagatgtgtgcaggaaatggtttcagagagtaccaaccaaaaggcttgaaccctcctaatggtaaccaatttggatttatggtggccccttcacaggagcagatgttataccaacagaaggtccatgcaccgccgtactcgtcaccattcatggggttccacaatcaccccttggcagttccaacaaatgggtacttaccatatactcagccaggtcacttctaccctgcttctatgacccctgttggatatggagttgctggtgaccaatgtgtcgacttctcgatgcagtacagaaataacattcatccttactcgggtcctgaatttggttttctgccttcacagccagttcacaagacctcagtgaacttccatgcggtaccagtgacaccactgaccccgttgtgtagccgcggaatgccagtggcgacaaatcaagagaggcagcagagtcctgccctcttccctaaattaaaacaggcagtgctggtccctgagaccgtctgtgcaggagacaacaccttcaaacagaaaggcgatgacgtagacagcacacccttctccttgttccagttcaacctgccgattgcccctcccaccctggcaacatccaaagagcgaagtggggaactggcaccagctcagatagctcgagtccagccgtgctcgagggaggagaccaacgtcaaggaatacaacattttctctgggtgtgacggggtgatgtttcagctcaactagagacgaagaaaattgagcagctattcaatatacagcgttacatggtggagagcaggtggcctgagaggaggactagtacgaggaatttgacgaggtcttgatggcatctcccagtcaacttaatggcgctaaggaaatattattagttcttttatttgttatcatttatttttgtaagacacttcctctatgtaataatgtttatgacatttatc

SEQ ID NO: 53312 - DNA, 3901 bp, Zea Mays
ggcaaatttctccttcctgcatgagcctgacctcatctcatcatcgcctccaactcaccagagaagagaaatccttctccctcgtctctcgccaatcttttctatcaaaccctcttccttccatctcagatccctctcccgtcccagctcgatcctgcccgatggccaccggatcgtacgccgcttccgtccgacgctgagcaaccaggacaacgacctccgacgaccccccgagcacccacgagatggtcgcggaggcggcgccgttctcctcatcggcgatctggtcgtgtcaccgcgacgagatcaccttcgaccgcctccacaagttttggagtgccctgtcacctcatgcacgacatgagctgttaagacttgataaacagacccttattgagcatgctcgcaagaatttgtactgttcaaggtgtaatgggttgcttttggaaagtttcacacaaatagtcatgtatgggaagtctctgcttcatgaaggttcatgtgagccaaggattcaggaagttgaagcagaagttcaggaaccttcagttcatccttggggaggtctttcgacaacaaaggatggcatcctaactcttcttgattgcttcataaatgcaaaatctcttcatgtgatccagaatgtatttgacaatgcacgtgcgagagaacgtgaacgtgagatgctttaccctgatgcatgtggtggcggtggcagaggatggattagcccagtgatacctaactatggcaggggccatggaacacgagatacctgtgctttgcacactgcacacctttcttgtgatactctggtggatttttggtcggctctgggtgaagaaactagatcatctcttttaaggatgaaagaagaggacttcattgaaagacttatgcacagattcgacagcaagagattctgcagagactgcagaaggaatgttattcgcgaattcaaggagctcaaggaactaaaacgcatgcgaagggaacctcgctgcactagttggttttgtgttgcagataccacatttaagtgtgaggtgttcgaggatgctattcttgttgattggcatcaatctttattggagcaagatggaatataccatcatttcgagtgggctattggaacagatgaaggaaaatctgatattctaaactttgaaaatgtgggcatgaatggacaagtccacaggaaaggcctcgatcttgatcactttgaagactattttgttacactgagagcatggaggctggatggtcgctgtactgaattctgtgtgaaggcgcatgccttgaagggccaatcatgtgttcaccggaggctaattgtgggggatggatttgtgacaattaccaaaggtgaaagtattagaagtttctttgagtatgctgaagaagcagaggaagaggatgaagatgatgtagtggacagagacagcaatgaccctgatggtgatatcgctcatccacagaagcatgccaagagccctgaacttgcaagagaatttctcctggatgctgctgctgttatcttcaaagaacagattgagaaggctttcagagaaggcacagcgcggcaaaatgcacatagcgttttcgtgtcccttgctctaaaactgttagaagaacgagttcatgttgcctgcaaggaaataattacattggaaaaacagaccaagcttcttgaggaagaagagaaagaaaagcgtgaagaagaggagcgcagggagaggaggagaacaaaagaaagagaaaagaagaatagaagaaaagagaggctgaaaggaaaggacagagataaggaaaaaacactggttcggtcaaaaaaaccagatctttcaccattttctctgtgcagccaagcaacaccaagtaataatgagtctcaggatgttctagacttgagatattcagatagtgaagaggaagacaatgttgtggtcggggaacactatcctgattcctctgctgatcaatcttcaagcaaggacagtgatgaacgaagcaatgggcatgaatgcagtgtaacaatagaatttgttccctcagattgtgatagctcattcttatgtgatgagcctaaatcatcaagaaacctgagatttagaagagacttccctgaagagaaagatgctagttattggcatgagggttgctgtgatgattctggagatactcaatggcagtctagagagaggaccagaaataacactagaaattataactctgtatttaatacaaataaccgtacaagagacaggtacaacccctgcagctgtagccatcaagaagactacagatattttaccacagcaactagatcaagtagggagacaaagatgcccaggaaaacagtggctgagaagcccaggttgcaataccgcaggtgctatcctccggatagctttgctgtgtcaaatggaggacgtgttggtggtacaccaaacaaaaacccaggtccaaaacaagtatgggagccaatggatgcaagaaagaagacagggaatgggaatagtgctactggggctgctgatggttcagatcaagtagaatgctcaaataatatcagtgaatgtgaaaagcttgaggcagtgtgtgactctcttgttgaaatttgttctgagatatctgcggaaacctgtaagtcagacacagatcaaccatggagacaaggtgagaagaatcagtctgcttgcagcgatgaatctaaatgcgtggataagccaaattgctccaaggacactggtaggacgacaaacttaaccacttcggatagctcctcgtgtctaagtgagggagatagagacagcagcatgacctcactgagtgttcagaatgtagaatcttcatctgcatctgattcagaagagtcttcagacaggaacaatagcagcccaggcgatataccagcgaagaatgtttctcgtacattacttgagatgtgtgcaggaaatggtttcagagagtaccaaccaaaaggcttgaaccctcctaatggtaaccaatttggatttatggtggccccttcacaggagcagatgttataccaacagaaggtccatgcaccgccgtactcgtcaccattcatggggttccacaatcaccccttggcagttccaacaaatgggtacttaccatatactcagccaggtcacttctaccctgcttctatgacccctgttggatatggagttgctggtgaccaatgtgtcgacttctcgatgcagtacagaaataacattcatccttactcgggtcctgaatttggttttctgccttcacagccagttcacaagacctcagtgaacttccatgcggtaccagtgacaccactgaccccgttgtgtagccgcggaatgccagtggcgacaaatcaagagaggcagcagagtcctgccctcttccctaaattaaaacaggcagtgctggtccctgagaccgtctgtgcaggagacaacaccttcaaacagaaaggcgatgacgtagacagcacacccttctccttgttccagttcaacctgccgattgcccctcccaccctggcaacatccaaagagcgaagtggggaactggcaccagctcagatagctcgagtccagccgtgctcgagggaggagaccaacgtcaaggaatacaacattttctctgggtgtgacggggtgatgtttcagctcaactagagacgaagaaaattgagcagctattcaatatacagcgttacatggtggagagcaggtggcctgagaggaggactagtacgaggaatttgacgaggtcttgatggcatctcccagtcaacttaatggcgctaaggaaatattattagttcttttatttgttatcatttatttttgtaagacacttcctctatgtaataatgtttatgacatttatc

SEQ ID NO: 53313 - DNA, 3626 bp, Zea Mays
tcctgcatgagcctgacctcatctcatcatcgcctccaactcaccagagaagagaaatccttctccctcgtctctcgccaatcttttctatcaaaccctcttccttccatctcagatccctctcccgtcccagctcgatcctgcccgatggccaccggatcgtacgccgcttccgtccgacgctgagcaaccaggacaacgacctccgacgaccccccgagcacccacgagatggtcgcggaggcggcgccgttctcctcatcggcgatctggtcgtgtcaccgcgacgagatcaccttcgaccgcctccacaaggtatttgacaatgcacgtgcgagagaacgtgaacgtgagatgctttaccctgatgcatgtggtggcggtggcagaggatggattagcccagtgatacctaactatggcaggggccatggaacacgagatacctgtgctttgcacactgcacacctttcttgtgatactctggtggatttttggtcggctctgggtgaagaaactagatcatctcttttaaggatgaaagaagaggacttcattgaaagacttatgcacagattcgacagcaagagattctgcagagactgcagaaggaatgttattcgcgaattcaaggagctcaaggaactaaaacgcatgcgaagggaacctcgctgcactagttggttttgtgttgcagataccacatttaagtgtgaggtgttcgaggatgctattcttgttgattggcatcaatctttattggagcaagatggaatataccatcatttcgagtgggctattggaacagatgaaggaaaatctgatattctaaactttgaaaatgtgggcatgaatggacaagtccacaggaaaggcctcgatcttgatcactttgaagactattttgttacactgagagcatggaggctggatggtcgctgtactgaattctgtgtgaaggcgcatgccttgaagggccaatcatgtgttcaccggaggctaattgtgggggatggatttgtgacaattaccaaaggtgaaagtattagaagtttctttgagtatgctgaagaagcagaggaagaggatgaagatgatgtagtggacagagacagcaatgaccctgatggtgatatcgctcatccacagaagcatgccaagagccctgaacttgcaagagaatttctcctggatgctgctgctgttatcttcaaagaacagattgagaaggctttcagagaaggcacagcgcggcaaaatgcacatagcgttttcgtgtcccttgctctaaaactgttagaagaacgagttcatgttgcctgcaaggaaataattacattggaaaaacagaccaagcttcttgaggaagaagagaaagaaaagcgtgaagaagaggagcgcagggagaggaggagaacaaaagaaagagaaaagaagaatagaagaaaagagaggctgaaaggaaaggacagagataaggaaaaaacactggttcggtcaaaaaaaccagatctttcaccattttctctgtgcagccaagcaacaccaagtaataatgagtctcaggatgttctagacttgagatattcagatagtgaagaggaagacaatgttgtggtcggggaacactatcctgattcctctgctgatcaatcttcaagcaaggacagtgatgaacgaagcaatgggcatgaatgcagtgtaacaatagaatttgttccctcagattgtgatagctcattcttatgtgatgagcctaaatcatcaagaaacctgagatttagaagagacttccctgaagagaaagatgctagttattggcatgagggttgctgtgatgattctggagatactcaatggcagtctagagagaggaccagaaataacactagaaattataactctgtatttaatacaaataaccgtacaagagacaggtacaacccctgcagctgtagccatcaagaagactacagatattttaccacagcaactagatcaagtagggagacaaagatgcccaggaaaacagtggctgagaagcccaggttgcaataccgcaggtgctatcctccggatagctttgctgtgtcaaatggaggacgtgttggtggtacaccaaacaaaaacccaggtccaaaacaagtatgggagccaatggatgcaagaaagaagacagggaatgggaatagtgctactggggctgctgatggttcagatcaagtagaatgctcaaataatatcagtgaatgtgaaaagcttgaggcagtgtgtgactctcttgttgaaatttgttctgagatatctgcggaaacctgtaagtcagacacagatcaaccatggagacaaggtgagaagaatcagtctgcttgcagcgatgaatctaaatgcgtggataagccaaattgctccaaggacactggtaggacgacaaacttaaccacttcggatagctcctcgtgtctaagtgagggagatagagacagcagcatgacctcactgagtgttcagaatgtagaatcttcatctgcatctgattcagaagagtcttcagacaggaacaatagcagcccaggcgatataccagcgaagaatgtttctcgtacattacttgagatgtgtgcaggaaatggtttcagagagtaccaaccaaaaggcttgaaccctcctaatggtaaccaatttggatttatggtggccccttcacaggagcagatgttataccaacagaaggtccatgcaccgccgtactcgtcaccattcatggggttccacaatcaccccttggcagttccaacaaatgggtacttaccatatactcagccaggtcacttctaccctgcttctatgacccctgttggatatggagttgctggtgaccaatgtgtcgacttctcgatgcagtacagaaataacattcatccttactcgggtcctgaatttggttttctgccttcacagccagttcacaagacctcagtgaacttccatgcggtaccagtgacaccactgaccccgttgtgtagccgcggaatgccagtggcgacaaatcaagagaggcagcagagtcctgccctcttccctaaattaaaacaggcagtgctggtccctgagaccgtctgtgcaggagacaacaccttcaaacagaaaggcgatgacgtagacagcacacccttctccttgttccagttcaacctgccgattgcccctcccaccctggcaacatccaaagagcgaagtggggaactggcaccagctcagatagctcgagtccagccgtgctcgagggaggagaccaacgtcaaggaatacaacattttctctgggtgtgacggggtgatgtttcagctcaactagagacgaagaaaattgagcagctattcaatatacagcgttacatggtgagtgatttgtattctcgtaaaacagaataaggtagatcgaggtttttactgtgttgccctcgactattgattctcttttttctcattttgttttgctttgcttcccctcccagttttgtttttgtgtgtatggaaaactgaaaagatagtgagtggtatagattctgcagttttgtcactagatctagcgactttgccccttgatggttatgtggtataaac

SEQ ID NO: 53314 - DNA, 2426 bp, Zea Mays
cacggtcttgacctagtcccgtgcgttcgttgctgggccgcctcgaccgcaacaaagactacaggggggagacacatctctccccacctcgcttcgcacctctccagccgccgcctcctccttcgccggcgtcgacgatgggtgactatggccacggcggggggcagatgcggggcaacccggactcccgccccaggggccagggccagcgccctaacgtccagcagctcaagctcatggggcagatccacccgacggggctcacgcccaacctgcttaagctcttcgaaccgcgtccaccgctcgagtacaagcccccgctggagaagcgcaaattgccggcctacaccgggatggcacaatttgtgtcgcactttgctgagcccgaggatccagagtatgctccgccagtacccaagtgtgagaccagggcagagaagaaggctagaattcgcaataataagctcgagcaaggcgcagctaaggttgctgaagagcttcagaagtatgacccacaaagtgaccccaatgctactggagatccatacaaaacactctttgttgctagacttaactatgagacatctgagcagaggatcaaacgcgagtttgaaggttatggtcctattaaaagggctgaacaaatttcaccgatggagggcaacttggtatagtatttagttctatcgtacaccctttcctttagtataaaattccctggtaaggggatatccaatttatttcccaacgtatgccaatcggccagacagcgcttttcctccaactgtgttgatctgtgctggatttcactcctcgtgtggaagctctacatgtgcaaggttagcacggctgttttaggctttatgcctgtctgtcgtgcagcataaaatatgctaaaaattaaaagaacaaacacaattacaactaaaaatataacatattcttaacttcaggggaactttcttattgaatattgtttcattactaaatttgatctttccaggttcgtcttgtaactgagaaagatacaagtaaacctagaggatatgcattcattgagtatgtgcacacacgagacatgaaaaatgcctacaagcaagcagatgggagaaaagtggacaacaggagggtattagttgatgttgagcgaggcagaactgttccaaattggcgtcctaggagattgggtggtgggttgggatcaagcaggatgggtggtactgatactgacaaaaaggattccactagggagcaacaacaaggtggacgccctagatcagaagagcctcggagggatgatcgtcgtgccgatagggatcgtgaaaaatctcgtgaaagggtacgggaaagagaccgtgaggagaggacccgtgaacgttcgcatgaccggactcgtgatagagatctacgagatgagaagcatcaccatagagaccgtgagaggactcgggatagggagagaggaaaggaccgtgaaagagaccacggccgtgaccgggagcgtgatcgtcgtgacagggacaaggatcgtggtcgggactatgatagagaaagggaccgtggtcgctctcatgatcgccatcgtgagagaggcagggaccgtggtgaaagagattatgagcgcaccagccatgaacgtgaccgtggtcacatgcatgagagggatgcagactatggcaatggtgggacaaagcatgacaaaaatctgtctagttatgggcaggattatggctatggtcagtatgagcaacacaaaggtcatgatgcatatggttacagtcaagatgtacgtggacatgaaactgaacactcaaagcggcatgagcacgaatattatcgtgttgactcgtatggtaaaatggaagctaactatcagatgccgccaaacaatgctgagccagaaggccctgaggaaggtgaggcatatgaggaaggcgactaccagtatcaccggtctggtgaacacatgaaggaagcttgattgcagcgatgagatttgcctgcagctttatactgatacacaacgatggtttcaatgttggttctttgtatgaattagtttcagctgcatagtgcctgtcagttgtgttcttccatgttggggaattctcaaaaggaagcaaaatcttgcccaactgcgtggatttttgaatttgaagcctatggctgccaatatcttgtggaataagatatttgtgtaatctggttgtggagatccatatgatctgccgttatccatctactcttctgttaagaagttttgtatgacagttccttcaaattatttgttccaacattttgcagaacttcagaattgttgttctatttggccttctaacaaaaagttgcttggtaacaactgcaacctttgtcctctacatccaagcacataggtctcatcaataaaatgtaatcatttttttttg

SEQ ID NO: 53315 - DNA, 6818 bp, Zea Mays
cttcctcctcctccctcctctctttctctcaccaagtcgttcgtcacgcagaggaccggacgctcgtgagaggcgagacgagcaatcgaaagccggaaggaagcctaacctctcttccaaagccaaaccgaaaagggaaaaaaagtattgtcgaagagaaaaggaaaaaaataataaaggaacacaagcagcccaccggcgcatcacaggggaagcaaacaggggagaaccctagtcaacagacgccgccgccctccctggctggatctggccgccgtctcctccgccgcccgacgatcgcctgatgcttgtcccgacagaaaggcaacaataacttccctccattgggtgccttaatattcccggaaattgctactggttccactagttgaaagattcaatctatatgcatctacacatgacatgggttctcgaggaaggatgttatttgaccttaacgaactcccagcagaagttgaagaagcagcagctgctgtcgtgccaaaagaatctgctgctgttgtgccaaaagaatctgctgctgtcgtaccacaagaagctgttgttgtggcgttacaagaagctgctgttgtcgtgtcacaacctcagaaatcccttcgtgttccgacgacatatgccccaaccttgtttcagcgaggggaaggatcacagtcgcaggggatattgaacaataatgcctttaagcatgcatccattggttctggatttcagccttttgtgaggaacagcaaagattcaaacaatacaaaggagccgatgaaggtggaagataatcataattctagtatagcatcactgtccatggtaaacaatcagatcaccgacagtgctgcttcaaaggttgagacttgcaataaggtgtcacaagccattgaaagagaagaaggagaatggtctgatgcagatggcatttctgaaaatgcagggagtagcaacaaagatgagttcactggtaccgcaagcactaatttgaagaaagaatcccaagagagcgagccccatcttattaaatctggtgatgtgactaaagatgatactgctgcggaatgtagtgatgctgaaaaggttgatgcatctgaagatcgggttcacgggtccacaggatcagataacatgcaaaattctgaatgtaaaggaaatcagcctggtgatgatctagatctttgcaacaggtcaagggatgttaaaggagtcgaagccaattatgctttgaggtttgcgagcaaccccgcaaagaggcccaagttaaatgaacacaaagaggccatgttaggcaaaaaacgagctaggcaaactgtcttcatcaatgtagaggatgcgaaacaagctggtacaatgaagacatcaacacccaggaggcagtcatcttttccagcaccgattgttacacgtacagtgaaggaagcttctcgtggtgctggtgaaaaggctgcagaaaaacaaagtcagcaagcaatcagggatcagagacaacctgaaatgatgggatcagagcgaagcaattctgcagatcctagtgaccaatacactgaatccaatggtgatgctgagttgggtacccagggccggtcaaagaaaatgaatgcagaagatccagcctcagatgggtatcagcagcctgtccaaagacaagcttcattcaagcaatccatggacttgaagcaaccaaaaagccgatcattctcttcccaaagaacatttctaacaggaacaaacaatgctgatcagaagccagccagcaaaaggtctattatttccaaaaagcaaacttttgtaaacaatgtacaggattcatctgttgagcgacttataagggaggtgacaaacgataagttctggcacaatccagaggaggcagaacttgagtgtgttcctggaagctttgaatctgctgaggagtacattagagtttttgagcctttgctttttgaggaatgcagagctcagctttatagttcgtatgaggagagtcttgaggctgtgggaagggatgcacatgtagcggtccgagtaaaaactgtcgatagacgtgaaagaggatggtacgatgttgtcgttctaccgatccatgaacaaaaatggaatttcaaagaaggcgatgttgctattctatcgtttccacggcctggttcagctgcacaatcaggccgatctagtaggagagctatgggttcaaatgaggatgctgtatcagaatgtggccggcttgttggtactgttaggcgccacatgcctattgatacacgtgatcctattggagctattatccatttttatcttggtgattcatttgattctaacagtgaggctaatgttctgaataaactccaacctcggagtacctggtatctaactggacttggttctcttgcaacaacacaacgagaatatgttgctttacacgctttccgccgtcttagtgtgcagatgcaaaatgcaatacttcaaccaagtccagagcatttcccgaagtatcaagagcaaccaccagtcatgccagactgcttcaccccaaatttcgctgaccatctccatcgtagcttcaatggtcctcaattgtcggcaattcattgggctgcaacacatacagctgctggcacaaacaatggtgtcctaaagaaacaagaaccatggcctttcacgttggtacaaggtcctcctgggacagggaaaactcatactgtgtgggggatgctaaatgttatccatcttgttcagtatcaacattactatgctgctttgcttaagaagcttgctcctgaaagttacaagcaagttagtggtagcactagtaccagctcagagactgttgcagcagggtcaattgatgaactattgcagagcatggaccagaatctatttcgcactcttcccaagctttgccctaagcctcggatgcttgtatgtgccccatcaaatgctgcaacagatgagcttcttgctcgtgttcttgaccgtggttttatagatggtgaaatgaaggtataccgccctgatgttgctcgtgttggagttgattcacagtctcgagctgcacaggctgtttcagttgaaagaaggacagatcagcttttaatgaagggccgtgaagaagtaattgggtggctacatcagctaaaagcccgtgagcagcagctatcacaggagattgcctatcttcaaagggaactcaatatagttgcagcggctggtagatcccagggttcagtaggggtagatcctgatgttcttgctcaaagggatcgtaaccgtgatattctgcttcagaaacttgctgcgtcagttgaaagcagggataaagtattggtggagatgtcacggctgctgatattagaaagcaggttcggtcttggcagcaacttcaatatggaagatgctagggctagtctggaagccagttttgccaatgaagctgagattgtttttacaactgtgtcaagtagcgggcgtaagttattttcccgcctgactcatggctttgatatggttgttattgatgaggctgctcaggctagcgaagtaggagtccttcctccattggctcttggtgcagctagatgtgtcctggttggtgatccacagcaactccctgctactgttattagcaaagcagctggaactttgctttacagtaggagtctattcgagaggtttcagcaggctggttgtcctaccattttattgtcagtgcaatacaggatgcatccccagatccgtgaatttccatcaaaatacttttatcaaggccgtcttacagatagtgagagtgttgttaaattacctgatgaagcctattacagagatgcacttatggcaccttatatcttctacgacttgtcacatggccgtgagtctcataggggtgggtcatcttcatatcagaatattcatgaagcgcagtttgcattgcgtttgtatgagcaccttcagaagttcttgaaagctaacggtgccaagaaggtttctgttggtataatcacaccatataagttgcagttgaagtgccttcagcgggaatttaaggatgttatgaatactgaggaagggaaggatatctacataaatacagttgatgctttccaaggacaggagcgtgacataattattatgtcatgtgtccgtgcatcaaaccatggtgtgggtttcgttgctgatatacggcgtatgaatgtagctctaactagagctaggagagctttatgggttgttggtaatgctaatgctctcatgcagtctgaggactgggcatcgctaatagcggatgcgaaggccaggaaatgttttatggacctggattgcattcccaaggacttcttaccaatgaaggttccatctaatactccaggtaggaattcttccaacaacatccggaacatgaggactggtggtggacctagaccaagacacttggacatgttctcagaaccgagaactggtatgaacatgaggcccgatgaagatgagcgtctgaattctgttccaagaaatggtagttacaggaatttggatgattttgtccgacctggtgatcgtcccagggataatctgcagtttggagttcccaggaggccaaattcttctaatggcaggagagaagtgtaaggagtgtgttgctatctacaactctggtacagcatggaacaatggtgaagagctctgggacggtccagattcagcaaggtgcagattcatgttcagaagattagttgcctctgcattagatcccttgcaccatgtggtggggctggtcacaagaaagcattgctatcagcagaggatgtgcgaatctaccatgatgtgacctccagtcagtggatcaagacgctttcatggtgggtgattataggctcatgatgtcaggttgaagaaaggctgctgtagccctcagtgttatggagttcgcaggagtttctttctcagaacaaggctgtctgatgtgttttgacattgctatccttgctttagccagctccatctttcggtagatacatacatgcatgggcatatccattttgaaacatgccaggagaaagctcactggctctagagcagggagtacaggcaccctgaaatctgaagtgcgccttggatcatctctactttggcgctggtggttttgtggatgtcctctcagtgccactcccagaataccaggccagttgaagtcctcaagcttctgcttggattctagtgtcactctcaactcttgttatcttttgagaagagatcccctgggcccatgacgaactccaggaatgcatggttgcctgcatgatagatgtagagatggcggtcatatagttaaattacacgttctgccgtatgtatatgattttattggagctaatggattttttatctgctttgtttggagaaaaacatagtttgcatctatctctacacgacttgcttttgtaccggaggcacgcagcagcagggttgtatatgtccaacctctgatgggtctgcggtctgccgttgaaagaggggctttggagatctgaagctgggccccattcacaaggagacgcgccacaacgctccaaaggccaaaccagagattatctccgggttgtttacacattgaacttgtctttcaccttgaccttgtttatacatgaacccgcctcggatccgtcaccaggacacgccccctaacaagccaccgtaccatattatgccatcacgcggcggtagcggcaacacgcagcggcaacaggatccaactgtggtggtggtagcctttgcgcagccgaggaggagaacgagacggcgacgcgccattatgccggtgaagagcagcgccagcttccgcatgaccgcgctgcctatggtggtgacggcgcagctgctggcggctgccgtgctcacgctcacgctcgtctgggtgctgcactttcgtggtggcgtctcgtggaagccgacatccaaccctctcttcgtctacacggcacaccctctgttcatggtgatcggctttatcatctgcaccggagaagcggtgatggcgtacaggatcgtgctgggcccgaggtcggccaagaaggcggtgcacctgctgctacatctcgtagccctcaccttcgctgccgtcggcctgtacgccgccttcaagtttcaccatgacgtcggccttcctgacatccgttccctgcattcttggctcgggattgccacgatagcgctctatggtcttcagtggttgatggcattcgtgtactttgtcttccccggggctgtgatgacgatgagggcggactacgctccatggcacatcttctttggcctcgccatctttctgatggccatttgcactgctgagaccggactggccaagttcgtctccgccttcatcgcttacccaggcgaagtgtttgtcgtcaacttcaccgggatcgccatcctcatgtttggcgttgccgtcgtcttggctgtcatccttccgtcaagatactagcaagtgcttaacgattataagtccttccgatccatgcttcttctcaagtcatattgttttatttggactgtgcatgcatgctgaaatgattttgatatattgtttcatttacagagctgcatgctgctggcggtataagtttgatatatatatgatgatactagtaatgccatctaattgtcgttttaccttttaggcccctttatatgcaaaggggatccttcttcatgtcctgaacaaattgatcaattttttcttggtgaaacgtggcgcttgtgcattgtaatatgaaaaaaacgaggcaattgtttttgtgtggcactaaaaaataacatggttg

SEQ ID NO: 53316 - DNA, 7195 bp, Zea Mays
ccttcctcctcctccctcctctctttctctcaccaagtcgttcgtcacgcagaggaccggacgctcgtgagaggcgagacgagcaatcgaaagccggaaggaagcctaacctctcttccaaagccaaaccgaaaagggaaaaaaagtattgtcgaagagaaaaggaaaaaaataataaaggaacacaagcagcccaccggcgcatcacaggggaagcaaacaggggagaaccctagtcaacagacgccgccgccctccctggctggatctggccgccgtctcctccgccgcccgacgatcgcctgatgcttgtcccgacagaaaggcaacaataacttccctccattgggtgccttaatattcccggaaattgctactggttccactagttgaaagattcaatctatatgcatctacacatgacatgggttctcgaggaaggatgttatttgaccttaacgaactcccagcagaagttgaagaagcagcagctgctgtcgtgccaaaagaatctgctgctgttgtgccaaaagaatctgctgctgtcgtaccacaagaagctgttgttgtggcgttacaagaagctgctgttgtcgtgtcacaacctcagaaatcccttcgtgttccgacgacatatgccccaaccttgtttcagcgaggggaaggatcacagtcgcaggggatattgaacaataatgcctttaagcatgcatccattggttctggatttcagccttttgtgaggaacagcaaagattcaaacaatacaaaggagccgatgaaggtggaagataatcataattctagtatagcatcactgtccatggtaaacaatcagatcaccgacagtgctgcttcaaaggttgagacttgcaataaggtgtcacaagccattgaaagagaagaaggagaatggtctgatgcagatggcatttctgaaaatgcagggagtagcaacaaagatgagttcactggtaccgcaagcactaatttgaagaaagaatcccaagagagcgagccccatcttattaaatctggtgatgtgactaaagatgatactgctgcggaatgtagtgatgctgaaaaggttgatgcatctgaagatcgggttcacgggtccacaggatcagataacatgcaaaattctgaatgtaaaggaaatcagcctggtgatgatctagatctttgcaacaggtcaagggatgttaaaggagtcgaagccaattatgctttgaggtttgcgagcaaccccgcaaagaggcccaagttaaatgaacacaaagaggccatgttaggcaaaaaacgagctaggcaaactgtcttcatcaatgtagaggatgcgaaacaagctggtacaatgaagacatcaacacccaggaggcagtcatcttttccagcaccgattgttacacgtacagtgaaggaagcttctcgtggtgctggtgaaaaggctgcagaaaaacaaagtcagcaagcaatcagggatcagagacaacctgaaatgatgggatcagagcgaagcaattctgcagatcctagtgaccaatacactgaatccaatggtgatgctgagttgggtacccagggccggtcaaagaaaatgaatgcagaagatccagcctcagatgggtatcagcagcctgtccaaagacaagcttcattcaagcaatccatggacttgaagcaaccaaaaagccgatcattctcttcccaaagaacatttctaacaggaacaaacaatgctgatcagaagccagccagcaaaaggtctattatttccaaaaagcaaacttttgtaaacaatgtacaggattcatctgttgagcgacttataagggaggtgacaaacgataagttctggcacaatccagaggaggcagaacttgagtgtgttcctggaagctttgaatctgctgaggagtacattagagtttttgagcctttgctttttgaggaatgcagagctcagctttatagttcgtatgaggagagtcttgaggctgtgggaagggatgcacatgtagcggtccgagtaaaaactgtcgatagacgtgaaagaggatggtacgatgttgtcgttctaccgatccatgaacaaaaatggaatttcaaagaaggcgatgttgctattctatcgtttccacggcctggttcagctgcacaatcaggccgatctagtaggagagctatgggttcaaatgaggatgctgtatcagaatgtggccggcttgttggtactgttaggcgccacatgcctattgatacacgtgatcctattggagctattatccatttttatcttggtgattcatttgattctaacagtgaggctaatgttctgaataaactccaacctcggagtacctggtatctaactggacttggttctcttgcaacaacacaacgagaatatgttgctttacacgctttccgccgtcttagtgtgcagatgcaaaatgcaatacttcaaccaagtccagagcatttcccgaagtatcaagagcaaccaccagtcatgccagactgcttcaccccaaatttcgctgaccatctccatcgtagcttcaatggtcctcaattgtcggcaattcattgggctgcaacacatacagctgctggcacaaacaatggtgtcctaaagaaacaagaaccatggcctttcacgttggtacaaggtcctcctgggacagggaaaactcatactgtgtgggggatgctaaatgttatccatcttgttcagtatcaacattactatgctgctttgcttaagaagcttgctcctgaaagttacaagcaagttagtggtagcactagtaccagctcagagactgttgcagcagggtcaattgatgaactattgcagagcatggaccagaatctatttcgcactcttcccaagctttgccctaagcctcggatgcttgtatgtgccccatcaaatgctgcaacagatgagcttcttgctcgtgttcttgaccgtggttttatagatggtgaaatgaaggtataccgccctgatgttgctcgtgttggagttgattcacagtctcgagctgcacaggctgtttcagttgaaagaaggacagatcagcttttaatgaagggccgtgaagaagtaattgggtggctacatcagctaaaagcccgtgagcagcagctatcacaggagattgcctatcttcaaagggaactcaatatagttgcagcggctggtagatcccagggttcagtaggggtagatcctgatgttcttgctcaaagggatcgtaaccgtgatattctgcttcagaaacttgctgcgtcagttgaaagcagggataaagtattggtggagatgtcacggctgctgatattagaaagcaggttcggtcttggcagcaacttcaatatggaagatgctagcgaagtaggagtccttcctccattggctcttggtgcagctagatgtgtcctggttggtgatccacagcaactccctgctactgttattagcaaagcagctggaactttgctttacagtaggagtctattcgagaggtttcagcaggctggttgtcctaccattttattgtcagtgcaatacaggatgcatccccagatccgtgaatttccatcaaaatacttttatcaaggccgtcttacagatagtgagagtgttgttaaattacctgatgaagcctattacagagatgcacttatggcaccttatatcttctacgacttgtcacatggccgtgagtctcataggggtgggtcatcttcatatcagaatattcatgaagcgcagtttgcattgcgtttgtatgagcaccttcagaagttcttgaaagctaacggtgccaagaaggtttctgttggtataatcacaccatataagttgcagttgaagtgccttcagcgggaatttaaggatgttatgaatactgaggaagggaaggatatctacataaatacagttgatgctttccaaggacaggagcgtgacataattattatgtcatgtgtccgtgcatcaaaccatggtgtgggtttcgttgctgatatacggcgtatgaatgtagctctaactagagctaggagagctttatgggttgttggtaatgctaatgctctcatgcagtctgaggactgggcatcgctaatagcggatgcgaaggccaggaaatgttttatggacctggattgcattcccaaggacttcttaccaatgaaggttccatctaatactccaggtaggaattcttccaacaacatccggaacatgaggactggtggtggacctagaccaagacacttggacatgttctcagaaccgagaactggtatgaacatgaggcccgatgaagatgagcgtctgaattctgttccaagaaatggtagttacaggaatttggatgattttgtccgacctggtgatcgtcccagggataatctgcagtttggagttcccaggaggccaaattcttctaatggcaggagagaagtgtaaggagtgtgttgctatctacaactctggtacagcatggaacaatggtgaagagctctgggacggtccagattcagcaaggtgcagattcatgttcagaagattagttgcctctgcattagatcccttgcaccatgtggtggggctggtcacaagaaagcattgctatcagcagaggatgtgcgaatctaccatgatgtgacctccagtcagtggatcaagacgctttcatggtgggtgattataggctcatgatgtcaggttgaagaaaggctgctgtagccctcagtgttatggagttcgcaggagtttctttctcagaacaaggctgtctgatgtgttttgacattgctatccttgctttagccagctccatctttcggtagatacatacatgcatgggcatatccattttgaaacatgccaggagaaagctcactggctctagagcagggtaggtctcaagcgttgttgcctgattgctgctgcgatcgttgcatgcttgacatgtctagtaggatcagtatgctaacataggcagggcttctgtaccatatgacataagttccttctgtatacagggtcgagatctagagaaaagaagttcattatttcattcagctcatgttgttaccctttgttcttgtcaacatgttctgtgcatattgttgaaagatgttaccatgtttgcagtagtgatatttattttcctgattatcagtggcatgagtctgtgcttgtatgttaatctatggattagttttggcactcggtgacagtgtcctgctgatgtttgatacatcatatttaatgaactcagtttttctgcaactgatctactttttctgatacttgcatgtcgaagctaacagaaatactttaggagtacaggcaccctgaaatctgaagtgcgccttggatcatctctactttggcgctggtggttttgtggatgtcctctcagtgccactcccagaataccaggccagttgaagtcctcaagcttctgcttggattctagtgtcactctcaactcttgttatcttttgagaagagatcccctgggcccatgacgaactccaggaatgcatggttgcctgcatgatagatgtagagatggcggtcatatagttaaattacacgttctgccgtatgtatatgattttattggagctaatggattttttatctgctttgtttggagaaaaacatagtttgcatctatctctacacgacttgcttttgtaccggaggcacgcagcagcagggttgtatatgtccaacctctgatgggtctgcggtctgccgttgaaagaggggctttggagatctgaaggtattccacgccaggtgctcctgtaatgtgctggacttctgttctgccactttggttacgcagagctgatccattacaaatgctgggccccattcacaaggagacgcgccacaacgctccaaaggccaaaccagagattatctccgggttgtttacacattgaacttgtctttcaccttgaccttgtttatacatgaacccgcctcggatccgtcaccaggacacgccccctaacaagccaccgtaccatattatgccatcacgcggcggtagcggcaacacgcagcggcaacaggatccaactgtggtggtggtagcctttgcgcagccgaggaggagaacgagacggcgacgcgccattatgccggtgaagagcagcgccagcttccgcatgaccgcgctgcctatggtggtgacggcgcagctgctggcggctgccgtgctcacgctcacgctcgtctgggtgctgcactttcgtggtggcgtctcgtggaagccgacatccaaccctctcttcgtctacacggcacaccctctgttcatggtgatcggctttatcatctgcaccggagaagcggtgatggcgtacaggatcgtgctgggcccgaggtcggccaagaaggcggtgcacctgctgctacatctcgtagccctcaccttcgctgccgtcggcctgtacgccgccttcaagtttcaccatgacgtcggccttcctgacatccgttccctgcattcttggctcgggattgccacgatagcgctctatggtcttcagtggttgatggcattcgtgtactttgtcttccccggggctgtgatgacgatgagggcggactacgctccatggcacatcttctttggcctcgccatctttctgatggccatttgcactgctgagaccggactggccaagttcgtctccgccttcatcgcttacccaggcgaagtgtttgtcgtcaacttcaccgggatcgccatcctcatgtttggcgttgccgtcgtcttggctgtcatccttccgtcaagatactagcaagtgcttaacgattataagtccttccgatccatgcttcttctcaagtcatattgttttatttggactgtgcatgcatgctgaaatgattttgatatattgtttcatttacagagctgcatgctgctggcggtataagtttgatatatatatgatgatactagtaatgccatctaattgtcgttttaccttttaggcccctttatatgcaaaggggatccttcttcatgtcctgaacaaattgatcaattttttcttggtgaaacgtggcgcttgtgcattgtaatatgaaaaaaacgaggcaattgtttttgtgtggcactaaaaaataacatggttg

SEQ ID NO: 53317 - DNA, 6922 bp, Zea Mays
acccttcctcctcctccctcctctctttctctcaccaagtcgttcgtcacgcagaggaccggacgctcgtgagaggcgagacgagcaatcgaaagccggaaggaagcctaacctctcttccaaagccaaaccgaaaagggaaaaaaagtattgtcgaagagaaaaggaaaaaaataataaaggaacacaagcagcccaccggcgcatcacaggggaagcaaacaggggagaaccctagtcaacagacgccgccgccctccctggctggatctggccgccgtctcctccgccgcccgacgatcgcctgggtctgcgtggatgctgagatcctgtatcactagaatccaaattcttgagatgggtaggaagtggacaacaagaggaggaaatggtctgggtcagaacgtgaaaagaatccagcggagaatgatattcagatgcttgtcccgacagaaaggcaacaataacttccctccattgggtgccttaatattcccggaaattgctactggttccactagttgaaagattcaatctatatgcatctacacatgacatgggttctcgaggaaggatgttatttgaccttaacgaactcccagcagaagttgaagaagcagcagctgctgtcgtgccaaaagaatctgctgctgttgtgccaaaagaatctgctgctgtcgtaccacaagaagctgttgttgtggcgttacaagaagctgctgttgtcgtgtcacaacctcagaaatcccttcgtgttccgacgacatatgccccaaccttgtttcagcgaggggaaggatcacagtcgcaggggatattgaacaataatgcctttaagcatgcatccattggttctggatttcagccttttgtgaggaacagcaaagattcaaacaatacaaaggagccgatgaaggtggaagataatcataattctagtatagcatcactgtccatggtaaacaatcagatcaccgacagtgctgcttcaaaggttgagacttgcaataaggtgtcacaagccattgaaagagaagaaggagaatggtctgatgcagatggcatttctgaaaatgcagggagtagcaacaaagatgagttcactggtaccgcaagcactaatttgaagaaagaatcccaagagagcgagccccatcttattaaatctggtgatgtgactaaagatgatactgctgcggaatgtagtgatgctgaaaaggttgatgcatctgaagatcgggttcacgggtccacaggatcagataacatgcaaaattctgaatgtaaaggaaatcagcctggtgatgatctagatctttgcaacaggtcaagggatgttaaaggagtcgaagccaattatgctttgaggtttgcgagcaaccccgcaaagaggcccaagttaaatgaacacaaagaggccatgttaggcaaaaaacgagctaggcaaactgtcttcatcaatgtagaggatgcgaaacaagctggtacaatgaagacatcaacacccaggaggcagtcatcttttccagcaccgattgttacacgtacagtgaaggaagcttctcgtggtgctggtgaaaaggctgcagaaaaacaaagtcagcaagcaatcagggatcagagacaacctgaaatgatgggatcagagcgaagcaattctgcagatcctagtgaccaatacactgaatccaatggtgatgctgagttgggtacccagggccggtcaaagaaaatgaatgcagaagatccagcctcagatgggtatcagcagcctgtccaaagacaagcttcattcaagcaatccatggacttgaagcaaccaaaaagccgatcattctcttcccaaagaacatttctaacaggaacaaacaatgctgatcagaagccagccagcaaaaggtctattatttccaaaaagcaaacttttgtaaacaatgtacaggattcatctgttgagcgacttataagggaggtgacaaacgataagttctggcacaatccagaggaggcagaacttgagtgtgttcctggaagctttgaatctgctgaggagtacattagagtttttgagcctttgctttttgaggaatgcagagctcagctttatagttcgtatgaggagagtcttgaggctgtgggaagggatgcacatgtagcggtccgagtaaaaactgtcgatagacgtgaaagaggatggtacgatgttgtcgttctaccgatccatgaacaaaaatggaatttcaaagaaggcgatgttgctattctatcgtttccacggcctggttcagctgcacaatcaggccgatctagtaggagagctatgggttcaaatgaggatgctgtatcagaatgtggccggcttgttggtactgttaggcgccacatgcctattgatacacgtgatcctattggagctattatccatttttatcttggtgattcatttgattctaacagtgaggctaatgttctgaataaactccaacctcggagtacctggtatctaactggacttggttctcttgcaacaacacaacgagaatatgttgctttacacgctttccgccgtcttagtgtgcagatgcaaaatgcaatacttcaaccaagtccagagcatttcccgaagtatcaagagcaaccaccagtcatgccagactgcttcaccccaaatttcgctgaccatctccatcgtagcttcaatggtcctcaattgtcggcaattcattgggctgcaacacatacagctgctggcacaaacaatggtgtcctaaagaaacaagaaccatggcctttcacgttggtacaaggtcctcctgggacagggaaaactcatactgtgtgggggatgctaaatgttatccatcttgttcagtatcaacattactatgctgctttgcttaagaagcttgctcctgaaagttacaagcaagttagtggtagcactagtaccagctcagagactgttgcagcagggtcaattgatgaactattgcagagcatggaccagaatctatttcgcactcttcccaagctttgccctaagcctcggatgcttgtatgtgccccatcaaatgctgcaacagatgagcttcttgctcgtgttcttgaccgtggttttatagatggtgaaatgaaggtataccgccctgatgttgctcgtgttggagttgattcacagtctcgagctgcacaggctgtttcagttgaaagaaggacagatcagcttttaatgaagggccgtgaagaagtaattgggtggctacatcagctaaaagcccgtgagcagcagctatcacaggagattgcctatcttcaaagggaactcaatatagttgcagcggctggtagatcccagggttcagtaggggtagatcctgatgttcttgctcaaagggatcgtaaccgtgatattctgcttcagaaacttgctgcgtcagttgaaagcagggataaagtattggtggagatgtcacggctgctgatattagaaagcaggttcggtcttggcagcaacttcaatatggaagatgctagggctagtctggaagccagttttgccaatgaagctgagattgtttttacaactgtgtcaagtagcgggcgtaagttattttcccgcctgactcatggctttgatatggttgttattgatgaggctgctcaggctagcgaagtaggagtccttcctccattggctcttggtgcagctagatgtgtcctggttggtgatccacagcaactccctgctactgttattagcaaagcagctggaactttgctttacagtaggagtctattcgagaggtttcagcaggctggttgtcctaccattttattgtcagtgcaatacaggatgcatccccagatccgtgaatttccatcaaaatacttttatcaaggccgtcttacagatagtgagagtgttgttaaattacctgatgaagcctattacagagatgcacttatggcaccttatatcttctacgacttgtcacatggccgtgagtctcataggggtgggtcatcttcatatcagaatattcatgaagcgcagtttgcattgcgtttgtatgagcaccttcagaagttcttgaaagctaacggtgccaagaaggtttctgttggtataatcacaccatataagttgcagttgaagtgccttcagcgggaatttaaggatgttatgaatactgaggaagggaaggatatctacataaatacagttgatgctttccaaggacaggagcgtgacataattattatgtcatgtgtccgtgcatcaaaccatggtgtgggtttcgttgctgatatacggcgtatgaatgtagctctaactagagctaggagagctttatgggttgttggtaatgctaatgctctcatgcagtctgaggactgggcatcgctaatagcggatgcgaaggccaggaaatgttttatggacctggattgcattcccaaggacttcttaccaatgaaggttccatctaatactccaggtaggaattcttccaacaacatccggaacatgaggactggtggtggacctagaccaagacacttggacatgttctcagaaccgagaactggtatgaacatgaggcccgatgaagatgagcgtctgaattctgttccaagaaatggtagttacaggaatttggatgattttgtccgacctggtgatcgtcccagggataatctgcagtttggagttcccaggaggccaaattcttctaatggcaggagagaagtgtaaggagtgtgttgctatctacaactctggtacagcatggaacaatggtgaagagctctgggacggtccagattcagcaaggtgcagattcatgttcagaagattagttgcctctgcattagatcccttgcaccatgtggtggggctggtcacaagaaagcattgctatcagcagaggatgtgcgaatctaccatgatgtgacctccagtcagtggatcaagacgctttcatggtgggtgattataggctcatgatgtcaggttgaagaaaggctgctgtagccctcagtgttatggagttcgcaggagtttctttctcagaacaaggctgtctgatgtgttttgacattgctatccttgctttagccagctccatctttcggtagatacatacatgcatgggcatatccattttgaaacatgccaggagaaagctcactggctctagagcagggagtacaggcaccctgaaatctgaagtgcgccttggatcatctctactttggcgctggtggttttgtggatgtcctctcagtgccactcccagaataccaggccagttgaagtcctcaagcttctgcttggattctagtgtcactctcaactcttgttatcttttgagaagagatcccctgggcccatgacgaactccaggaatgcatggttgcctgcatgatagatgtagagatggcggtcatatagttaaattacacgttctgccgtatgtatatgattttattggagctaatggattttttatctgctttgtttggagaaaaacatagtttgcatctatctctacacgacttgcttttgtaccggaggcacgcagcagcagggttgtatatgtccaacctctgatgggtctgcggtctgccgttgaaagaggggctttggagatctgaaggtattccacgccaggtgctcctgtaatgtgctggacttctgttctgccactttggttacgcagagctgatccattacaaatgctgggccccattcacaaggagacgcgccacaacgctccaaaggccaaaccagagattatctccgggttgtttacacattgaacttgtctttcaccttgaccttgtttatacatgaacccgcctcggatccgtcaccaggacacgccccctaacaagccaccgtaccatattatgccatcacgcggcggtagcggcaacacgcagcggcaacaggatccaactgtggtggtggtagcctttgcgcagccgaggaggagaacgagacggcgacgcgccattatgccggtgaagagcagcgccagcttccgcatgaccgcgctgcctatggtggtgacggcgcagctgctggcggctgccgtgctcacgctcacgctcgtctgggtgctgcactttcgtggtggcgtctcgtggaagccgacatccaaccctctcttcgtctacacggcacaccctctgttcatggtgatcggctttatcatctgcaccggagaagcggtgatggcgtacaggatcgtgctgggcccgaggtcggccaagaaggcggtgcacctgctgctacatctcgtagccctcaccttcgctgccgtcggcctgtacgccgccttcaagtttcaccatgacgtcggccttcctgacatccgttccctgcattcttggctcgggattgccacgatagcgctctatggtcttcagtggttgatggcattcgtgtactttgtcttccccggggctgtgatgacgatgagggcggactacgctccatggcacatcttctttggcctcgccatctttctgatggccatttgcactgctgagaccggactggccaagttcgtctccgccttcatcgcttacccaggcgaagtgtttgtcgtcaacttcaccgggatcgccatcctcatgtttggcgttgccgtcgtcttggctgtcatccttccgtcaagatactagcaaagctgcatgctgctggcggtataagtttgatatatatatgatgatactagtaatgccatctaattgtcgttttaccttttaggcccctttatatgcaaaggggatccttcttcatgtcctgaacaaattgatcaattttttcttggtgaaacgtggcgcttgtgcattgtaatatgaaaaaaacgaggcaattgtttttgtgtggcactaaaaaataacatggttg

SEQ ID NO: 53318 - DNA, 6883 bp, Zea Mays
gagcttgagcgctataaattcagccccacccctggcctcctgccctcacacccacccttcctcctcctccctcctctctttctctcaccaagtcgttcgtcacgcagaggaccggacgctcgtgagaggcgagacgagcaatcgaaagccggaaggaagcctaacctctcttccaaagccaaaccgaaaagggaaaaaaagtattgtcgaagagaaaaggaaaaaaataataaaggaacacaagcagcccaccggcgcatcacaggggaagcaaacaggggagaaccctagtcaacagacgccgccgccctccctggctggatctggccgccgtctcctccgccgcccgacgatcgcctgatgcttgtcccgacagaaaggcaacaataacttccctccattgggtgccttaatattcccggaaattgctactggttccactagttgaaagattcaatctatatgcatctacacatgacatgggttctcgaggaaggatgttatttgaccttaacgaactcccagcagaagttgaagaagcagcagctgctgtcgtgccaaaagaatctgctgctgttgtgccaaaagaatctgctgctgtcgtaccacaagaagctgttgttgtggcgttacaagaagctgctgttgtcgtgtcacaacctcagaaatcccttcgtgttccgacgacatatgccccaaccttgtttcagcgaggggaaggatcacagtcgcaggggatattgaacaataatgcctttaagcatgcatccattggttctggatttcagccttttgtgaggaacagcaaagattcaaacaatacaaaggagccgatgaaggtggaagataatcataattctagtatagcatcactgtccatggtaaacaatcagatcaccgacagtgctgcttcaaaggttgagacttgcaataaggtgtcacaagccattgaaagagaagaaggagaatggtctgatgcagatggcatttctgaaaatgcagggagtagcaacaaagatgagttcactggtaccgcaagcactaatttgaagaaagaatcccaagagagcgagccccatcttattaaatctggtgatgtgactaaagatgatactgctgcggaatgtagtgatgctgaaaaggttgatgcatctgaagatcgggttcacgggtccacaggatcagataacatgcaaaattctgaatgtaaaggaaatcagcctggtgatgatctagatctttgcaacaggtcaagggatgttaaaggagtcgaagccaattatgctttgaggtttgcgagcaaccccgcaaagaggcccaagttaaatgaacacaaagaggccatgttaggcaaaaaacgagctaggcaaactgtcttcatcaatgtagaggatgcgaaacaagctggtacaatgaagacatcaacacccaggaggcagtcatcttttccagcaccgattgttacacgtacagtgaaggaagcttctcgtggtgctggtgaaaaggctgcagaaaaacaaagtcagcaagcaatcagggatcagagacaacctgaaatgatgggatcagagcgaagcaattctgcagatcctagtgaccaatacactgaatccaatggtgatgctgagttgggtacccagggccggtcaaagaaaatgaatgcagaagatccagcctcagatgggtatcagcagcctgtccaaagacaagcttcattcaagcaatccatggacttgaagcaaccaaaaagccgatcattctcttcccaaagaacatttctaacaggaacaaacaatgctgatcagaagccagccagcaaaaggtctattatttccaaaaagcaaacttttgtaaacaatgtacaggattcatctgttgagcgacttataagggaggtgacaaacgataagttctggcacaatccagaggaggcagaacttgagtgtgttcctggaagctttgaatctgctgaggagtacattagagtttttgagcctttgctttttgaggaatgcagagctcagctttatagttcgtatgaggagagtcttgaggctgtgggaagggatgcacatgtagcggtccgagtaaaaactgtcgatagacgtgaaagaggatggtacgatgttgtcgttctaccgatccatgaacaaaaatggaatttcaaagaaggcgatgttgctattctatcgtttccacggcctggttcagctgcacaatcaggccgatctagtaggagagctatgggttcaaatgaggatgctgtatcagaatgtggccggcttgttggtactgttaggcgccacatgcctattgatacacgtgatcctattggagctattatccatttttatcttggtgattcatttgattctaacagtgaggctaatgttctgaataaactccaacctcggagtacctggtatctaactggacttggttctcttgcaacaacacaacgagaatatgttgctttacacgctttccgccgtcttagtgtgcagatgcaaaatgcaatacttcaaccaagtccagagcatttcccgaagtatcaagagcaaccaccagtcatgccagactgcttcaccccaaatttcgctgaccatctccatcgtagcttcaatggtcctcaattgtcggcaattcattgggctgcaacacatacagctgctggcacaaacaatggtgtcctaaagaaacaagaaccatggcctttcacgttggtacaaggtcctcctgggacagggaaaactcatactgtgtgggggatgctaaatgttatccatcttgttcagtatcaacattactatgctgctttgcttaagaagcttgctcctgaaagttacaagcaagttagtggtagcactagtaccagctcagagactgttgcagcagggtcaattgatgaactattgcagagcatggaccagaatctatttcgcactcttcccaagctttgccctaagcctcggatgcttgtatgtgccccatcaaatgctgcaacagatgagcttcttgctcgtgttcttgaccgtggttttatagatggtgaaatgaaggtataccgccctgatgttgctcgtgttggagttgattcacagtctcgagctgcacaggctgtttcagttgaaagaaggacagatcagcttttaatgaagggccgtgaagaagtaattgggtggctacatcagctaaaagcccgtgagcagcagctatcacaggagattgcctatcttcaaagggaactcaatatagttgcagcggctggtagatcccagggttcagtaggggtagatcctgatgttcttgctcaaagggatcgtaaccgtgatattctgcttcagaaacttgctgcgtcagttgaaagcagggataaagtattggtggagatgtcacggctgctgatattagaaagcaggttcggtcttggcagcaacttcaatatggaagatgctagggctagtctggaagccagttttgccaatgaagctgagattgtttttacaactgtgtcaagtagcgggcgtaagttattttcccgcctgactcatggctttgatatggttgttattgatgaggctgctcaggctagcgaagtaggagtccttcctccattggctcttggtgcagctagatgtgtcctggttggtgatccacagcaactccctgctactgttattagcaaagcagctggaactttgctttacagtaggagtctattcgagaggtttcagcaggctggttgtcctaccattttattgtcagtgcaatacaggatgcatccccagatccgtgaatttccatcaaaatacttttatcaaggccgtcttacagatagtgagagtgttgttaaattacctgatgaagcctattacagagatgcacttatggcaccttatatcttctacgacttgtcacatggccgtgagtctcataggggtgggtcatcttcatatcagaatattcatgaagcgcagtttgcattgcgtttgtatgagcaccttcagaagttcttgaaagctaacggtgccaagaaggtttctgttggtataatcacaccatataagttgcagttgaagtgccttcagcgggaatttaaggatgttatgaatactgaggaagggaaggatatctacataaatacagttgatgctttccaaggacaggagcgtgacataattattatgtcatgtgtccgtgcatcaaaccatggtgtgggtttcgttgctgatatacggcgtatgaatgtagctctaactagagctaggagagctttatgggttgttggtaatgctaatgctctcatgcagtctgaggactgggcatcgctaatagcggatgcgaaggccaggaaatgttttatggacctggattgcattcccaaggacttcttaccaatgaaggttccatctaatactccaggtaggaattcttccaacaacatccggaacatgaggactggtggtggacctagaccaagacacttggacatgttctcagaaccgagaactggtatgaacatgaggcccgatgaagatgagcgtctgaattctgttccaagaaatggtagttacaggaatttggatgattttgtccgacctggtgatcgtcccagggataatctgcagtttggagttcccaggaggccaaattcttctaatggcaggagagaagtgtaaggagtgtgttgctatctacaactctggtacagcatggaacaatggtgaagagctctgggacggtccagattcagcaaggtgcagattcatgttcagaagattagttgcctctgcattagatcccttgcaccatgtggtggggctggtcacaagaaagcattgctatcagcagaggatgtgcgaatctaccatgatgtgacctccagtcagtggatcaagacgctttcatggtgggtgattataggctcatgatgtcaggttgaagaaaggctgctgtagccctcagtgttatggagttcgcaggagtttctttctcagaacaaggctgtctgatgtgttttgacattgctatccttgctttagccagctccatctttcggtagatacatacatgcatgggcatatccattttgaaacatgccaggagaaagctcactggctctagagcagggagtacaggcaccctgaaatctgaagtgcgccttggatcatctctactttggcgctggtggttttgtggatgtcctctcagtgccactcccagaataccaggccagttgaagtcctcaagcttctgcttggattctagtgtcactctcaactcttgttatcttttgagaagagatcccctgggcccatgacgaactccaggaatgcatggttgcctgcatgatagatgtagagatggcggtcatatagttaaattacacgttctgccgtatgtatatgattttattggagctaatggattttttatctgctttgtttggagaaaaacatagtttgcatctatctctacacgacttgcttttgtaccggaggcacgcagcagcagggttgtatatgtccaacctctgatgggtctgcggtctgccgttgaaagaggggctttggagatctgaaggtattccacgccaggtgctcctgtaatgtgctggacttctgttctgccactttggttacgcagagctgatccattacaaatgctgggccccattcacaaggagacgcgccacaacgctccaaaggccaaaccagagattatctccgggacacgccccctaacaagccaccgtaccatattatgccatcacgcggcggtagcggcaacacgcagcggcaacaggatccaactgtggtggtggtagcctttgcgcagccgaggaggagaacgagacggcgacgcgccattatgccggtgaagagcagcgccagcttccgcatgaccgcgctgcctatggtggtgacggcgcagctgctggcggctgccgtgctcacgctcacgctcgtctgggtgctgcactttcgtggtggcgtctcgtggaagccgacatccaaccctctcttcgtctacacggcacaccctctgttcatggtgatcggctttatcatctgcaccggagaagcggtgatggcgtacaggatcgtgctgggcccgaggtcggccaagaaggcggtgcacctgctgctacatctcgtagccctcaccttcgctgccgtcggcctgtacgccgccttcaagtttcaccatgacgtcggccttcctgacatccgttccctgcattcttggctcgggattgccacgatagcgctctatggtcttcagtggttgatggcattcgtgtactttgtcttccccggggctgtgatgacgatgagggcggactacgctccatggcacatcttctttggcctcgccatctttctgatggccatttgcactgctgagaccggactggccaagttcgtctccgccttcatcgcttacccaggcgaagtgtttgtcgtcaacttcaccgggatcgccatcctcatgtttggcgttgccgtcgtcttggctgtcatccttccgtcaagatactagcaagtgcttaacgattataagtccttccgatccatgcttcttctcaagtcatattgttttatttggactgtgcatgcatgctgaaatgattttgatatattgtttcatttacagagctgcatgctgctggcggtataagtttgatatatatatgatgatactagtaatgccatctaattgtcgttttaccttttaggcccctttatatgcaaaggggatccttcttcatgtcctgaacaaattgatcaattttttcttggtgaaacgtggcgcttgtgcattgtaatatgaaaaaaacgaggcaattgtttttgtgtggcactaaaaaataacatggttg

SEQ ID NO: 53319 - DNA, 7068 bp, Zea Mays
cttcctcctcctccctcctctctttctctcaccaagtcgttcgtcacgcagaggaccggacgctcgtgagaggcgagacgagcaatcgaaagccggaaggaagcctaacctctcttccaaagccaaaccgaaaagggaaaaaaagtattgtcgaagagaaaaggaaaaaaataataaaggaacacaagcagcccaccggcgcatcacaggggaagcaaacaggggagaaccctagtcaacagacgccgccgccctccctggctggatctggccgccgtctcctccgccgcccgacgatcgcctgatgcttgtcccgacagaaaggcaacaataacttccctccattgggtgccttaatattcccggaaattgctactggttccactagttgaaagattcaatctatatgcatctacacatgacatgggttctcgaggaaggatgttatttgaccttaacgaactcccagcagaagttgaagaagcagcagctgctgtcgtgccaaaagaatctgctgctgttgtgccaaaagaatctgctgctgtcgtaccacaagaagctgttgttgtggcgttacaagaagctgctgttgtcgtgtcacaacctcagaaatcccttcgtgttccgacgacatatgccccaaccttgtttcagcgaggggaaggatcacagtcgcaggggatattgaacaataatgcctttaagcatgcatccattggttctggatttcagccttttgtgaggaacagcaaagattcaaacaatacaaaggagccgatgaaggtggaagataatcataattctagtatagcatcactgtccatggtaaacaatcagatcaccgacagtgctgcttcaaaggttgagacttgcaataaggtgtcacaagccattgaaagagaagaaggagaatggtctgatgcagatggcatttctgaaaatgcagggagtagcaacaaagatgagttcactggtaccgcaagcactaatttgaagaaagaatcccaagagagcgagccccatcttattaaatctggtgatgtgactaaagatgatactgctgcggaatgtagtgatgctgaaaaggttgatgcatctgaagatcgggttcacgggtccacaggatcagataacatgcaaaattctgaatgtaaaggaaatcagcctggtgatgatctagatctttgcaacaggtcaagggatgttaaaggagtcgaagccaattatgctttgaggtttgcgagcaaccccgcaaagaggcccaagttaaatgaacacaaagaggccatgttaggcaaaaaacgagctaggcaaactgtcttcatcaatgtagaggatgcgaaacaagctggtacaatgaagacatcaacacccaggaggcagtcatcttttccagcaccgattgttacacgtacagtgaaggaagcttctcgtggtgctggtgaaaaggctgcagaaaaacaaagtcagcaagcaatcagggatcagagacaacctgaaatgatgggatcagagcgaagcaattctgcagatcctagtgaccaatacactgaatccaatggtgatgctgagttgggtacccagggccggtcaaagaaaatgaatgcagaagatccagcctcagatgggtatcagcagcctgtccaaagacaagcttcattcaagcaatccatggacttgaagcaaccaaaaagccgatcattctcttcccaaagaacatttctaacaggaacaaacaatgctgatcagaagccagccagcaaaaggtctattatttccaaaaagcaaacttttgtaaacaatgtacaggattcatctgttgagcgacttataagggaggtgacaaacgataagttctggcacaatccagaggaggcagaacttgagtgtgttcctggaagctttgaatctgctgaggagtacattagagtttttgagcctttgctttttgaggaatgcagagctcagctttatagttcgtatgaggagagtcttgaggctgtgggaagggatgcacatgtagcggtccgagtaaaaactgtcgatagacgtgaaagaggatggtacgatgttgtcgttctaccgatccatgaacaaaaatggaatttcaaagaaggcgatgttgctattctatcgtttccacggcctggttcagctgcacaatcaggccgatctagtaggagagctatgggttcaaatgaggatgctgtatcagaatgtggccggcttgttggtactgttaggcgccacatgcctattgatacacgtgatcctattggagctattatccatttttatcttggtgattcatttgattctaacagtgaggctaatgttctgaataaactccaacctcggagtacctggtatctaactggacttggttctcttgcaacaacacaacgagaatatgttgctttacacgctttccgccgtcttagtgtgcagatgcaaaatgcaatacttcaaccaagtccagagcatttcccgaagtatcaagagcaaccaccagtcatgccagactgcttcaccccaaatttcgctgaccatctccatcgtagcttcaatggtcctcaattgtcggcaattcattgggctgcaacacatacagctgctggcacaaacaatggtgtcctaaagaaacaagaaccatggcctttcacgttggtacaaggtcctcctgggacagggaaaactcatactgtgtgggggatgctaaatgttatccatcttgttcagtatcaacattactatgctgctttgcttaagaagcttgctcctgaaagttacaagcaagttagtggtagcactagtaccagctcagagactgttgcagcagggtcaattgatgaactattgcagagcatggaccagaatctatttcgcactcttcccaagctttgccctaagcctcggatgcttgtatgtgccccatcaaatgctgcaacagatgagcttcttgctcgtgttcttgaccgtggttttatagatggtgaaatgaaggtataccgccctgatgttgctcgtgttggagttgattcacagtctcgagctgcacaggctgtttcagttgaaagaaggacagatcagcttttaatgaagggccgtgaagaagtaattgggtggctacatcagctaaaagcccgtgagcagcagctatcacaggagattgcctatcttcaaagggaactcaatatagttgcagcggctggtagatcccagggttcagtaggggtagatcctgatgttcttgctcaaagggatcgtaaccgtgatattctgcttcagaaacttgctgcgtcagttgaaagcagggataaagtattggtggagatgtcacggctgctgatattagaaagcaggttcggtcttggcagcaacttcaatatggaagatgctagggctagtctggaagccagttttgccaatgaagctgagattgtttttacaactgtgtcaagtagcgggcgtaagttattttcccgcctgactcatggctttgatatggttgttattgatgaggctgctcaggctagcgaagtaggagtccttcctccattggctcttggtgcagctagatgtgtcctggttggtgatccacagcaactccctgctactgttattagcaaagcagctggaactttgctttacagtaggagtctattcgagaggtttcagcaggctggttgtcctaccattttattgtcagtgcaatacaggatgcatccccagatccgtgaatttccatcaaaatacttttatcaaggccgtcttacagatagtgagagtgttgttaaattacctgatgaagcctattacagagatgcacttatggcaccttatatcttctacgacttgtcacatggccgtgagtctcataggggtgggtcatcttcatatcagaatattcatgaagcgcagtttgcattgcgtttgtatgagcaccttcagaagttcttgaaagctaacggtgccaagaaggtttctgttggtataatcacaccatataagttgcagttgaagtgccttcagcgggaatttaaggatgttatgaatactgaggaagggaaggatatctacataaatacagttgatgctttccaaggacaggagcgtgacataattattatgtcatgtgtccgtgcatcaaaccatggtgtgggtttcgttgctgatatacggcgtatgaatgtagctctaactagagctaggagagctttatgggttgttggtaatgctaatgctctcatgcagtctgaggactgggcatcgctaatagcggatgcgaaggccaggaaatgttttatggacctggattgcattcccaaggacttcttaccaatgaaggttccatctaatactccaggtaggaattcttccaacaacatccggaacatgaggactggtggtggacctagaccaagacacttggacatgttctcagaaccgagaactggtatgaacatgaggcccgatgaagatgagcgtctgaattctgttccaagaaatggtagttacaggaatttggatgattttgtccgacctggtgatcgtcccagggataatctgcagtttggagttcccaggaggccaaattcttctaatggcaggagagaagtgtaaggagtgtgttgctatctacaactctggtacagcatggaacaatggtgaagagctctgggacggtccagattcagcaaggtgcagattcatgttcagaagattagttgcctctgcattagatcccttgcaccatgtggtggggctggtcacaagaaagcattgctatcagcagaggatgtgcgaatctaccatgatgtgacctccagtcagtggatcaagacgctttcatggtgggtgattataggctcatgatgtcaggttgaagaaaggctgctgtagccctcagtgttatggagttcgcaggagtttctttctcagaacaaggctgtctgatgtgttttgacattgctatccttgctttagccagctccatctttcggtagatacatacatgcatgggcatatccattttgaaacatgccaggagaaagctcactggctctagagcagggtaggtctcaagcgttgttgcctgattgctgctgcgatcgttgcatgcttgacatgtctagtaggatcagtatgctaacataggcagggcttctgtaccatatgacataagttccttctgtatacagggtcgagatctagagaaaagaagttcattatttcattcagctcatgttgttaccctttgttcttgtcaacatgttctgtgcatattgttgaaagatgttaccatgtttgcagtagtgatatttattttcctgattatcagtggcatgagtctgtgcttgtatgttaatctatggattagttttggcactcggtgacagtgtcctgctgatgtttgatacatcatatttaatgaactcagtttttctgcaactgatctactttttctgatacttgcatgtcgaagctaacagaaatactttaggttagtgaagcagctattttaattaggcacattctctgcgatgcatatatatatatattagagagctgaacatgaggaggtgatgtttcaggagtacaggcaccctgaaatctgaagtgcgccttggatcatctctactttggcgctggtggttttgtggatgtcctctcagtgccactcccagaataccaggccagttgaagtcctcaagcttctgcttggattctagtgtcactctcaactcttgttatcttttgagaagagatcccctgggcccatgacgaactccaggaatgcatggttgcctgcatgatagatgtagagatggcggtcatatagttaaattacacgttctgccgtatgtatatgattttattggagctaatggattttttatctgctttgtttggagaaaaacatagtttgcatctatctctacacgacttgcttttgtaccggaggcacgcagcagcagggttgtatatgtccaacctctgatgggtctgcggtctgccgttgaaagaggggctttggagatctgaaggtattccacgccaggtgctcctgtaatgtgctggacttctgttctgccactttggttacgcagagctgatccattacaaatggtacttgtgatgctttgttgttagcttgtgagttgtctgtttctgcgcttgtgattcagtggccggcaagcgtttttttttttgactcggccggattgttcatcgatctatttttggatcttttattgctctggtgaaaacagctgggccccattcacaaggagacgcgccacaacgctccaaaggccaaaccagagattatctccgggttgtttacacattgaacttgtctttcaccttgaccttgtttatacatgaacccgcctcggatccgtcaccaggacacgccccctaacaagccaccgtaccatattatgccatcacgcggcggtagcggcaacacgcagcggcaacaggatccaactgtggtggtggtagcctttgcgcagccgaggaggagaacgagacggcgacgcgccattatgccggtgaagagcagcgccagcttccgcatgaccgcgctgcctatggtggtgacggcgcagctgctggcggctgccgtgctcacgctcacgctcgtctgggtgctgcactttcgtggtggcgtctcgtggaagccgacatccaaccctctcttcgtctacacggcacaccctctgttcatggtgatcggctttatcatctgcaccggagaagcggtgatggcgtacaggatcgtgctgggcccgaggtcggccaagaaggcggtgcacctgctgctacatctcgtagccctcaccttcgctgccgtcggcctgtacgccgccttcaagtttcaccatgacgtcggccttcctgacatccgttccctgcattcttggctcgggattgccacgatagcgctctatggtcttcagattgttttgattcgacgagtccacgtacatcgactagtgcactacagccgacaaataggacatacgaatcaagcagacaacaagaaaccaatcataactttcc

SEQ ID NO: 53320 - DNA, 2391 bp, Zea Mays
cttcctcctcctccctcctctctttctctcaccaagtcgttcgtcacgcagaggaccggacgctcgtgagaggcgagacgagcaatcgaaagccggaaggaagcctaacctctcttccaaagccaaaccgaaaagggaaaaaaagtattgtcgaagagaaaaggaaaaaaataataaaggaacacaagcagcccaccggcgcatcacaggggaagcaaacaggggagaaccctagtcaacagacgccgccgccctccctggctggatctggccgccgtctcctccgccgcccgacgatcgcctgatgcttgtcccgacagaaaggcaacaataacttccctccattgggtgccttaatattcccggaaattgctactggttccactagttgaaagattcaatctatatgcatctacacatgacatgggttctcgaggaaggatgttatttgaccttaacgaactcccagcagaagttgaagaagcagcagctgctgtcgtgccaaaagaatctgctgctgttgtgccaaaagaatctgctgctgtcgtaccacaagaagctgttgttgtggcgttacaagaagctgctgttgtcgtgtcacaacctcagaaatcccttcgtgttccgacgacatatgccccaaccttgtttcagcgaggggaaggatcacagtcgcaggggatattgaacaataatgcctttaagcatgcatccattggttctggatttcagccttttgtgaggaacagcaaagattcaaacaatacaaaggagccgatgaaggtggaagataatcataattctagtatagcatcactgtccatggtaaacaatcagatcaccgacagtgctgcttcaaaggttgagacttgcaataaggtgtcacaagccattgaaagagaagaaggagaatggtctgatgcagatggcatttctgaaaatgcagggagtagcaacaaagatgagttcactggtaccgcaagcactaatttgaagaaagaatcccaagagagcgagccccatcttattaaatctggtgatgtgactaaagatgatactgctgcggaatgtagtgatgctgaaaaggttgatgcatctgaagatcgggttcacgggtccacaggatcagataacatgcaaaattctgaatgtaaaggaaatcagcctggtgatgatctagatctttgcaacaggtcaagggatgttaaaggagtcgaagccaattatgctttgaggtttgcgagcaaccccgcaaagaggcccaagttaaatgaacacaaagaggccatgttaggcaaaaaacgagctaggcaaactgtcttcatcaatgtagaggatgcgaaacaagctggtacaatgaagacatcaacacccaggaggcagtcatcttttccagcaccgattgttacacgtacagtgaaggaagcttctcgtggtgctggtgaaaaggctgcagaaaaacaaagtcagcaagcaatcagggatcagagacaacctgaaatgatgggatcagagcgaagcaattctgcagatcctagtgaccaatacactgaatccaatggtgatgctgagttgggtacccagggccggtcaaagaaaatgaatgcagaagatccagcctcagatgggtatcagcagcctgtccaaagacaagcttcattcaagcaatccatggacttgaagcaaccaaaaagccgatcattctcttcccaaagaacatttctaacaggaacaaacaatgctgatcagaagccagccagcaaaaggtctattatttccaaaaagcaaacttttgtaaacaatgtacaggattcatctgttgagcgacttataagggaggtgacaaacgataagttctggcacaatccagaggaggcagaacttgagtgtgttcctggaagctttgaatctgctgaggagtacattagagtttttgagcctttgctttttgaggaatgcagagctcagctttatagttcgtatgaggagagtcttgaggctgtgggaagggatgcacatgtagcggtccgagtaaaaactgtcgatagacgtgaaagaggatggtacgatgttgtcgttctaccgatccatgaacaaaaatggaatttcaaagaaggcgatgttgctattctatcgtttccacggcctggttcagctgcacaatcaggccgatctagtaggagagctatgggttcaaatgaggatgctgtatcagaatgtggccggcttgttggtactgttaggcgccacatgcctattgatacacgtgatcctattggagctattatccatttttatcttggtgattcatttgattctaacaggtaatgctgccccacttaatcctagcagcctgttgggtgattaataaacccctttcatgaagttcta

SEQ ID NO: 53321 - DNA, 1318 bp, Zea Mays
tcaatcttgatgtcaatgacaagatgattacaggtgatcaacttgctattgggaaggaaacaacacgtcgtttgggaatgggtactaaatgtaaggatgagtcacttgcttcattgccaattgatgaattgaccgagaaggctgatggctttgctagagtctttccagcttggttttatgcttcttgcgctgatatggaagtttgacttcccaacatttaccgtccagatcattgccatcctcaatgacgtacaagcagcatattaggtaaactaacaacatcaacctggcgacatgaataagtaccattgtggctatctcgaaggacatagtaaaaccacctgcacaacctgacagttggaagttatttggtcgtgatgactgtcattttttcttctgggctacgtacaagactgacttcttctcggtatgggccagtggctggtttagcattatttaaagttttgagaaatcatcgtagtgtgcccatccttttcatggttgctaatatacagaaattgttccatgtcgaaagccttgagaaaatttcccagggtgattttcatacgctttcctctgccatgtaccttcaagtcagcacaatcaatcagggcccttaacttacacggtctcgcacgctcgcaactgctgctgagtcatccgactctagttccataccttactgttgtatgtggtctttccgcgtctccttacattttatggtgtttgcagaatgccactctgattgttgtatatgccaactgggcatttgctgctattaagggcattggatggggctgggccggtgtcaaatggctctacatcattgtcttctacttcctgctgcgcatcatcaatttcctcatcctgctatacgctgagtaggagggcatggaacctcgtccttatgtatatactaggtgtgtgcccgtacgttgcaacgggagtatgttaggatgagcatcgacacatatttgatcggatattatattttttgggatctggagaaagtttgctcggaagccaaacatgttaagacctgagcatgtgtatgatatgcaaaggctggggctcgaacgcgcttgtatgagtcttgttaatttgcatgtctcgtgcatagtctctcaccatctattcactataatatacaaaatctgtgtctatctatatttattttaagcttctaacggccttccatgattccatcaggttcttgccacttttgttacagccatgttcttggacagagcgagcaaggggtgttaattgtttgttacaaccatcggctgaacgaagtatttgagaagaaactattaat

SEQ ID NO: 53322 - DNA, 1352 bp, Zea Mays
ctcaatcttgatgtcaatgacaagatgattacaggtgatcaacttgctattgggaaggaaacaacacgtcgtttgggaatgggtactaaatgtaaggatgagtcacttgcttcattgccaattgatgaattgaccgagaaggctgatggctttgctagagtctttccagatctatgttgaatcaattaccatctgtattgtgcttggttttatgcttcttgcgctgatatggaagtttgacttcccaacatttaccgtccagatcattgccatcctcaatgacgtacaagcagcatattaggtaaactaacaacatcaacctggcgacatgaataagtaccattgtggctatctcgaaggacatagtaaaaccacctgcacaacctgacagttggaagttatttggtcgtgatgactgtcattttttcttctgggctacgtacaagactgacttcttctcggtatgggccagtggctggtttagcattatttaaagttttgagaaatcatcgtagtgtgcccatccttttcatggttgctaatatacagaaattgttccatgtcgaaagccttgagaaaatttcccagggtgattttcatacgctttcctctgccatgtaccttcaagtcagcacaatcaatcagggcccttaacttacacggtctcgcacgctcgcaactgctgctgagtcatccgactctagttccataccttactgttgtatgtggtctttccgcgtctccttacattttatggtgtttgcagaatgccactctgattgttgtatatgccaactgggcatttgctgctattaagggcattggatggggctgggccggtgtcaaatggctctacatcattgtcttctacttcctgctgcgcatcatcaatttcctcatcctgctatacgctgagtaggagggcatggaacctcgtccttatgtatatactaggtgtgtgcccgtacgttgcaacgggagtatgttaggatgagcatcgacacatatttgatcggatattatattttttgggatctggagaaagtttgctcggaagccaaacatgttaagacctgagcatgtgtatgatatgcaaaggctggggctcgaacgcgcttgtatgagtcttgttaatttgcatgtctcgtgcatagtctctcaccatctattcactataatatacaaaatctgtgtctatctatatttattttaagcttctaacggccttccatgattccatcaggttcttgccacttttgttacagccatgttcttggacagagcgagcaaggggtgttaattgtttgttacaaccatcggctgaacgaagtatttgagaagaaactattaat

SEQ ID NO: 53323 - DNA, 1014 bp, Zea Mays
ctcaatcttgatgtcaatgacaagatgattacaggtgatcaacttgctattgggaaggaaacaacacgtcgtttgggaatgggtactaaatgtaaggatgagtcacttgcttcattgccaattgatgaattgaccgagaaggctgatggctttgctagagtctttccagcttggttttatgcttcttgcgctgatatggaagtttgacttcccaacatttaccgtccagatcattgccatcctcaatgacgtacaagcagcatattaggtaaactaacaacatcaacctggcgacatgaataagtaccattgtggctatctcgaaggacatagtaaaaccacctgcacaacctgacagttggaagttatttggtcgtgatgactgtcattttttcttctgggctacgtacaagactgacttcttctcgaatgccactctgattgttgtatatgccaactgggcatttgctgctattaagggcattggatggggctgggccggtgtcaaatggctctacatcattgtcttctacttcctgctgcgcatcatcaatttcctcatcctgctatacgctgagtaggagggcatggaacctcgtccttatgtatatactaggtgtgtgcccgtacgttgcaacgggagtatgttaggatgagcatcgacacatatttgatcggatattatattttttgggatctggagaaagtttgctcggaagccaaacatgttaagacctgagcatgtgtatgatatgcaaaggctggggctcgaacgcgcttgtatgagtcttgttaatttgcatgtctcgtgcatagtctctcaccatctattcactataatatacaaaatctgtgtctatctatatttattttaagcttctaacggccttccatgattccatcaggttcttgccacttttgttacagccatgttcttggacagagcgagcaaggggtgttaattgtttgttacaaccatcggctgaacgaagtatttgagaagaaactattaat

SEQ ID NO: 53324 - DNA, 837 bp, Zea Mays
ctcaatcttgatgtcaatgacaagatgattacaggtgatcaacttgctattgggaaggaaacaacacgtcgtttgggaatgggtactaaatgtaaggatgagtcacttgcttcattgccaattgatgaattgaccgagaaggctgatggctttgctagagtctttccagcttggttttatgcttcttgcgctgatatggaagtttgacttcccaacatttaccgtccagatcattgccatcctcaatgacgaatgccactctgattgttgtatatgccaactgggcatttgctgctattaagggcattggatggggctgggccggtgtcaaatggctctacatcattgtcttctacttcctgctgcgcatcatcaatttcctcatcctgctatacgctgagtaggagggcatggaacctcgtccttatgtatatactaggtgtgtgcccgtacgttgcaacgggagtatgttaggatgagcatcgacacatatttgatcggatattatattttttgggatctggagaaagtttgctcggaagccaaacatgttaagacctgagcatgtgtatgatatgcaaaggctggggctcgaacgcgcttgtatgagtcttgttaatttgcatgtctcgtgcatagtctctcaccatctattcactataatatacaaaatctgtgtctatctatatttattttaagcttctaacggccttccatgattccatcaggttcttgccacttttgttacagccatgttcttggacagagcgagcaaggggtgttaattgtttgttacaaccatcggctgaacgaagtatttgagaagaaactattaat

SEQ ID NO: 53325 - DNA, 1047 bp, Zea Mays
ctcaatcttgatgtcaatgacaagatgattacaggtgatcaacttgctattgggaaggaaacaacacgtcgtttgggaatgggtactaaatgtaaggatgagtcacttgcttcattgccaattgatgaattgaccgagaaggctgatggctttgctagagtctttccagatctatgttgaatcaattaccatctgtattgtgcttggttttatgcttcttgcgctgatatggaagtttgacttcccaacatttaccgtccagatcattgccatcctcaatgacgtacaagcagcatattaggtaaactaacaacatcaacctggcgacatgaataagtaccattgtggctatctcgaaggacatagtaaaaccacctgcacaacctgacagttggaagttatttggtcgtgatgactgtcattttttcttctgggctacgtacaagactgacttcttctcgaatgccactctgattgttgtatatgccaactgggcatttgctgctattaagggcattggatggggctgggccggtgtcaaatggctctacatcattgtcttctacttcctgctgcgcatcatcaatttcctcatcctgctatacgctgagtaggagggcatggaacctcgtccttatgtatatactaggtgtgtgcccgtacgttgcaacgggagtatgttaggatgagcatcgacacatatttgatcggatattatattttttgggatctggagaaagtttgctcggaagccaaacatgttaagacctgagcatgtgtatgatatgcaaaggctggggctcgaacgcgcttgtatgagtcttgttaatttgcatgtctcgtgcatagtctctcaccatctattcactataatatacaaaatctgtgtctatctatatttattttaagcttctaacggccttccatgattccatcaggttcttgccacttttgttacagccatgttcttggacagagcgagcaaggggtgttaattgtttgttacaaccatcggctgaacgaagtatttgagaagaaactattaat

SEQ ID NO: 53326 - DNA, 1586 bp, Zea Mays
atggcctgcgtggtgacagtgaggtatgaggcggagctgacgttgatgcaaaattcatgtgatcaacttgctattgggaaggaaacaacacgtcgtttgggaatgggtactaaatgtaaggatgagtcacttgcttcattgccaattgatgaattgaccgagaaggctgatggctttgctagagtctttccagaacacatgtatgaaaaacatttatgtggcatgacttgggatggtgtaaatgatgccccaactttaaaaaaggcggatattggtattgcaatagcagactctactgacgcagcccgtggtgcttctgacattgtcctaaatgaacccggccttagtatctatgttgaatcaattaccatctgtattgtgcttggttttatgcttcttgcgctgatatggaagtttgacttcccaacatttaccgtccagatcattgccatcctcaatgacgtacaagcagcatattaggtaaactaacaacatcaacctggcgacatgaataagtaccattgtggctatctcgaaggacatagtaaaaccacctgcacaacctgacagttggaagttatttggtcgtgatgactgtcattttttcttctgggctacgtacaagactgacttcttctcggtatgggccagtggctggtttagcattatttaaagttttgagaaatcatcgtagtgtgcccatccttttcatggttgctaatatacagaaattgttccatgtcgaaagccttgagaaaatttcccagggtgattttcatacgctttcctctgccatgtaccttcaagtcagcacaatcaatcagggcccttaacttacacggtctcgcacgctcgcaactggtcatttgtgtaccgtcctaggttcttgctaacctttgccttcttggtggcgcagctgctgagtcatccgactctagttccataccttactgttgtatgtggtctttccgcgtctccttacattttatggtgtttgcagaatgccactctgattgttgtatatgccaactgggcatttgctgctattaagggcattggatggggctgggccggtgtcaaatggctctacatcattgtcttctacttcctgctgcgcatcatcaatttcctcatcctgctatacgctgagtaggagggcatggaacctcgtccttatgtatatactaggtgtgtgcccgtacgttgcaacgggagtatgttaggatgagcatcgacacatatttgatcggatattatattttttgggatctggagaaagtttgctcggaagccaaacatgttaagacctgagcatgtgtatgatatgcaaaggctggggctcgaacgcgcttgtatgagtcttgttaatttgcatgtctcgtgcatagtctctcaccatctattcactataatatacaaaatctgtgtctatctatatttattttaagcttctaacggccttccatgattccatcaggttcttgccacttttgttacagccatgttcttggacagagcgagcaaggggtgttaattgtttgttacaaccatcggctgaacgaagtatttgagaagaaactattaat

SEQ ID NO: 53327 - DNA, 861 bp, Zea Mays
atggcctgcgtggtgacagtgaggtatgaggcggagctgacgttgatgcaaaattcatgtgatcaacttgctattgggaaggaaacaacacgtcgtttgggaatgggtactaaatgtaaggatgagtcacttgcttcattgccaattgatgaattgaccgagaaggctgatggctttgctagagtctttccagcttggttttatgcttcttgcgctgatatggaagtttgacttcccaacatttaccgtccagatcattgccatcctcaatgacgaatgccactctgattgttgtatatgccaactgggcatttgctgctattaagggcattggatggggctgggccggtgtcaaatggctctacatcattgtcttctacttcctgctgcgcatcatcaatttcctcatcctgctatacgctgagtaggagggcatggaacctcgtccttatgtatatactaggtgtgtgcccgtacgttgcaacgggagtatgttaggatgagcatcgacacatatttgatcggatattatattttttgggatctggagaaagtttgctcggaagccaaacatgttaagacctgagcatgtgtatgatatgcaaaggctggggctcgaacgcgcttgtatgagtcttgttaatttgcatgtctcgtgcatagtctctcaccatctattcactataatatacaaaatctgtgtctatctatatttattttaagcttctaacggccttccatgattccatcaggttcttgccacttttgttacagccatgttcttggacagagcgagcaaggggtgttaattgtttgttacaaccatcggctgaacgaagtatttgagaagaaactattaat

SEQ ID NO: 53328 - DNA, 1343 bp, Zea Mays
atggcctgcgtggtgacagtgaggtatgaggcggagctgacgttgatgcaaaattcatgtgatcaacttgctattgggaaggaaacaacacgtcgtttgggaatgggtactaaatgtaaggatgagtcacttgcttcattgccaattgatgaattgaccgagaaggctgatggctttgctagagtctttccagcttggttttatgcttcttgcgctgatatggaagtttgacttcccaacatttaccgtccagatcattgccatcctcaatgacgtacaagcagcatattaggtaaactaacaacatcaacctggcgacatgaataagtaccattgtggctatctcgaaggacatagtaaaaccacctgcacaacctgacagttggaagttatttggtcgtgatgactgtcattttttcttctgggctacgtacaagactgacttcttctcggtatgggccagtggctggtttagcattatttaaagttttgagaaatcatcgtagtgtgcccatccttttcatggttgctaatatacagaaattgttccatgtcgaaagccttgagaaaatttcccagggtgattttcatacgctttcctctgccatgtaccttcaagtcagcacaatcaatcagggcccttaacttacacggtctcgcacgctcgcaactgctgctgagtcatccgactctagttccataccttactgttgtatgtggtctttccgcgtctccttacattttatggtgtttgcagaatgccactctgattgttgtatatgccaactgggcatttgctgctattaagggcattggatggggctgggccggtgtcaaatggctctacatcattgtcttctacttcctgctgcgcatcatcaatttcctcatcctgctatacgctgagtaggagggcatggaacctcgtccttatgtatatactaggtgtgtgcccgtacgttgcaacgggagtatgttaggatgagcatcgacacatatttgatcggatattatattttttgggatctggagaaagtttgctcggaagccaaacatgttaagacctgagcatgtgtatgatatgcaaaggctggggctcgaacgcgcttgtatgagtcttgttaatttgcatgtctcgtgcatagtctctcaccatctattcactataatatacaaaatctgtgtctatctatatttattttaagcttctaacggccttccatgattccatcaggttcttgccacttttgttacagccatgttcttggacagagcgagcaaggggtgttaattgtttgttacaaccatcggctgaacgaagtatttgagaagaaactattaat

SEQ ID NO: 53329 - DNA, 1376 bp, Zea Mays
atggcctgcgtggtgacagtgaggtatgaggcggagctgacgttgatgcaaaattcatgtgatcaacttgctattgggaaggaaacaacacgtcgtttgggaatgggtactaaatgtaaggatgagtcacttgcttcattgccaattgatgaattgaccgagaaggctgatggctttgctagagtctttccagatctatgttgaatcaattaccatctgtattgtgcttggttttatgcttcttgcgctgatatggaagtttgacttcccaacatttaccgtccagatcattgccatcctcaatgacgtacaagcagcatattaggtaaactaacaacatcaacctggcgacatgaataagtaccattgtggctatctcgaaggacatagtaaaaccacctgcacaacctgacagttggaagttatttggtcgtgatgactgtcattttttcttctgggctacgtacaagactgacttcttctcggtatgggccagtggctggtttagcattatttaaagttttgagaaatcatcgtagtgtgcccatccttttcatggttgctaatatacagaaattgttccatgtcgaaagccttgagaaaatttcccagggtgattttcatacgctttcctctgccatgtaccttcaagtcagcacaatcaatcagggcccttaacttacacggtctcgcacgctcgcaactgctgctgagtcatccgactctagttccataccttactgttgtatgtggtctttccgcgtctccttacattttatggtgtttgcagaatgccactctgattgttgtatatgccaactgggcatttgctgctattaagggcattggatggggctgggccggtgtcaaatggctctacatcattgtcttctacttcctgctgcgcatcatcaatttcctcatcctgctatacgctgagtaggagggcatggaacctcgtccttatgtatatactaggtgtgtgcccgtacgttgcaacgggagtatgttaggatgagcatcgacacatatttgatcggatattatattttttgggatctggagaaagtttgctcggaagccaaacatgttaagacctgagcatgtgtatgatatgcaaaggctggggctcgaacgcgcttgtatgagtcttgttaatttgcatgtctcgtgcatagtctctcaccatctattcactataatatacaaaatctgtgtctatctatatttattttaagcttctaacggccttccatgattccatcaggttcttgccacttttgttacagccatgttcttggacagagcgagcaaggggtgttaattgtttgttacaaccatcggctgaacgaagtatttgagaagaaactattaat

SEQ ID NO: 53330 - DNA, 1038 bp, Zea Mays
atggcctgcgtggtgacagtgaggtatgaggcggagctgacgttgatgcaaaattcatgtgatcaacttgctattgggaaggaaacaacacgtcgtttgggaatgggtactaaatgtaaggatgagtcacttgcttcattgccaattgatgaattgaccgagaaggctgatggctttgctagagtctttccagcttggttttatgcttcttgcgctgatatggaagtttgacttcccaacatttaccgtccagatcattgccatcctcaatgacgtacaagcagcatattaggtaaactaacaacatcaacctggcgacatgaataagtaccattgtggctatctcgaaggacatagtaaaaccacctgcacaacctgacagttggaagttatttggtcgtgatgactgtcattttttcttctgggctacgtacaagactgacttcttctcgaatgccactctgattgttgtatatgccaactgggcatttgctgctattaagggcattggatggggctgggccggtgtcaaatggctctacatcattgtcttctacttcctgctgcgcatcatcaatttcctcatcctgctatacgctgagtaggagggcatggaacctcgtccttatgtatatactaggtgtgtgcccgtacgttgcaacgggagtatgttaggatgagcatcgacacatatttgatcggatattatattttttgggatctggagaaagtttgctcggaagccaaacatgttaagacctgagcatgtgtatgatatgcaaaggctggggctcgaacgcgcttgtatgagtcttgttaatttgcatgtctcgtgcatagtctctcaccatctattcactataatatacaaaatctgtgtctatctatatttattttaagcttctaacggccttccatgattccatcaggttcttgccacttttgttacagccatgttcttggacagagcgagcaaggggtgttaattgtttgttacaaccatcggctgaacgaagtatttgagaagaaactattaat

SEQ ID NO: 53331 - DNA, 1091 bp, Zea Mays
atggcctgcgtggtgacagtgaggtatgaggcggagctgacgttgatgcaaaattcatgtgatcaacttgctattgggaaggaaacaacacgtcgtttgggaatgggtactaaatgtaaggatgagtcacttgcttcattgccaattgatgaattgaccgagaaggctgatggctttgctagagtctttccagatctatgttgaatcaattaccatctgtattgtgcttggttttatgcttcttgcgctgatatggaagtttgacttcccaacatttaccgtccagatcattgccatcctcaatgacgccttgagaaaatttcccagggtgattttcatacgctttcctctgccatgtaccttcaagtcagcacaatcaatcagggcccttaacttacacggtctcgcacgctcgcaactgctgctgagtcatccgactctagttccataccttactgttgtatgtggtctttccgcgtctccttacattttatggtgtttgcagaatgccactctgattgttgtatatgccaactgggcatttgctgctattaagggcattggatggggctgggccggtgtcaaatggctctacatcattgtcttctacttcctgctgcgcatcatcaatttcctcatcctgctatacgctgagtaggagggcatggaacctcgtccttatgtatatactaggtgtgtgcccgtacgttgcaacgggagtatgttaggatgagcatcgacacatatttgatcggatattatattttttgggatctggagaaagtttgctcggaagccaaacatgttaagacctgagcatgtgtatgatatgcaaaggctggggctcgaacgcgcttgtatgagtcttgttaatttgcatgtctcgtgcatagtctctcaccatctattcactataatatacaaaatctgtgtctatctatatttattttaagcttctaacggccttccatgattccatcaggttcttgccacttttgttacagccatgttcttggacagagcgagcaaggggtgttaattgtttgttacaaccatcggctgaacgaagtatttgagaagaaactattaat

SEQ ID NO: 53332 - DNA, 1321 bp, Zea Mays
cccggcctcccccacccgccatcgcccaaaaggagcagcgatccatccatcctatcccctgtgccaaaccctagccggctatggagcatcccgccgccacctcctcacctgatccgacgccgtagcacctctccctgtccctgtccccatctccctccgtctccctggccaagcactccacctggaagcaccctgccccgaactgcaccgcagtcgtcgacgctaagcgctggcccacgctctccaaggttgcaagggtgatcaacttgctattgggaaggaaacaacacgtcgtttgggaatgggtactaaatgtaaggatgagtcacttgcttcattgccaattgatgaattgaccgagaaggctgatggctttgctagagtctttccagcttggttttatgcttcttgcgctgatatggaagtttgacttcccaacatttaccgtccagatcattgccatcctcaatgacgtacaagcagcatattaggtaaactaacaacatcaacctggcgacatgaataagtaccattgtggctatctcgaaggacatagtaaaaccacctgcacaacctgacagttggaagttatttggtcgtgatgactgtcattttttcttctgggctacgtacaagactgacttcttctcgctgctgagtcatccgactctagttccataccttactgttgtatgtggtctttccgcgtctccttacattttatggtgtttgcagaatgccactctgattgttgtatatgccaactgggcatttgctgctattaagggcattggatggggctgggccggtgtcaaatggctctacatcattgtcttctacttcctgctgcgcatcatcaatttcctcatcctgctatacgctgagtaggagggcatggaacctcgtccttatgtatatactaggtgtgtgcccgtacgttgcaacgggagtatgttaggatgagcatcgacacatatttgatcggatattatattttttgggatctggagaaagtttgctcggaagccaaacatgttaagacctgagcatgtgtatgatatgcaaaggctggggctcgaacgcgcttgtatgagtcttgttaatttgcatgtctcgtgcatagtctctcaccatctattcactataatatacaaaatctgtgtctatctatatttattttaagcttctaacggccttccatgattccatcaggttcttgccacttttgttacagccatgttcttggacagagcgagcaaggggtgttaattgtttgttacaaccatcggctgaacgaagtatttgagaagaaactattaat

SEQ ID NO: 53333 - DNA, 1259 bp, Zea Mays
ctcccggcctcccccacccgccatcgcccaaaaggagcagcgatccatccatcctatcccctgtgccaaaccctagccggctatggagcatcccgccgccacctcctcacctgatccgacgccgtagcacctctccctgtccctgtccccatctccctccgtctccctggccaagcactccacctggaagcaccctgccccgaactgcaccgcagtcgtcgacgctaagcgctggcccacgctctccaaggttgcaagggtgatcaacttgctattgggaaggaaacaacacgtcgtttgggaatgggtactaaatgtaaggatgagtcacttgcttcattgccaattgatgaattgaccgagaaggctgatggctttgctagagtctttccagcttggttttatgcttcttgcgctgatatggaagtttgacttcccaacatttaccgtccagatcattgccatcctcaatgacgccttgagaaaatttcccagggtgattttcatacgctttcctctgccatgtaccttcaagtcagcacaatcaatcagggcccttaacttacacggtctcgcacgctcgcaactgctgctgagtcatccgactctagttccataccttactgttgtatgtggtctttccgcgtctccttacattttatggtgtttgcagaatgccactctgattgttgtatatgccaactgggcatttgctgctattaagggcattggatggggctgggccggtgtcaaatggctctacatcattgtcttctacttcctgctgcgcatcatcaatttcctcatcctgctatacgctgagtaggagggcatggaacctcgtccttatgtatatactaggtgtgtgcccgtacgttgcaacgggagtatgttaggatgagcatcgacacatatttgatcggatattatattttttgggatctggagaaagtttgctcggaagccaaacatgttaagacctgagcatgtgtatgatatgcaaaggctggggctcgaacgcgcttgtatgagtcttgttaatttgcatgtctcgtgcatagtctctcaccatctattcactataatatacaaaatctgtgtctatctatatttattttaagcttctaacggccttccatgattccatcaggttcttgccacttttgttacagccatgttcttggacagagcgagcaaggggtgttaattgtttgttacaaccatcggctgaacgaagtatttgagaagaaactattaat

SEQ ID NO: 53334 - DNA, 1273 bp, Zea Mays
cctcccggcctcccccacccgccatcgcccaaaaggagcagcgatccatccatcctatcccctgtgccaaaccctagccggctatggagcatcccgccgccacctcctcacctgatccgacgccgtagcacctctccctgtccctgtccccatctccctccgtctccctggccaagcactccacctggaagcaccctgccccgaactgcaccgcagtcgtcgacgctaagcgctggcccacgctctccaaggttgcaagggtgatcaacttgctattgggaaggaaacaacacgtcgtttgggaatgggtactaaatgtaaggatgagtcacttgcttcattgccaattgatgaattgaccgagaaggctgatggctttgctagagtctttccagatctatgttgaatcaattaccatctgtattgtgcttggttttatgcttcttgcgctgatatggaagtttgacttcccaacatttaccgtccagatcattgccatcctcaatgacgtacaagcagcatattaggtaaactaacaacatcaacctggcgacatgaataagtaccattgtggctatctcgaaggacatagtaaaaccacctgcacaacctgacagttggaagttatttggtcgtgatgactgtcattttttcttctgggctacgtacaagactgacttcttctcgaatgccactctgattgttgtatatgccaactgggcatttgctgctattaagggcattggatggggctgggccggtgtcaaatggctctacatcattgtcttctacttcctgctgcgcatcatcaatttcctcatcctgctatacgctgagtaggagggcatggaacctcgtccttatgtatatactaggtgtgtgcccgtacgttgcaacgggagtatgttaggatgagcatcgacacatatttgatcggatattatattttttgggatctggagaaagtttgctcggaagccaaacatgttaagacctgagcatgtgtatgatatgcaaaggctggggctcgaacgcgcttgtatgagtcttgttaatttgcatgtctcgtgcatagtctctcaccatctattcactataatatacaaaatctgtgtctatctatatttattttaagcttctaacggccttccatgattccatcaggttcttgccacttttgttacagccatgttcttggacagagcgagcaaggggtgttaattgtttgttacaaccatcggctgaacgaagtatttgagaagaaactattaat

SEQ ID NO: 53335 - DNA, 1447 bp, Zea Mays
cgtccctcccggcctcccccacccgccatcgcccaaaaggagcagcgatccatccatcctatcccctgtgccaaaccctagccggctatggagcatcccgccgccacctcctcacctgatccgacgccgtagcacctctccctgtccctgtccccatctccctccgtctccctggccaagcactccacctggaagcaccctgccccgaactgcaccgcagtcgtcgacgctaagcgctggcccacgctctccaaggttgcaaggatctatgttgaatcaattaccatctgtattgtgcttggttttatgcttcttgcgctgatatggaagtttgacttcccaacatttaccgtccagatcattgccatcctcaatgacgtacaagcagcatattaggtaaactaacaacatcaacctggcgacatgaataagtaccattgtggctatctcgaaggacatagtaaaaccacctgcacaacctgacagttggaagttatttggtcgtgatgactgtcattttttcttctgggctacgtacaagactgacttcttctcggtatgggccagtggctggtttagcattatttaaagttttgagaaatcatcgtagtgtgcccatccttttcatggttgctaatatacagaaattgttccatgtcgaaagccttgagaaaatttcccagggtgattttcatacgctttcctctgccatgtaccttcaagtcagcacaatcaatcagggcccttaacttacacggtctcgcacgctcgcaactgctgctgagtcatccgactctagttccataccttactgttgtatgtggtctttccgcgtctccttacattttatggtgtttgcagaatgccactctgattgttgtatatgccaactgggcatttgctgctattaagggcattggatggggctgggccggtgtcaaatggctctacatcattgtcttctacttcctgctgcgcatcatcaatttcctcatcctgctatacgctgagtaggagggcatggaacctcgtccttatgtatatactaggtgtgtgcccgtacgttgcaacgggagtatgttaggatgagcatcgacacatatttgatcggatattatattttttgggatctggagaaagtttgctcggaagccaaacatgttaagacctgagcatgtgtatgatatgcaaaggctggggctcgaacgcgcttgtatgagtcttgttaatttgcatgtctcgtgcatagtctctcaccatctattcactataatatacaaaatctgtgtctatctatatttattttaagcttctaacggccttccatgattccatcaggttcttgccacttttgttacagccatgttcttggacagagcgagcaaggggtgttaattgtttgttacaaccatcggctgaacgaagtatttgagaagaaactattaat

SEQ ID NO: 53336 - DNA, 1102 bp, Zea Mays
gacgtccctcccggcctcccccacccgccatcgcccaaaaggagcagcgatccatccatcctatcccctgtgccaaaccctagccggctatggagcatcccgccgccacctcctcacctgatccgacgccgtagcacctctccctgtccctgtccccatctccctccgtctccctggccaagcactccacctggaagcaccctgccccgaactgcaccgcagtcgtcgacgctaagcgctggcccacgctctccaaggttgcaagggtgatcaacttgctattgggaaggaaacaacacgtcgtttgggaatgggtactaaatgtaaggatgagtcacttgcttcattgccaattgatgaattgaccgagaaggctgatggctttgctagagtctttccagatctatgttgaatcaattaccatctgtattgtgcttggttttatgcttcttgcgctgatatggaagtttgacttcccaacatttaccgtccagatcattgccatcctcaatgacgaatgccactctgattgttgtatatgccaactgggcatttgctgctattaagggcattggatggggctgggccggtgtcaaatggctctacatcattgtcttctacttcctgctgcgcatcatcaatttcctcatcctgctatacgctgagtaggagggcatggaacctcgtccttatgtatatactaggtgtgtgcccgtacgttgcaacgggagtatgttaggatgagcatcgacacatatttgatcggatattatattttttgggatctggagaaagtttgctcggaagccaaacatgttaagacctgagcatgtgtatgatatgcaaaggctggggctcgaacgcgcttgtatgagtcttgttaatttgcatgtctcgtgcatagtctctcaccatctattcactataatatacaaaatctgtgtctatctatatttattttaagcttctaacggccttccatgattccatcaggttcttgccacttttgttacagccatgttcttggacagagcgagcaaggggtgttaattgtttgttacaaccatcggctgaacgaagtatttgagaagaaactattaat

SEQ ID NO: 53337 - DNA, 1246 bp, Zea Mays
gacgtccctcccggcctcccccacccgccatcgcccaaaaggagcagcgatccatccatcctatcccctgtgccaaaccctagccggctatggagcatcccgccgccacctcctcacctgatccgacgccgtagcacctctccctgtccctgtccccatctccctccgtctccctggccaagcactccacctggaagcaccctgccccgaactgcaccgcagtcgtcgacgctaagcgctggcccacgctctccaaggttgcaagggtgatcaacttgctattgggaaggaaacaacacgtcgtttgggaatgggtactaaatgtaaggatgagtcacttgcttcattgccaattgatgaattgaccgagaaggctgatggctttgctagagtctttccagcttggttttatgcttcttgcgctgatatggaagtttgacttcccaacatttaccgtccagatcattgccatcctcaatgacgtacaagcagcatattaggtaaactaacaacatcaacctggcgacatgaataagtaccattgtggctatctcgaaggacatagtaaaaccacctgcacaacctgacagttggaagttatttggtcgtgatgactgtcattttttcttctgggctacgtacaagactgacttcttctcgaatgccactctgattgttgtatatgccaactgggcatttgctgctattaagggcattggatggggctgggccggtgtcaaatggctctacatcattgtcttctacttcctgctgcgcatcatcaatttcctcatcctgctatacgctgagtaggagggcatggaacctcgtccttatgtatatactaggtgtgtgcccgtacgttgcaacgggagtatgttaggatgagcatcgacacatatttgatcggatattatattttttgggatctggagaaagtttgctcggaagccaaacatgttaagacctgagcatgtgtatgatatgcaaaggctggggctcgaacgcgcttgtatgagtcttgttaatttgcatgtctcgtgcatagtctctcaccatctattcactataatatacaaaatctgtgtctatctatatttattttaagcttctaacggccttccatgattccatcaggttcttgccacttttgttacagccatgttcttggacagagcgagcaaggggtgttaattgtttgttacaaccatcggctgaacgaagtatttgagaagaaactattaat

SEQ ID NO: 53338 - DNA, 1069 bp, Zea Mays
gacgtccctcccggcctcccccacccgccatcgcccaaaaggagcagcgatccatccatcctatcccctgtgccaaaccctagccggctatggagcatcccgccgccacctcctcacctgatccgacgccgtagcacctctccctgtccctgtccccatctccctccgtctccctggccaagcactccacctggaagcaccctgccccgaactgcaccgcagtcgtcgacgctaagcgctggcccacgctctccaaggttgcaagggtgatcaacttgctattgggaaggaaacaacacgtcgtttgggaatgggtactaaatgtaaggatgagtcacttgcttcattgccaattgatgaattgaccgagaaggctgatggctttgctagagtctttccagcttggttttatgcttcttgcgctgatatggaagtttgacttcccaacatttaccgtccagatcattgccatcctcaatgacgaatgccactctgattgttgtatatgccaactgggcatttgctgctattaagggcattggatggggctgggccggtgtcaaatggctctacatcattgtcttctacttcctgctgcgcatcatcaatttcctcatcctgctatacgctgagtaggagggcatggaacctcgtccttatgtatatactaggtgtgtgcccgtacgttgcaacgggagtatgttaggatgagcatcgacacatatttgatcggatattatattttttgggatctggagaaagtttgctcggaagccaaacatgttaagacctgagcatgtgtatgatatgcaaaggctggggctcgaacgcgcttgtatgagtcttgttaatttgcatgtctcgtgcatagtctctcaccatctattcactataatatacaaaatctgtgtctatctatatttattttaagcttctaacggccttccatgattccatcaggttcttgccacttttgttacagccatgttcttggacagagcgagcaaggggtgttaattgtttgttacaaccatcggctgaacgaagtatttgagaagaaactattaat

SEQ ID NO: 53339 - DNA, 1584 bp, Zea Mays
gacgtccctcccggcctcccccacccgccatcgcccaaaaggagcagcgatccatccatcctatcccctgtgccaaaccctagccggctatggagcatcccgccgccacctcctcacctgatccgacgccgtagcacctctccctgtccctgtccccatctccctccgtctccctggccaagcactccacctggaagcaccctgccccgaactgcaccgcagtcgtcgacgctaagcgctggcccacgctctccaaggttgcaagggtgatcaacttgctattgggaaggaaacaacacgtcgtttgggaatgggtactaaatgtaaggatgagtcacttgcttcattgccaattgatgaattgaccgagaaggctgatggctttgctagagtctttccagatctatgttgaatcaattaccatctgtattgtgcttggttttatgcttcttgcgctgatatggaagtttgacttcccaacatttaccgtccagatcattgccatcctcaatgacgtacaagcagcatattaggtaaactaacaacatcaacctggcgacatgaataagtaccattgtggctatctcgaaggacatagtaaaaccacctgcacaacctgacagttggaagttatttggtcgtgatgactgtcattttttcttctgggctacgtacaagactgacttcttctcggtatgggccagtggctggtttagcattatttaaagttttgagaaatcatcgtagtgtgcccatccttttcatggttgctaatatacagaaattgttccatgtcgaaagccttgagaaaatttcccagggtgattttcatacgctttcctctgccatgtaccttcaagtcagcacaatcaatcagggcccttaacttacacggtctcgcacgctcgcaactgctgctgagtcatccgactctagttccataccttactgttgtatgtggtctttccgcgtctccttacattttatggtgtttgcagaatgccactctgattgttgtatatgccaactgggcatttgctgctattaagggcattggatggggctgggccggtgtcaaatggctctacatcattgtcttctacttcctgctgcgcatcatcaatttcctcatcctgctatacgctgagtaggagggcatggaacctcgtccttatgtatatactaggtgtgtgcccgtacgttgcaacgggagtatgttaggatgagcatcgacacatatttgatcggatattatattttttgggatctggagaaagtttgctcggaagccaaacatgttaagacctgagcatgtgtatgatatgcaaaggctggggctcgaacgcgcttgtatgagtcttgttaatttgcatgtctcgtgcatagtctctcaccatctattcactataatatacaaaatctgtgtctatctatatttattttaagcttctaacggccttccatgattccatcaggttcttgccacttttgttacagccatgttcttggacagagcgagcaaggggtgttaattgtttgttacaaccatcggctgaacgaagtatttgagaagaaactattaat

SEQ ID NO: 53340 - DNA, 1476 bp, Zea Mays
aaaagacacgtctcatgttgggtcagccatggggacgtccctcccggcctcccccacccgccatcgcccaaaaggagcagcgatccatccatcctatcccctgtgccaaaccctagccggctatggagcatcccgccgccacctcctcacctgatccgacgccgtagcacctctccctgtccctgtccccatctccctccgtctccctggccaagcactccacctggaagcaccctgccccgaactgcaccgcagtcgtcgacgctaagcgctggcccacgctctccaaggttgcaagggtgatcaacttgctattgggaaggaaacaacacgtcgtttgggaatgggtactaaatgtaaggatgagtcacttgcttcattgccaattgatgaattgaccgagaaggctgatggctttgctagagtctttccagcttggttttatgcttcttgcgctgatatggaagtttgacttcccaacatttaccgtccagatcattgccatcctcaatgacgtacaagcagcatattaggtaaactaacaacatcaacctggcgacatgaataagtaccattgtggctatctcgaaggacatagtaaaaccacctgcacaacctgacagttggaagttatttggtcgtgatgactgtcattttttcttctgggctacgtacaagactgacttcttctcgccttgagaaaatttcccagggtgattttcatacgctttcctctgccatgtaccttcaagtcagcacaatcaatcagggcccttaacttacacggtctcgcacgctcgcaactgctgctgagtcatccgactctagttccataccttactgttgtatgtggtctttccgcgtctccttacattttatggtgtttgcagaatgccactctgattgttgtatatgccaactgggcatttgctgctattaagggcattggatggggctgggccggtgtcaaatggctctacatcattgtcttctacttcctgctgcgcatcatcaatttcctcatcctgctatacgctgagtaggagggcatggaacctcgtccttatgtatatactaggtgtgtgcccgtacgttgcaacgggagtatgttaggatgagcatcgacacatatttgatcggatattatattttttgggatctggagaaagtttgctcggaagccaaacatgttaagacctgagcatgtgtatgatatgcaaaggctggggctcgaacgcgcttgtatgagtcttgttaatttgcatgtctcgtgcatagtctctcaccatctattcactataatatacaaaatctgtgtctatctatatttattttaagcttctaacggccttccatgattccatcaggttcttgccacttttgttacagccatgttcttggacagagcgagcaaggggtgttaattgtttgttacaaccatcggctgaacgaagtatttgagaagaaactattaat

SEQ ID NO: 53341 - DNA, 2820 bp, Zea Mays
cggccctacgtgtcggcgacagccgagtaagcacgggccggctcctcctcgcccaacaaccaccgcggcgtgcgccgaccgtaccctctccctccggcgcaccgctctggttcatctccaactacatccaccgcgccccaaatcgcaccccgcctcccccattcgcgccgatcgaaccccaaatcggtggcgatgagcgtggtcggcttcgacgtcggcaacgacaccctggtggcggcggcggcgcggcagcggggcatcgacgtgctcctcaacgccgagtccaagcgcgagtcccccgccgccatcgccttctcccgcaacgcgcgcctcatcggctgccacgccgcgtccgcctcgtccgcgcacgcccccttctccagcgtcaagcgccttctcatgggcgccacggggaggcacccggactcctccctactccgcgacctgtcccgcctccccttccccgctgccgtcggtggcggcgctgtcgtccacgccgaccacatcggccgccgcatcgcgctctcgccgacccacctcctctccatgctgctggcctacctcaagcagctcgcggaggccgacctcggcggcgcccccgtagccgactgcgtgatctccgtgccctgctacttcactcaagcgcagcgccgagcctacctcgacgccgccgccatcgcggggctcaggccgctccgcctcatgcacgacctcgccgccaccgcgcttggctacggcctctaccgctccgacctcggcggctccgggggtcccacctgtgtcgcgttcgtggacgtcggccaatgcgacacacaggtcgcggtcgtctctttcgacatgtcggggatgaaggtgctgtctcacgggttcgatgcagacctcgggggcagggacttcgacgaggtgctgttcgagcatttcgccgaggagttcaaagacaggtacatgattgatgtcacaggaaatgtcaaggccagtatgaggttgagggcagcctgtgagaaggcgaagaaggttctgagcgcgaacgcggaggctgtggtgaacattgagtgcctgatagaggagaaggatgtgaggggggtgatccgaagggaggacttcgagaagctatgtgccaggctgctggagagggttgttgaaccttgcaacagggcggtgacagattcaaggattggattggagaggctgcattctgtggaactcgttgggtcaggttctcgtgtgcctgccattgccaaggtgcttaaggaattcttcagaaaagaacctagtcgcacactcaattcaagtgagtgtgtggctcgggggtgtgcattacaatgtgcaatgcttagtcctacgttccgtgttcgggaatacgaggtgcacgatgcaatccctgcttccataggattttatactagtgacggcccagtttcaacattgtcaagtgatgcattgttccggagaggcctgccctttcccagtgttaagatcattactctacagaagaacgacagttttagttttgatgcctattatgtggatgcgaatgaattgcctcctggtacctcaacagacatcggtagttttcagattggcccattccaagcacatatggaagcttctaaagtcaaagtaaaaattcgtttgaatttacatggtttggtttcagttgaatctgctgctttgatagatgattatcaaaggaatgcaacttctgctgaccatatggaggtggataccagcggtgatgacatgggtcacaagtcaagaagtgaaaggtctatccagcggcaggagttgccaatcactgagtacatctgttgtgcaatgagcaagcaggaactgctggaagctcaggagcaagagcaccaattggcttatcaggataaacttatggaacggacaaaggacaggaagaatgcattagaatcttatgtatatgacacccgtaacaagctttctgagaggtaccggagctttgctactgattcagaaagggaacaaatctcatttaatttacaacagactgaagattggctttatgaagaaggtgatgatgagacagaagtggtttacagtagcaaacttgaggagctgaaaaagatccaattgaaaatcgttgtaatgatgacgaagtgagagctgaaatcgcaagggagcttttgaagtgcattgttgaccacagaatggctgccaagtcattatccgcacctgaaagggatgctgttgacaatgagtgcaataaagctgagcagtggctaagtgaggggtccaaacttcaagaatccttgcccaagaatgtggacccagtactttggtcctgtgaaatcaagggaaaggaagaagagctggatatgttctgtcgaaacataacaaggcacaagggctccccagcaaggacagatggcagcaggggttcagatcacatgcctacacctgatagagattagatatattcacaaggtttcttcactgtacgactgataacaccgtcatataattgactctgtaccacactaggcccgcattaggtgaccgcttcttggttctccagggtgttgtgcagttttcacttgagagcctactaatcatggttattgatacctgttaattctttttctgtactcggaccatgggtattgtctgcttcagtttgtgctgaatgaacaggaaaactaaccgcgtgtttggttggtggacgagtgcgtgcagctgtatgcacggagcgttgaagcatggtttgtttggttgccgcaccgcacacacgcaaactaggatgggttgaatctatgacaactaagatgtgattgtaccttccatgacacacaaaag

SEQ ID NO: 53342 - DNA, 2962 bp, Zea Mays
cggccctacgtgtcggcgacagccgagtaagcacgggccggctcctcctcgcccaacaaccaccgcggcgtgcgccgaccgtaccctctccctccggcgcaccgctctggttcatctccaactacatccaccgcgccccaaatcgcaccccgcctcccccattcgcgccgatcgaaccccaaatcggtggcgatgagcgtggtcggcttcgacgtcggcaacgacaccctggtggcggcggcggcgcggcagcggggcatcgacgtgctcctcaacgccgagtccaagcgcgagtcccccgccgccatcgccttctcccgcaacgcgcgcctcatcggctgccacgccgcgtccgcctcgtccgcgcacgcccccttctccagcgtcaagcgccttctcatgggcgccacggggaggcacccggactcctccctactccgcgacctgtcccgcctccccttccccgctgccgtcggtggcggcgctgtcgtccacgccgaccacatcggccgccgcatcgcgctctcgccgacccacctcctctccatgctgctggcctacctcaagcagctcgcggaggccgacctcggcggcgcccccgtagccgactgcgtgatctccgtgccctgctacttcactcaagcgcagcgccgagcctacctcgacgccgccgccatcgcggggctcaggccgctccgcctcatgcacgacctcgccgccaccgcgcttggctacggcctctaccgctccgacctcggcggctccgggggtcccacctgtgtcgcgttcgtggacgtcggccaatgcgacacacaggtcgcggtcgtctctttcgacatgtcggggatgaaggtgctgtctcacgggttcgatgcagacctcgggggcagggacttcgacgaggtgctgttcgagcatttcgccgaggagttcaaagacaggtacatgattgatgtcacaggaaatgtcaaggccagtatgaggttgagggcagcctgtgagaaggcgaagaaggttctgagcgcgaacgcggaggctgtggtgaacattgagtgcctgatagaggagaaggatgtgaggggggtgatccgaagggaggacttcgagaagctatgtgccaggctgctggagagggttgttgaaccttgcaacagggcggtgacagattcaaggattggattggagaggctgcattctgtggaactcgttgggtcaggttctcgtgtgcctgccattgccaaggtgcttaaggaattcttcagaaaagaacctagtcgcacactcaattcaagtgagtgtgtggctcgggggtgtgcattacaatgtgcaatgcttagtcctacgttccgtgttcgggaatacgaggtgcacgatgcaatccctgcttccataggattttatactagtgacggcccagtttcaacattgtcaagtgatgcattgttccggagaggcctgccctttcccagtgttaagatcattactctacagaagaacgacagttttagttttgatgcctattatgtggatgcgaatgaattgcctcctggtacctcaacagacatcggtagttttcagaatcaatatgtgttagcagaaaaaggagcactgggatgtgcgataaagaacaagcgacatgattacatgaagtgtgatttgatctgccacggcagactggataatgtcttcttagttgacagtaatgtacttaaacacaactgttctgggaatcatgctctgctgtcagatggcaagtgctggggttatgaccagcttgccaagattggcccattccaagcacatatggaagcttctaaagtcaaagtaaaaattcgtttgaatttacatggtttggtttcagttgaatctgctgctttgatagatgattatcaaaggaatgcaacttctgctgaccatatggaggtggataccagcggtgatgacatgggtcacaagtcaagaagtgaaaggtctatccagcggcaggagttgccaatcactgagtacatctgttgtgcaatgagcaagcaggaactgctggaagctcaggagcaagagcaccaattggcttatcaggataaacttatggaacggacaaaggacaggaagaatgcattagaatcttatgtatatgacacccgtaacaagactgaagattggctttatgaagaaggtgatgatgagacagaagtggtttacagtagcaaacttgaggagctgaaaaagcttgtagatccaattgaaaatcgttgtaatgatgacgaagtgagagctgaaatcgcaagggagcttttgaagtgcattgttgaccacagaatggctgccaagtcattatccgcacctgaaagggatgctgttgacaatgagtgcaataaagctgagcagtggctaagtgaggggtccaaacttcaagaatccttgcccaagaatgtggacccagtactttggtcctgtgaaatcaagggaaaggaagaagagctggatatgttctgtcgaaacataacaaggcacaagggctccccagcaaggacagatggcagcaggggttcagatcacatgcctacacctgatagagattagatatattcacaaggtttcttcactgtacgactgataacaccgtcatataattgactctgtaccacactaggcccgcattaggtgaccgcttcttggttctccagggtgttgtgcagttttcacttgagagcctactaatcatggttattgatacctgttaattctttttctgtactcggaccatgggtattgtctgcttcagtttgtgctgaatgaacaggaaaactaaccgcgtgtttggttggtggacgagtgcgtgcagctgtatgcacggagcgttgaagcatggtttgtttggttgccgcaccgcacacacgcaaactaggatgggttgaatctatgacaactaagatgtgattgtaccttccatgacacacaaaag

SEQ ID NO: 53343 - DNA, 2929 bp, Zea Mays
agaaaccggccctacgtgtcggcgacagccgagtaagcacgggccggctcctcctcgcccaacaaccaccgcggcgtgcgccgaccgtaccctctccctccggcgcaccgctctggttcatctccaactacatccaccgcgccccaaatcgcaccccgcctcccccattcgcgccgatcgaaccccaaatcggtggcgatgagcgtggtcggcttcgacgtcggcaacgacaccctggtggcggcggcggcgcggcagcggggcatcgacgtgctcctcaacgccgagtccaagcgcgagtcccccgccgccatcgccttctcccgcaacgcgcgcctcatcggctgccacgccgcgtccgcctcgtccgcgcacgcccccttctccagcgtcaagcgccttctcatgggcgccacggggaggcacccggactcctccctactccgcgacctgtcccgcctccccttccccgctgccgtcggtggcggcgctgtcgtccacgccgaccacatcggccgccgcatcgcgctctcgccgacccacctcctctccatgctgctggcctacctcaagcagctcgcggaggccgacctcggcggcgcccccgtagccgactgcgtgatctccgtgccctgctacttcactcaagcgcagcgccgagcctacctcgacgccgccgccatcgcggggctcaggccgctccgcctcatgcacgacctcgccgccaccgcgcttggctacggcctctaccgctccgacctcggcggctccgggggtcccacctgtgtcgcgttcgtggacgtcggccaatgcgacacacaggtcgcggtcgtctctttcgacatgtcggggatgaaggtgctgtctcacgggttcgatgcagacctcgggggcagggacttcgacgaggtgctgttcgagcatttcgccgaggagttcaaagacaggtacatgattgatgtcacaggaaatgtcaaggccagtatgaggttgagggcagcctgtgagaaggcgaagaaggttctgagcgcgaacgcggaggctgtggtgaacattgagtgcctgatagaggagaaggatgtgaggggggtgatccgaagggaggacttcgagaagctatgtgccaggctgctggagagggttgttgaaccttgcaacagggcggtgacagattcaaggattggattggagaggctgcattctgtggaactcgttgggtcaggttctcgtgtgcctgccattgccaaggtgcttaaggaattcttcagaaaagaacctagtcgcacactcaattcaagtgagtgtgtggctcgggggtgtgcattacaatgtgcaatgcttagtcctacgttccgtgttcgggaatacgaggtgcacgatgcaatccctgcttccataggattttatactagtgacggcccagtttcaacattgtcaagtgatgcattgttccggagaggcctgccctttcccagtgttaagatcattactctacagaagaacgacagttttagttttgatgcctattatgtggatgcgaatgaattgcctcctggtacctcaacagacatcggtagttttcagattggcccattccaagcacatatggaagcttctaaagtcaaagtaaaaattcgtttgaatttacatggtttggtttcagttgaatctgctgctttgatagatgattatcaaaggaatgcaacttctgctgaccatatggaggtggataccagcggtgatgacatgggtcacaagtcaagaagtgaaaggtctatccagcggcaggagttgccaatcactgagtacatctgttgtgcaatgagcaagcaggaactgctggaagctcaggagcaagagcaccaattggcttatcaggataaacttatggaacggacaaaggacaggaagaatgcattagaatcttatgtatatgacacccgtaacaagactgaagattggctttatgaagaaggtgatgatgagacagaagtggtttacagtagcaaacttgaggagctgaaaaaggcccactgctgctgcaggtggttcagagggcaggggtggttagtcagtgatagcagctggccgtgggtggtggtggacatctggatgcgaagtgttgggccaggggtaactctggctaccagattggcgtggttgtgcagccccggcagcggttatgctgccagggctggagatccaattgaaaatcgttgtaatgatgacgaagtgagagctgaaatcgcaagggagcttttgaagtgcattgttgaccacagaatggctgccaagtcattatccgcacctgaaagggatgctgttgacaatgagtgcaataaagctgagcagtggctaagtgaggggtccaaacttcaagaatccttgcccaagaatgtggacccagtactttggtcctgtgaaatcaagggaaaggaagaagagctggatatgttctgtcgaaacataacaaggcacaagggctccccagcaaggacagatggcagcaggggttcagatcacatgcctacacctgatagagattagatatattcacaaggtttcttcactgtacgactgataacaccgtcatataattgactctgtaccacactaggcccgcattaggtgaccgcttcttggttctccagggtgttgtgcagttttcacttgagagcctactaatcatggttattgatacctgttaattctttttctgtactcggaccatgggtattgtctgcttcagtttgtgctgaatgaacaggaaaactaaccgcgtgtttggttggtggacgagtgcgtgcagctgtatgcacggagcgttgaagcatggtttgtttggttgccgcaccgcacacacgcaaactaggatgggttgaatctatgacaactaagatgtgattgtaccttccatgacacacaaaag

SEQ ID NO: 53344 - DNA, 3000 bp, Zea Mays
aaagaaaccggccctacgtgtcggcgacagccgagtaagcacgggccggctcctcctcgcccaacaaccaccgcggcgtgcgccgaccgtaccctctccctccggcgcaccgctctggttcatctccaactacatccaccgcgccccaaatcgcaccccgcctcccccattcgcgccgatcgaaccccaaatcggtggcgatgagcgtggtcggcttcgacgtcggcaacgacaccctggtggcggcggcggcgcggcagcggggcatcgacgtgctcctcaacgccgagtccaagcgcgagtcccccgccgccatcgccttctcccgcaacgcgcgcctcatcggctgccacgccgcgtccgcctcgtccgcgcacgcccccttctccagcgtcaagcgccttctcatgggcgccacggggaggcacccggactcctccctactccgcgacctgtcccgcctccccttccccgctgccgtcggtggcggcgctgtcgtccacgccgaccacatcggccgccgcatcgcgctctcgccgacccacctcctctccatgctgctggcctacctcaagcagctcgcggaggccgacctcggcggcgcccccgtagccgactgcgtgatctccgtgccctgctacttcactcaagcgcagcgccgagcctacctcgacgccgccgccatcgcggggctcaggccgctccgcctcatgcacgacctcgccgccaccgcgcttggctacggcctctaccgctccgacctcggcggctccgggggtcccacctgtgtcgcgttcgtggacgtcggccaatgcgacacacaggtcgcggtcgtctctttcgacatgtcggggatgaaggtgctgtctcacgggttcgatgcagacctcgggggcagggacttcgacgaggtgctgttcgagcatttcgccgaggagttcaaagacaggtacatgattgatgtcacaggaaatgtcaaggccagtatgaggttgagggcagcctgtgagaaggcgaagaaggttctgagcgcgaacgcggaggctgtggtgaacattgagtgcctgatagaggagaaggatgtgaggggggtgatccgaagggaggacttcgagaagctatgtgccaggctgctggagagggttgttgaaccttgcaacagggcggtgacagattcaaggattggattggagaggctgcattctgtggaactcgttgggtcaggttctcgtgtgcctgccattgccaaggtgcttaaggaattcttcagaaaagaacctagtcgcacactcaattcaagtgagtgtgtggctcgggggtgtgcattacaatgtgcaatgcttagtcctacgttccgtgttcgggaatacgaggtgcacgatgcaatccctgcttccataggattttatactagtgacggcccagtttcaacattgtcaagtgatgcattgttccggagaggcctgccctttcccagtgttaagatcattactctacagaagaacgacagttttagttttgatgcctattatgtggatgcgaatgaattgcctcctggtacctcaacagacatcggtagttttcagattggcccattccaagcacatatggaagcttctaaagtcaaagtaaaaattcgtttgaatttacatggtttggtttcagttgaatctgctgctttgatagatgattatcaaaggaatgcaacttctgctgaccatatggaggtggataccagcggtgatgacatgggtcacaagtcaagaagtgaaaggtctatccagcggcaggagttgccaatcactgagtacatctgttgtgcaatgagcaagcaggaactgctggaagctcaggagcaagagcaccaattggcttatcaggataaacttatggaacggacaaaggacaggaagaatgcattagaatcttatgtatatgacacccgtaacaagctttctgagaggtaccggagctttgctactgattcagaaagggaacaaatctcatttaatttacaacagactgaagattggctttatgaagaaggtgatgatgagacagaagtggtttacagtagcaaacttgaggagctgaaaaaggcccactgctgctgcaggtggttcagagggcaggggtggttagtcagtgatagcagctggccgtgggtggtggtggacatctggatgcgaagtgttgggccaggggtaactctggctaccagattggcgtggttgtgcagccccggcagcggttatgctgccagggctggagatccaattgaaaatcgttgtaatgatgacgaagtgagagctgaaatcgcaagggagcttttgaagtgcattgttgaccacagaatggctgccaagtcattatccgcacctgaaagggatgctgttgacaatgagtgcaataaagctgagcagtggctaagtgaggggtccaaacttcaagaatccttgcccaagaatgtggacccagtactttggtcctgtgaaatcaagggaaaggaagaagagctggatatgttctgtcgaaacataacaaggcacaagggctccccagcaaggacagatggcagcaggggttcagatcacatgcctacacctgatagagattagatatattcacaaggtttcttcactgtacgactgataacaccgtcatataattgactctgtaccacactaggcccgcattaggtgaccgcttcttggttctccagggtgttgtgcagttttcacttgagagcctactaatcatggttattgatacctgttaattctttttctgtactcggaccatgggtattgtctgcttcagtttgtgctgaatgaacaggaaaactaaccgcgtgtttggttggtggacgagtgcgtgcagctgtatgcacggagcgttgaagcatggtttgtttggttgccgcaccgcacacacgcaaactaggatgggttgaatctatgacaactaagatgtgattgtaccttccatgacacacaaaag

SEQ ID NO: 53345 - DNA, 2845 bp, Zea Mays
gcagtaggcaaaagaaaccggccctacgtgtcggcgacagccgagtaagcacgggccggctcctcctcgcccaacaaccaccgcggcgtgcgccgaccgtaccctctccctccggcgcaccgctctggttcatctccaactacatccaccgcgccccaaatcgcaccccgcctcccccattcgcgccgatcgaaccccaaatcggtggcgatgagcgtggtcggcttcgacgtcggcaacgacaccctggtggcggcggcggcgcggcagcggggcatcgacgtgctcctcaacgccgagtccaagcgcgagtcccccgccgccatcgccttctcccgcaacgcgcgcctcatcggctgccacgccgcgtccgcctcgtccgcgcacgcccccttctccagcgtcaagcgccttctcatgggcgccacggggaggcacccggactcctccctactccgcgacctgtcccgcctccccttccccgctgccgtcggtggcggcgctgtcgtccacgccgaccacatcggccgccgcatcgcgctctcgccgacccacctcctctccatgctgctggcctacctcaagcagctcgcggaggccgacctcggcggcgcccccgtagccgactgcgtgatctccgtgccctgctacttcactcaagcgcagcgccgagcctacctcgacgccgccgccatcgcggggctcaggccgctccgcctcatgcacgacctcgccgccaccgcgcttggctacggcctctaccgctccgacctcggcggctccgggggtcccacctgtgtcgcgttcgtggacgtcggccaatgcgacacacaggtcgcggtcgtctctttcgacatgtcggggatgaaggtgctgtctcacgggttcgatgcagacctcgggggcagggacttcgacgaggtgctgttcgagcatttcgccgaggagttcaaagacaggtacatgattgatgtcacaggaaatgtcaaggccagtatgaggttgagggcagcctgtgagaaggcgaagaaggttctgagcgcgaacgcggaggctgtggtgaacattgagtgcctgatagaggagaaggatgtgaggggggtgatccgaagggaggacttcgagaagctatgtgccaggctgctggagagggttgttgaaccttgcaacagggcggtgacagattcaaggattggattggagaggctgcattctgtggaactcgttgggtcaggttctcgtgtgcctgccattgccaaggtgcttaaggaattcttcagaaaagaacctagtcgcacactcaattcaagtgagtgtgtggctcgggggtgtgcattacaatgtgcaatgcttagtcctacgttccgtgttcgggaatacgaggtgcacgatgcaatccctgcttccataggattttatactagtgacggcccagtttcaacattgtcaagtgatgcattgttccggagaggcctgccctttcccagtgttaagatcattactctacagaagaacgacagttttagttttgatgcctattatgtggatgcgaatgaattgcctcctggtacctcaacagacatcggtagttttcagattggcccattccaagcacatatggaagcttctaaagtcaaagtaaaaattcgtttgaatttacatggtttggtttcagttgaatctgctgctttgatagatgattatcaaaggaatgcaacttctgctgaccatatggaggtggataccagcggtgatgacatgggtcacaagtcaagaagtgaaaggtctatccagcggcaggagttgccaatcactgagtacatctgttgtgcaatgagcaagcaggaactgctggaagctcaggagcaagagcaccaattggcttatcaggataaacttatggaacggacaaaggacaggaagaatgcattagaatcttatgtatatgacacccgtaacaagctttctgagaggtaccggagctttgctactgattcagaaagggaacaaatctcatttaatttacaacagactgaagattggctttatgaagaaggtgatgatgagacagaagtggtttacagtagcaaacttgaggagctgaaaaagcttgtagatccaattgaaaatcgttgtaatgatgacgaagtgagagctgaaatcgcaagggagcttttgaagtgcattgttgaccacagaatggctgccaagtcattatccgcacctgaaagggatgctgttgacaatgagtgcaataaagctgagcagtggctaagtgaggggtccaaacttcaagaatccttgcccaagaatgtggacccagtactttggtcctgtgaaatcaagggaaaggaagaagagctggatatgttctgtcgaaacataacaaggcacaagggctccccagcaaggacagatggcagcaggggttcagatcacatgcctacacctgatagagattagatatattcacaaggtttcttcactgtacgactgataacaccgtcatataattgactctgtaccacactaggcccgcattaggtgaccgcttcttggttctccagggtgttgtgcagttttcacttgagagcctactaatcatggttattgatacctgttaattctttttctgtactcggaccatgggtattgtctgcttcagtttgtgctgaatgaacaggaaaactaaccgcgtgtttggttggtggacgagtgcgtgcagctgtatgcacggagcgttgaagcatggtttgtttggttgccgcaccgcacacacgcaaactaggatgggttgaatctatgacaactaagatgtgattgtaccttccatgacacacaaaag

SEQ ID NO: 53346 - DNA, 2830 bp, Zea Mays
cacagctcaaaattactaaggagccgagagaaaaaagggccgagccacgtccccgcagtaggcaaaagaaaccggccctacgtgtcggcgacagccgagtaagcacgggccggctcctcctcgcccaacaaccaccgcggcgtgcgccgaccgtaccctctccctccggcgcaccgctctggttcatctccaactacatccaccgcgccccaaatcgcaccccgcctcccccattcgcgccgatcgaaccccaaatcggtggcgatgagcgtggtcggcttcgacgtcggcaacgacaccctggtggcggcggcggcgcggcagcggggcatcgacgtgctcctcaacgccgagtccaagcgcgagtcccccgccgccatcgccttctcccgcaacgcgcgcctcatcggctgccacgccgcgtccgcctcgtccgcgcacgcccccttctccagcgtcaagcgccttctcatgggcgccacggggaggcacccggactcctccctactccgcgacctgtcccgcctccccttccccgctgccgtcggtggcggcgctgtcgtccacgccgaccacatcggccgccgcatcgcgctctcgccgacccacctcctctccatgctgctggcctacctcaagcagctcgcggaggccgacctcggcggcgcccccgtagccgactgcgtgatctccgtgccctgctacttcactcaagcgcagcgccgagcctacctcgacgccgccgccatcgcggggctcaggccgctccgcctcatgcacgacctcgccgccaccgcgcttggctacggcctctaccgctccgacctcggcggctccgggggtcccacctgtgtcgcgttcgtggacgtcggccaatgcgacacacaggtcgcggtcgtctctttcgacatgtcggggatgaaggtgctgtctcacgggttcgatgcagacctcgggggcagggacttcgacgaggtgctgttcgagcatttcgccgaggagttcaaagacaggtacatgattgatgtcacaggaaatgtcaaggccagtatgaggttgagggcagcctgtgagaaggcgaagaaggttctgagcgcgaacgcggaggctgtggtgaacattgagtgcctgatagaggagaaggatgtgaggggggtgatccgaagggaggacttcgagaagctatgtgccaggctgctggagagggttgttgaaccttgcaacagggcggtgacagattcaaggattggattggagaggctgcattctgtggaactcgttgggtcaggttctcgtgtgcctgccattgccaaggtgcttaaggaattcttcagaaaagaacctagtcgcacactcaattcaagtgagtgtgtggctcgggggtgtgcattacaatgtgcaatgcttagtcctacgttccgtgttcgggaatacgaggtgcacgatgcaatccctgcttccataggattttatactagtgacggcccagtttcaacattgtcaagtgatgcattgttccggagaggcctgccctttcccagtgttaagatcattactctacagaagaacgacagttttagttttgatgcctattatgtggatgcgaatgaattgcctcctggtacctcaacagacatcggtagttttcagattggcccattccaagcacatatggaagcttctaaagtcaaagtaaaaattcgtttgaatttacatggtttggtttcagttgaatctgctgctttgatagatgattatcaaaggaatgcaacttctgctgaccatatggaggtggataccagcggtgatgacatgggtcacaagtcaagaagtgaaaggtctatccagcggcaggagttgccaatcactgagtacatctgttgtgcaatgagcaagcaggaactgctggaagctcaggagcaagagcaccaattggcttatcaggataaacttatggaacggacaaaggacaggaagaatgcattagaatcttatgtatatgacacccgtaacaagactgaagattggctttatgaagaaggtgatgatgagacagaagtggtttacagtagcaaacttgaggagctgaaaaagcttgtagatccaattgaaaatcgttgtaatgatgacgaagtgagagctgaaatcgcaagggagcttttgaagtgcattgttgaccacagaatggctgccaagtcattatccgcacctgaaagggatgctgttgacaatgagtgcaataaagctgagcagtggctaagtgaggggtccaaacttcaagaatccttgcccaagaatgtggacccagtactttggtcctgtgaaatcaagggaaaggaagaagagctggatatgttctgtcgaaacataacaaggcacaagggctccccagcaaggacagatggcagcaggggttcagatcacatgcctacacctgatagagattagatatattcacaaggtttcttcactgtacgactgataacaccgtcatataattgactctgtaccacactaggcccgcattaggtgaccgcttcttggttctccagggtgttgtgcagttttcacttgagagcctactaatcatggttattgatacctgttaattctttttctgtactcggaccatgggtattgtctgcttcagtttgtgctgaatgaacaggaaaactaaccgcgtgtttggttggtggacgagtgcgtgcagctgtatgcacggagcgttgaagcatggtttgtttggttgccgcaccgcacacacgcaaactaggatgggttgaatctatgacaactaagatgtgattgtaccttccatgacacacaaaag

SEQ ID NO: 53347 - DNA, 1920 bp, Zea Mays
gcaagctgtaccctgcgttgtcggtggccgcctcccgcccgcgcacatgggtgtcatggggcgtagaccgtggcggcctcagctccggtctccgggattaaagaatccaggtcatggcttcctcgcgccgtgggcgtccatgtcctgctgctgccgccgcgggacctgagaggagaaggacgaggacgaggtggtggttggcggcgtcgcgccgacggcggacatgggttggaggcggggaggaggcgcggatggcgtggccaggagatgggtgctgctgctatgcgtcgggagcttctgcctcggcctgctcttcaccgacagccctttgtagctcagctacctgttgcttcaatcgaacgtctttggcgctcactccggttgcagacctgcagcaggatgtggagcttgccagaagcagatgaggtagcagtactcccaaatttaagaagagaggaagaggctgagcgcaagactggagactgtaatgtaggcaaagttcaaggaaaacacgattacaatgacatgttacgtgtctcagatgctcaccataattcacagactttggataaggcaatagcgaacttggagacagagctctctgcggcaagaactctacaagattctttcctcaatggatctccagtgcaagaagattacaaggcttcagagtctaccggtaggcgcaagtaccttatggtaataggtatcaacactgcttttagcagtcgcaagagaagggattctatccgcaacacctggatgcctacaggggaaataaggaaaaagctggaggaagaaagagggatcatagttcgttttgtaattggtcacagtgctatttcaggtggaattgtcgatagagcaattcaggcagaggataagaaacatggagacttcatgaggctggatcatgttgaaggataccttgagctgtcagggaaaaccaggacatactttgcaacagctgttgctttatgggatgctaacttctatgtgaaggttgacgacgatgtacatgttaatatagcaacacttggaaatatcttatccaaacatatttcaaagcccagggtatacattggatgcatgaagtctggccctgtcctctctgacaaggatgtgaggtactatgaaccagagcactggaaatttggggaagtgggtaataaatattttcggcatgccaccggtcaactgtacgctatttcaaaagatttggcagcctacatatcgctaaacaagcatgttttgcacaaatatatcaacgaggacgtgtctttgggagcttggttgatagggttagatgttgagcatattgatgaccgcagactatgctgcggcactccaccagattgcgaatggaaagctcaggctggtaacacctgcgctgcctcgttcgattggaaatgcagcggtatctgcaactctgtgcagaacatctggggggttcataagaagtgttcagaagatgaaaaggcgctgctgactgtttctttctaatcaaagtgcagtgctgtgtatctgtacattgtgcaaagaatgtgtccggttcataggtggctaaatggcttacaattagacaacaccactggagcaggccgcaattttactcagcgtccgctggtggcactctgaggatttaaggggtgtagagctgaccgattcttttagcaagttggccagttgggtggtcatacatgtattgacctgataaaacaaacactatccgacgagttcagccaggctgtctgagctaagacaggatgaataacggctggttgagctcatgcaagacatttatttggttgattgtacaaattaatgcagaccggtgtagatgctatttggttgactggacaaacaaataaaaaaaaatcttttttgaaatatatatagcatatgtggtttagttttgtt

SEQ ID NO: 53348 - DNA, 1632 bp, Zea Mays
gcaagctgtaccctgcgttgtcggtggccgcctcccgcccgcgcacatgggtgtcatggggcgtagaccgtggcggcctcagctccggtctccgggattaaagaatccaggtcatggcttcctcgcgccgtgggcgtccatgtcctgctgctgccgccgcgggacctgagaggagaaggacgaggacgaggtggtggttggcggcgtcgcgccgacggcggacatgggttggaggcggggaggaggcgcggatggcgtggccaggagatgggtgctgctgctatgcgtcgggagcttctgcctcggcctgctcttcaccgacaggatgtggagcttgccagaagcagatgaggtagcagtactcccaaatttaagaagagaggaagaggctgagcgcaagactggagactgtaatgtaggcaaagttcaaggaaaacacgattacaatgacatgttacgtgtctcagatgctcaccataattcacagactttggataaggcaatagcgaacttggagacagagctctctgcggcaagaactctacaagattctttcctcaatggatctccagtgcaagaagattacaaggcttcagagtctaccggtaggcgcaagtaccttatggtaataggtatcaacactgcttttagcagtcgcaagagaagggattctatccgcaacacctggatgcctacaggggaaataaggaaaaagctggaggaagaaagagggatcatagttcgttttgtaattggtcacagtgctatttcaggtggaattgtcgatagagcaattcaggcagaggataagaaacatggagacttcatgaggctggatcatgttgaaggataccttgagctgtcagggaaaaccaggacatactttgcaacagctgttgctttatgggatgctaacttctatgtgaaggttgacgacgatgtacatgttaatataggcatgttttgcacaaatatatcaacgaggacgtgtctttgggagcttggttgatagggttagatgttgagcatattgatgaccgcagactatgctgcggcactccaccagattgcgaatggaaagctcaggctggtaacacctgcgctgcctcgttcgattggaaatgcagcggtatctgcaactctgtgcagaacatctggggggttcataagaagtgttcagaagatgaaaaggcgctgctgactgtttctttctaatcaaagtgcagtgctgtgtatctgtacattgtgcaaagaatgtgtccggttcataggtggctaaatggcttacaattagacaacaccactggagcaggccgcaattttactcagcgtccgctggtggcactctgaggatttaaggggtgtagagctgaccgattcttttagcaagttggccagttgggtggtcatacatgtattgacctgataaaacaaacactatccgacgagttcagccaggctgtctgagctaagacaggatgaataacggctggttgagctcatgcaagacatttatttggttgattgtacaaattaatgcagaccggtgtagatgctatttggttgactggacaaacaaataaaaaaaaatcttttttgaaatatatatagcatatgtggtttagttttgtt

SEQ ID NO: 53349 - DNA, 1818 bp, Zea Mays
gcaagctgtaccctgcgttgtcggtggccgcctcccgcccgcgcacatgggtgtcatggggcgtagaccgtggcggcctcagctccggtctccgggattaaagaatccaggtcatggcttcctcgcgccgtgggcgtccatgtcctgctgctgccgccgcgggacctgagaggagaaggacgaggacgaggtggtggttggcggcgtcgcgccgacggcggacatgggttggaggcggggaggaggcgcggatggcgtggccaggagatgggtgctgctgctatgcgtcgggagcttctgcctcggcctgctcttcaccgacaggatgtggagcttgccagaagcagatgaggtagcagtactcccaaatttaagaagagaggaagaggctgagcgcaagactggagactgtaatgtaggcaaagttcaaggaaaacacgattacaatgacatgttacgtgtctcagatgctcaccataattcacagactttggataaggcaatagcgaacttggagacagagctctctgcggcaagaactctacaagattctttcctcaatggatctccagtgcaagaagattacaaggcttcagagtctaccggtaggcgcaagtaccttatggtaataggtatcaacactgcttttagcagtcgcaagagaagggattctatccgcaacacctggatgcctacaggggaaataaggaaaaagctggaggaagaaagagggatcatagttcgttttgtaattggtcacagtgctatttcaggtggaattgtcgatagagcaattcaggcagaggataagaaacatggagacttcatgaggctggatcatgttgaaggataccttgagctgtcagggaaaaccaggacatactttgcaacagctgttgctttatgggatgctaacttctatgtgaagcaacacttggaaatatcttatccaaacatatttcaaagcccagggtatacattggatgcatgaagtctggccctgtcctctctgacaaggatgtgaggtactatgaaccagagcactggaaatttggggaagtgggtaataaatattttcggcatgccaccggtcaactgtacgctatttcaaaagatttggcagcctacatatcgctaaacaagcatgttttgcacaaatatatcaacgaggacgtgtctttgggagcttggttgatagggttagatgttgagcatattgatgaccgcagactatgctgcggcactccaccagattgcgaatggaaagctcaggctggtaacacctgcgctgcctcgttcgattggaaatgcagcggtatctgcaactctgtgcagaacatctggggggttcataagaagtgttcagaagatgaaaaggcgctgctgactgtttctttctaatcaaagtgcagtgctgtgtatctgtacattgtgcaaagaatgtgtccggttcataggtggctaaatggcttacaattagacaacaccactggagcaggccgcaattttactcagcgtccgctggtggcactctgaggatttaaggggtgtagagctgaccgattcttttagcaagttggccagttgggtggtcatacatgtattgacctgataaaacaaacactatccgacgagttcagccaggctgtctgagctaagacaggatgaataacggctggttgagctcatgcaagacatttatttggttgattgtacaaattaatgcagaccggtgtagatgctatttggttgactggacaaacaaataaaaaaaaatcttttttgaaatatatatagcatatgtggtttagttttgtt

SEQ ID NO: 53350 - DNA, 1773 bp, Zea Mays
gcaagctgtaccctgcgttgtcggtggccgcctcccgcccgcgcacatgggtgtcatggggcgtagaccgtggcggcctcagctccggtctccgggattaaagaatccaggtcatggcttcctcgcgccgtgggcgtccatgtcctgctgctgccgccgcgggacctgagaggagaaggacgaggacgaggtggtggttggcggcgtcgcgccgacggcggacatgggttggaggcggggaggaggcgcggatggcgtggccaggagatgggtgctgctgctatgcgtcgggagcttctgcctcggcctgctcttcaccgacaggatgtggagcttgccagaagcagatgaggtagcagtactcccaaatttaagaagagaggaagaggctgagcgcaagactggagactgtaatgtaggcaaagttcaaggaaaacacgattacaatgacatgttacgtgtctcagatgctcaccataattcacagactttggataaggcaatagcgaacttggagacagagctctctgcggcaagaactctacaagattctttcctcaatggatctccagtgcaagaagattacaaggcttcagagtctaccggtaggcgcaagtaccttatggtaataggtatcaacactgcttttagcagtcgcaagagaagggattctatccgcaacacctggatgcctacaggggaaataaggaaaaagctggaggaagaaagagggatcatagttcgttttgtaattggtcacaggatcatgttgaaggataccttgagctgtcagggaaaaccaggacatactttgcaacagctgttgctttatgggatgctaacttctatgtgaaggttgacgacgatgtacatgttaatatagcaacacttggaaatatcttatccaaacatatttcaaagcccagggtatacattggatgcatgaagtctggccctgtcctctctgacaaggatgtgaggtactatgaaccagagcactggaaatttggggaagtgggtaataaatattttcggcatgccaccggtcaactgtacgctatttcaaaagatttggcagcctacatatcgctaaacaagcatgttttgcacaaatatatcaacgaggacgtgtctttgggagcttggttgatagggttagatgttgagcatattgatgaccgcagactatgctgcggcactccaccagattgcgaatggaaagctcaggctggtaacacctgcgctgcctcgttcgattggaaatgcagcggtatctgcaactctgtgcagaacatctggggggttcataagaagtgttcagaagatgaaaaggcgctgctgactgtttctttctaatcaaagtgcagtgctgtgtatctgtacattgtgcaaagaatgtgtccggttcataggtggctaaatggcttacaattagacaacaccactggagcaggccgcaattttactcagcgtccgctggtggcactctgaggatttaaggggtgtagagctgaccgattcttttagcaagttggccagttgggtggtcatacatgtattgacctgataaaacaaacactatccgacgagttcagccaggctgtctgagctaagacaggatgaataacggctggttgagctcatgcaagacatttatttggttgattgtacaaattaatgcagaccggtgtagatgctatttggttgactggacaaacaaataaaaaaaaatcttttttgaaatatatatagcatatgtggtttagttttgtt

SEQ ID NO: 53351 - DNA, 1837 bp, Zea Mays
gcaagctgtaccctgcgttgtcggtggccgcctcccgcccgcgcacatgggtgtcatggggcgtagaccgtggcggcctcagctccggtctccgggattaaagaatccaggtcatggcttcctcgcgccgtgggcgtccatgtcctgctgctgccgccgcgggacctgagaggagaaggacgaggacgaggtggtggttggcggcgtcgcgccgacggcggacatgggttggaggcggggaggaggcgcggatggcgtggccaggagatgggtgctgctgctatgcgtcgggagcttctgcctcggcctgctcttcaccgacaggatgtggagcttgccagaagcagatgaggtagcagtactcccaaatttaagaagagaggaagaggctgagcgcaagactggagactgtaatgttcaaggaaaacacgattacaatgacatgttacgtgtctcagatgctcaccataattcacagactttggataaggcaatagcgaacttggagacagagctctctgcggcaagaactctacaagattctttcctcaatggatctccagtgcaagaagattacaaggcttcagagtctaccggtaggcgcaagtaccttatggtaataggtatcaacactgcttttagcagtcgcaagagaagggattctatccgcaacacctggatgcctacaggggaaataaggaaaaagctggaggaagaaagagggatcatagttcgttttgtaattggtcacagtgctatttcaggtggaattgtcgatagagcaattcaggcagaggataagaaacatggagacttcatgaggctggatcatgttgaaggataccttgagctgtcagggaaaaccaggacatactttgcaacagctgttgctttatgggatgctaacttctatgtgaaggttgacgacgatgtacatgttaatatagcaacacttggaaatatcttatccaaacatatttcaaagcccagggtatacattggatgcatgaagtctggccctgtcctctctgacaaggatgtgaggtactatgaaccagagcactggaaatttggggaagtgggtaataaatattttcggcatgccaccggtcaactgtacgctatttcaaaagatttggcagcctacatatcgctaaacaagcatgttttgcacaaatatatcaacgaggacgtgtctttgggagcttggttgatagggttagatgttgagcatattgatgaccgcagactatgctgcggcactccaccagattgcgaatggaaagctcaggctggtaacacctgcgctgcctcgttcgattggaaatgcagcggtatctgcaactctgtgcagaacatctggggggttcataagaagtgttcagaagatgaaaaggcgctgctgactgtttctttctaatcaaagtgcagtgctgtgtatctgtacattgtgcaaagaatgtgtccggttcataggtggctaaatggcttacaattagacaacaccactggagcaggccgcaattttactcagcgtccgctggtggcactctgaggatttaaggggtgtagagctgaccgattcttttagcaagttggccagttgggtggtcatacatgtattgacctgataaaacaaacactatccgacgagttcagccaggctgtctgagctaagacaggatgaataacggctggttgagctcatgcaagacatttatttggttgattgtacaaattaatgcagaccggtgtagatgctatttggttgactggacaaacaaataaaaaaaaatcttttttgaaatatatatagcatatgtggtttagttttgtt

SEQ ID NO: 53352 - DNA, 1008 bp, Zea Mays
cctcctccagttgagactataaaatcagaggccgcaccaagcctgtctcatcgtcacctagggttccaagtaccatcagagccgccgccgtctgattaacccgctctcccttcttccatcgatttcttcgcttcttgatttgtttggtcgatctccgcttttctcttctcttgttcttttcagttagcaatatgactgttgcttgacaacagattcgttcctccccccattttgaatcattttcttattttcttatgcgatttatgatgttcgaagcgtctatactaagataggttgctgcgcggtgctaaccccgggcttgtcggattttttaccatttgaagaaggaagccccaatgcctgtgctagatccaccatgccattcagtgttgcaggccctgacgaatcttgtgattggtctgtgtcaaagaaatggatacagatgttcatagcgtctgccaaatctcttcatagcatctcattattttatggttttttcgtcggtggcagtgatttgacattacccgcgcttctgatctaacccgtgaagcaaagggaaaaacaatggttgaatttcttaatatgagccgtccatgaaaatagtcacaagccacttcattttttttgtttttatactatacgtaaaaaaatcagcatccctgttcatgtgaactatctgtcagtgatgatacaacaattcagcttaaaacgccagttctgcttctgataattcatgactgataaagctgattcgtatctgagcctcaatcattcacatgacatcgcacgtccatactcgtaacagggtcaatccatttctctctgatcaccagatttagtttggaaatcgtaatggtctgtgatgaagtcgcccgatttggttgaggctgctgtcgtcaccaagttcctgcttgtcaggaagaacctacttggtgccgctgctctcgcatgatatctccggtgctctgagttgcgcggaggctgaaaaagctcggagagcgtgtgttg

SEQ ID NO: 53353 - DNA, 1157 bp, Zea Mays
ccaccgccgtcggccccccggcccatcccctaccccgaccacctcctccggcggccccaccccaccccagattctgcccctcaagtccattgtcatcagatctctctggatctcggtcgcccgcgccgccattaatcacaggcgggatccggcgctattgtggccagatctgacgcattgaagcctggggaccaccctgtgggcgaccatctctacagacgtgatgacaagacatgggctacaggcggcgagtcgaccaacatctctacgcgcagatccatgtcttcaatccgccccagaacacttatggcgaatctccttgccaaatcgacaacaatactactcggctggagaacgacgacgccgactcgatatctgtctcttataggcacaggaagcgagaagtccctcaggcatgaactttcaattcgtcagactctaggagcactcctcgccccgtcttcaatgcttcccttcaaggtaggatgagttgttcccatatgaagaagctccaatggtcttgacgtcgtcatcatgttcttgcttagatgagttgttcccatttgttttcttgcttgacatgctgcacaaggtctgtatttctcaaaacagacatcggttagtcctaacacatgttctttctttagaagcttatgaaggttctttatcccaacttatgctagatgacgatgtcatagccaacccatatttgttttagcaagtagacatgcatctagatcggtattctctttagtaaaatctactaaataaagcttgcaattagatacacctttaaatgctaatgaaccaccacttcttctaaagataattacattaacatttgtaaataaacaattatatcccatatgacataactggctgataaaaagcaaattgtaaccaaatgattctaccaaaaagacattagagatagagtgctccgtagtactcgctattttacatatcccctttaccttgtcttggttccgatctacaaatatgatcatgtcatgagaatccttatttttgatgtaggaggtgaacatcttctcccacatcatgtggtttgtgcatccactatcaatgatctagcttgagcccctggatgcataaacctacaagaaatttagacttggggtttaggtccccaacttgtg

SEQ ID NO: 53354 - DNA, 1190 bp, Zea Mays
ctgaaacattggtcccgaccgagaaaatcccgaatcttggccccccatcactaatgggccggcgtcaaccgtccaatcgtccaacgtccactctacaacgcccaaactggagggtggtacacagaacatcgtaacccgagagcggatgaggcacaacaaggagatcttttaaccaagctggaaaattcgcccccgagaggaatcgaacccgggtcttggaggtgctactcggaagccttaaccactagctttgtgagttgtcatttcagaaaacccatcatctccgaaatccatacaatgataacctccctgttaaggtatgttgattaccttgtttcaggtgttcactggccttggctccttgaagtatgatgctttatgttttttatatattataaaagggcaaagtgtggaaactgttgggttagcttatacatatagcactatttcgtgtcttgtcttatttcatattttctgatatttctccatcttgatggttatttatcacaatgtttaatgccattgtcaaacatgcttggaaaaactgagctgactttgctttaactataaaccacaccatagttattaatgtggtaaggtgagcgccctcctttttaccttttaagcgaaaaggcataaggcgaggcgacaacttaattatatatataatataattatttaaaattagaccaaatattatttatatatcgctaatttgaaggtaataaaaaaaatagcacagctattagaccttagtaggtcctaggggtgaaaacgggacgggtaccggatacggttatcaaaataatccgaattttcggatacggattcaaatatttttgttgtcgggatggatacgggtactactcggataatgcacatccggatacgggtaggatatggagtcactggtacctggtaactacccacaaacctcgggtcggatatgggtaccggatagtcaggtacccggttggctcatctagcagtctgggtgtttggccggtgctgatgtgctgtgctctacagctctctgttcttgcgccttgtgggctggcgttttggtccattagcccaattagttaaaagagcaatatcaactagggttagctgtgcctgtttaggcatgaggcacaccgtccgtcagacgtcgatcgtccaaatcaaaggcgtgaggtactccggctggc

SEQ ID NO: 53355 - DNA, 2851 bp, Zea Mays
aagacagattgatacaggcacagattactatgaaacatcagcaagataagggcagaaggaaggttgagtttcaggtggggcagtgggtctgggtccggttacagcagcgtacagcggtgggagtgatttctccatctcattcaaagttgggaccaagattctatggcccctacaagattgtgaagacagtaggtccagttttttgtcaattggaactaccaactcgatcgcgtattcatgatgtctttcatgtctcgctcctaaagaagtacgaaggaacacctccagagacagtggtgcctctgcctgaactgctgcatggcagagtggtgcctacaccggtcacagtgactaaagctcggctaaatagaggcgtctgggaagtgcttgtgcaatggatgggttagccctcctcagaagcaacctgggaaccactggaagaattcaagagtcgttttccggaagtacagctcgcagatgagctgtttgttgttgggggggggggagggaaatgttatagatgctttcttaggcaagcattatcataggaagaaagggggccagcgcagctacgagttgagcccaggtgtgcagctagaagataggggtcgggagattttttagctgttcagttaagagattgattagatctattttatagcagataattgttatcctattggttggtgtggcagtcccagtctataagggaatttgcctttagtttgtattaggtattgaaggaataaagatctccaggtagggaggtcgtcctgactgaccatcacagccaggccggcggcggtgatccccccacgccttacgctccatctcttgtctctcccctgcatactcccaagagaagcagcagaccacatcatatacatgcttatatattccttcttttattgatttgttgaacattttgataattaatattatcgggacaaactatccgacaaatatctgttatctacccgagtaatatctggtatccgtttcttacccgccagaattattacccgatctcgtcctgtatctgtcctgagttttaactatcagtacccgattctatatccgagaaaattatattagggtaggatacggggatgagctagtatccggcagtatctgtcccgttttcacccctagtaggtccatttcagcctagtagaagagagaaacagaaaaaagtaaaagaaaaaacaaaaagaaaaagaagcccataaccagtcatcccagcctaacaattttagggttaccttcctcagccggcagcagcagattctccctcagccgacagcagcagcttctccctctcccgctcctctcccgctccccctacttgcagctctcctcccttggcgtgacctacgcgctgtgcgccgccgcgtcgccatggcctactcgctgtgcgcctgccgctcccccacaacctatgctctgtgcgccgccgcgaactacgtgctgcgctgtgcgtcgccgccgcgccaccacctcttcttccctgcggggctgcgccttgctctcgcagtcaaggcgacaggacaccttacgcctccgcactcgccttaccacttaggcgtcgctttagcgacgctaaagctacaccttaataaccttgaaccacgcatatgctgttcatccttagtctcgatttatatttcatcagaggttataatattttttacgtttggctccgccgaagtgtcgttttttcatctggcttgctgcccataatagatgcaggacaagacagcagatcgattagctaagaaatgcctaaaccaccatgagaaatgtctgctatgtgactaagctgaagaaactcttgatcatcttctggtggcttgctccttctcgagagtcttttggtaccagcttttccggaaatttgggcttcactccctagccccccagccggcggtcacctcttcttgaattggtgggaggaggtttcagaggtggtctcaggtgtcaccagaaaaggccttaactcccttattatcctgggtgcttggactatttggattcatcggaacaaaattgtcttcgatggattgtctccttgcctcacctatatccttgcttgggcagatgaggagagaagtcgttgggaggcagctagggcgaagggcctatgttctctggctgcttctgcagctgctccctagggtggtgtgttgtttgttcctttcacatgatgagttcttttttgtatgctattttctggcccctgtgaggaggcctgctgatgtttggtctactttagaccttttttcctatcttcttaatatataatataaaggggcgcagctctcctgctcgtttttgagaaaaaaattaaatatcaaacttttgtacactttatatgatgattaaaacactagctgaaaatgtaatcttgccggaaggatattcaaaattaatgtaggccagaaagaaaagtaacaaaaattctagtgctatgcacacactgatgattgactagattgttgaaatcgtatacttttttaatatatatatctgcattctcgattttttttccagaatttaatttttgagttcacttctgattactgcagatcagcagagattgccaggaactagaacctttcgttggtgagcagttggcttctctgctttatctggagccagacagtgaactcacggtaggttatgcattttactgcctatttatcttgtttttaatattctcattaccttgctgttttcttaagcaggcatatcaacctagtccattgcaactacaactgacagctaggatttggggggtgtttaatcttgaatgcattagagctaatagttagtggctaaaattagctggaga

SEQ ID NO: 53356 - DNA, 418 bp, Zea Mays
gtccttgccattagtaactttgagcttcatgatgttaattttgtaggtataattttctatatttgacctatcatatactgttatagatgctttcttaggcaagcattatcataggaagaaagggagccagcgcagctaggagttgggcccagatcagcagagattgccaggaactagaacctttcgttggtgagcagttggcttctctgctttatctggagccagacagtgaactcacggtaggttatgcattttactgcctatttatcttgtttttaatattctcattaccttgctgttttcttaagcaggcatatcaacctagtccattgcaactacaactgacagctaggatttggggggtgtttaatcttgaatgcattagagctaatagttagtggctaaaattagctggaga

SEQ ID NO: 53357 - DNA, 2450 bp, Zea Mays
aactattactagtagattattcaaacacccgtctagttctacttgttggaagggtgccgctctccacgagatccaaacccccgcacccgcggcgccggcgacgcagggaggaggcgatgcacggccgcccgcggcgaccggccaagctcgaggacgaggaggcggcgtcagcgaaagccgccaagcttcgggacctccaggcccaggtcctgcacaatcaccatggccgcacgtacacaaaggaggcaattgggctgagcttcaagctgctcgagataaatccagaggcctacaccgcatggaactaccggaagcttgcgtttcagcacaatgtcaaggagctttctgatccggaggccatcaagtctgctgttgatgatgagctgagagtggttgaggttgctttaaggcaaaacccaaaatcctatggagcttggtatcaccgtaagtggttgctatgccaaaagctagcgcccgtggatttcaaacgtgagtttggcctcttggataaactgttgaaggtggacgccaggaattttcatggatggaactacagaaggttccttgcaagattcatgggtgtgtcagatgaggaggagctaaagtatactatggataaaatcagcgacaacttcagtaattactcagcatggcataatcgtagtatacttctgtccaacctactgatccagcagagcaaaggttttgagtcaaagcagaagattttttccgaggagtttgaacttgttactcaagctctttttacagatccaagtgaccaaagtggatggttctatcacctttggcttttagctcaaacgtcttgtccagataacccccagctgattgcttcatggccttctaatgctgcaaagctcagttcctctttgatcaaggaaaaagctgagcagcacagacagtcatccatcttgtcaaggactgtacccattgttctttattttaatgagcctgtcaaaggattaaatcaatcaagtgttaacttaaagtctgatttggagttcagtaaggatattatatggaggcccctcacaatggcagactctgggtattctaactgttgggccacagatctccagattataaatgaatgtagcagtttgcaggaatattctgttgaagtgagcataccctgctcgaatggcattgtatctagaagtggctctaactacaattgtcctgtgcattttacatttggcattgaattgatcagcaacgatccagtacagggtttagatatgtttgataagccagttgcctggaattgctcagaatcattccagcctcatgggaaccgtgatcctatcccttttgatctgctaaagattactagtgccttgatcgagcatgactcaaattggcattttgaaagactatctgaggaaatagatcttttcagagagttacctgatgacaacagcaagtttgggaagttgacattagcccggttattgcttgcttgttctgctataaaatctcgtggaagatctctaattgaaaggaagggatactgtgaagaggcactggggctcttcactgacttgattcacctggatccatctcataagcagtactatgaggatgaacggagcttagtcctgatggataaagtaacataaagaatgtttgaagagacttagcttagggataatttgctgctgtctaacctaaccttttcttgcagttaacatgtgacatggagactttcatgaagcactgttcagttcaggttcaaccaaattcagctcccctgaatcatgtgcagctttgcagattatctctaacatgcattggatttgctgaacgcctgttgtgggttcaaatgctggacctaagccataatagtctgagatcagtcgaaggctttgcagcaccttgtgttcttgaacatcagcaacaaccagatcagtggtttcacagcacttgaatcccttacgaagataatctcattgaaagttctggatttatctttcaacaagattggagctcactcaattgacacaacacggtatatctgctcgtctccattctcacacaaaatggaagcaagtgaagcttttgaagcgtaccagaaggtaaatatcaacgtggaggaatactgggatgccatactgtttttcagatctctgaagttggcacagcttgatataaaaggaaatgcagttgcaagcaaggagaacttcagaactattgtcatgatgctcattccttgtctaaaatggtttgatggtgaagatgtcaattaaaatggagttgagcaatgatagtgtcaaggctcacgctgtaaaccattttttgctagaaggcattgatttgcatcatatgtactgctatatttgtttaaaaaactcggccggtaggggaaagaccgtccccctcctgtattatattaataagaagttcaatcgcagccccgatcgagtaagatcacg

SEQ ID NO: 53358 - DNA, 2296 bp, Zea Mays
aactattactagtagattattcaaacacccgtctagttctacttgttggaagggtgccgctctccacgagatccaaacccccgcacccgcggcgccggcgacgcagggaggaggcgatgcacggccgcccgcggcgaccggccaagctcgaggacgaggaggcggcgtcagcgaaagccgccaagcttcgggacctccaggcccaggtcctgcacaatcaccatggccgcacgtacacaaaggaggcaattgggctgagcttcaagctgctcgagataaatccagaggcctacaccgcatggaactaccggaagcttgcgtttcagcacaatgtcaaggagctttctgatccggaggccatcaagtctgctgttgatgatgagctgagagtggttgaggttgctttaaggcaaaacccaaaatcctatggagcttggtatcaccgtaagtggttgctatgccaaaagctagcgcccgtggatttcaaacgtgagtttggcctcttggataaactgttgaaggtggacgccaggaattttcatggatggaactacagaaggttccttgcaagattcatgggtgtgtcagatgaggaggagctaaagtatactatggataaaatcagcgacaacttcagtaattactcagcatggcataatcgtagtatacttctgtccaacctactgatccagcagagcaaaggttttgagtcaaagcagaagattttttccgaggagtttgaacttgttactcaagctctttttacagatccaagtgaccaaagtggatggttctatcacctttggcttttagctcaaacgtcttgtccagataacccccagctgattgcttcatggccttctaatgctgcaaagctcagttcctctttgatcaaggaaaaagctgagcagcacagacagtcatccatcttgtcaaggactgtacccattgttctttattttaatgagcctgtcaaaggattaaatcaatcaagtgttaacttaaagtctgatttggagttcagtaaggatattatatggaggcccctcacaatggcagactctgggtattctaactgttgggccacagatctccagattataaatgaatgtagcagtttgcaggaatattctgttgaagtgagcataccctgctcgaatggcattgtatctagaagtggctctaactacaattgtcctgtgcattttacatttggcattgaattgatcagcaacgatccagtacagggtttagatatgtttgataagccagttgcctggaattgctcagaatcattccagcctcatgggaaccgtgatcctatcccttttgatctgctaaagattactagtgccttgatcgagcatgactcaaattggcattttgaaagactatctgaggaaatagatcttttcagagagttacctgatgacaacagcaagtttgggaagttgacattagcccggttattgcttgcttgttctgctataaaatctcgtggaagatctctaattgaaaggaagggatactgtgaagaggcactggggctcttcactgacttgattcacctggatccatctcataagcagtactatgaggatgaacggagcttagtcctgatggataaattaacatgtgacatggagactttcatgaagcactgttcagttcaggttcaaccaaattcagctcccctgaatcatgtgcagctttgcagattatctctaacatgcattggatttgctgaacgcctgttgtgggttcaaatgctggacctaagccataatagtctgagatcagtcgaaggattggaggctttgcagcaccttgtgttcttgaacatcagcaacaaccagatcagtggtttcacagcacttgaatcccttacgaagataatctcattgaaagttctggatttatctttcaacaagattggagctcactcaattgacacaacacggtatatctgctcgtctccattctcacacaaaatggaagcaagtgaagcttttgaagcgtaccagaagttgcaagcaaggagaacttcagaactattgtcatgatgctcattccttgtctaaaatggtttgatggtgaagatgtcaattaaaatggagttgagcaatgatagtgtcaaggctcacgctgtaaaccattttttgctagaaggcattgatttgcatcatatgtactgctatatttgtttaaaaaactcggccggtaggggaaagaccgtccccctcctgtattatattaataagaagttcaatcgcagccccgatcgagtaagatcacg

SEQ ID NO: 53359 - DNA, 2454 bp, Zea Mays
aactattactagtagattattcaaacacccgtctagttctacttgttggaagggtgccgctctccacgagatccaaacccccgcacccgcggcgccggcgacgcagggaggaggcgatgcacggccgcccgcggcgaccggccaagctcgaggacgaggaggcggcgtcagcgaaagccgccaagcttcgggacctccaggcccaggtcctgcacaatcaccatggccgcacgtacacaaaggaggcaattgggctgagcttcaagctgctcgagataaatccagaggcctacaccgcatggaactaccggaagcttgcgtttcagcacaatgtcaaggagctttctgatccggaggccatcaagtctgctgttgatgatgagctgagagtggttgaggttgctttaaggcaaaacccaaaatcctatggagcttggtatcaccgtaagtggttgctatgccaaaagctagcgcccgtggatttcaaacgtgagtttggcctcttggataaactgttgaaggtggacgccaggaattttcatggatggaactacagaaggttccttgcaagattcatgggtgtgtcagatgaggaggagctaaagtatactatggataaaatcagcgacaacttcagtaattactcagcatggcataatctatacttctgtccaacctactgatccagcagagcaaaggttttgagtcaaagcagaagattttttccgaggagtttgaacttgttactcaagctctttttacagatccaagtgaccaaagtggatggttctatcacctttggcttttagctcaaacgtcttgtccagataacccccagctgattgcttcatggccttctaatgctgcaaagctcagttcctctttgatcaaggaaaaagctgagcagcacagacagtcatccatcttgtcaaggactgtacccattgttctttattttaatgagcctgtcaaaggattaaatcaatcaagtgttaacttaaagtctgatttggagttcagtaaggatattatatggaggcccctcacaatggcagactctgggtattctaactgttgggccacagatctccagattataaatgaatgtagcagtttgcaggaatattctgttgaagtgagcataccctgctcgaatggcattgtatctagaagtggctctaactacaattgtcctgtgcattttacatttggcattgaattgatcagcaacgatccagtacagggtttagatatgtttgataagccagttgcctggaattgctcagaatcattccagcctcatgggaaccgtgatcctatcccttttgatctgctaaagattactagtgccttgatcgagcatgactcaaattggcattttgaaagactatctgaggaaatagatcttttcagagagttacctgatgacaacagcaagtttgggaagttgacattagcccggttattgcttgcttgttctgctataaaatctcgtggaagatctctaattgaaaggaagggatactgtgaagaggcactggggctcttcactgacttgattcacctggatccatctcataagcagtactatgaggatgaacggagcttagtcctgatggataaagtaacataaagaatgtttgaagagacttagcttagggataatttgctgctgtctaacctaaccttttcttgcagttaacatgtgacatggagactttcatgaagcactgttcagttcaggttcaaccaaattcagctcccctgaatcatgtgcagctttgcagattatctctaacatgcattggatttgctgaacgcctgttgtgggttcaaatgctggacctaagccataatagtctgagatcagtcgaaggattggaggctttgcagcaccttgtgttcttgaacatcagcaacaaccagatcagtggtttcacagcacttgaatcccttacgaagataatctcattgaaagttctggatttatctttcaacaagattggagctcactcaattgacacaacacggtatatctgctcgtctccattctcacacaaaatggaagcaagtgaagcttttgaagcgtaccagaaggtaaatatcaacgtggaggaatactgggatgccatactgtttttcagatctctgaagttggcacagcttgatataaaaggaaatgcagttgcaagcaaggagaacttcagaactattgtcatgatgctcattccttgtctaaaatggtttgatggtgaagatgtcaattaaaatggagttgagcaatgatagtgtcaaggctcacgctgtaaaccattttttgctagaaggcattgatttgcatcatatgtactgctatatttgtttaaaaaactcggccggtaggggaaagaccgtccccctcctgtattatattaataagaagttcaatcgcagccccgatcgagtaagatcacg

SEQ ID NO: 53360 - DNA, 1665 bp, Zea Mays
tgctgaaagcctgaaactgctcaagtagcgcgcaacgacaagagcaacgaggaacatcagttaggactacctccacaaattgagcatcggttaccccattgcatcgtcctcttcggcggcgctggcgcccacaccaccgaaccctcttccagcttccttccacccgagcacgccggtcacccatcatcgccgaagccctccccctcctgcttcagctgtgctggtattagattagatcaaagtggaccgcgtcgggttgggtccagtcctttcgctgcggtgcggaaggcaatggtggggttgggatggagagtcggctcaaaggtgcagagatggggccggagctgcctccggggtttctcttctgctgcagttccgtctcagctggagaatgtcggattcatcggacttgggaacatgggttcccatatggcaaggaacttgatcacggctggatataaagtgactgttcatgatataaatgaaaattctatgaagaaattctcagaggatggaatccctacaaaacagtctccacttgaagtatcagaatcgagtgatgtcataattaccatgcttccttcatctactcatgttttagaagtatacaatggacccaatggcttgctttgtcggggcgaacgcttgggcccatggttatacatagattcatcaacagttgatccacaaacatcaagaaagatatcgacagccatctcaagatgccttttaaaagaaaagaaaggttacgctgaaagccctaagattctggatgctccggtgtctggaggtgttcctgctgcagaagctggcaagctaactttcatggtgggtggtcttgaggaagcgtatttagcagccaagcccttacttcaagcaatgggggaaaaaacaatctactgtggtggtgctggaaatggctcggctgcaaagatatgtaacaacatggcaatggcaatcagcatgcttggggtctccgaggcctttgctcttggccagaaccttgggatcaaagcaactactctcacagacattttcaactgttcaagcgctcgctgctggacgatacatataatccagttcctggagttatggaaggtgtaccatcatcaaggaactatagtggtggtttcacttccaaattaatggccaaagatttggatttggccatggcttctgcatctggagttggcttcaaatgccccatgggttccaatgcacttgaaatttaccgaaaactatgcgaggatggttgtgaactcaaagacttctcgtgtgcattccgacattactattctggcaagaatgaagagtgatcttggatacgctgcaaaatttcctcctttcgaaatcaataaaacagcaaataaagttaggacctgattatgtcccatgaattgaaacattgaaaccaatatctagaaagtgtgtttccttgtttcattattagattactttctaattggtctaaattcctggaaccgaacaggaccttattggaaagtttacagtataagctgtgtagcattgtaccagagtccagagacatggtggttgtttgttgaccagtggtgatgatctgatcatctggttaaaactgttattggttttgcttctaggcaatcaagtgatactgttctgggacagattcaaccatgagccaag

SEQ ID NO: 53361 - DNA, 1736 bp, Zea Mays
tgctgaaagcctgaaactgctcaagtagcgcgcaacgacaagagcaacgaggaacatcagttaggactacctccacaaattgagcatcggttaccccattgcatcgtcctcttcggcggcgctggcgcccacaccaccgaaccctcttccagcttccttccacccgagcacgccggtcacccatcatcgccgaagccctccccctcctgcttcagctgtgctggtattagattagatcaaagtggaccgcgtcgggttgggtccagtcctttcgctgtagattgcggttgcagattcctctcctgcgaggcacgagctgagtcctatccctatccgcccttgttgcagcggtgcggaaggcaatggtggggttgggatggagagtcggctcaaaggtgcagagatggggccggagctgcctccggggtttctcttctgctgcagttccgtctcagctggagaatgtcggattcatcggacttgggaacatgggttcccatatggcaaggaacttgatcacggctggatataaagtgactgttcatgatataaatgaaaattctatgaagaaattctcagaggatggaatccctacaaaacagtctccacttgaagtatcagaatcgagtgatgtcataattaccatgcttccttcatctactcatgttttagaagtatacaatggacccaatggcttgctttgtcggggcgaacgcttgggcccatggttatacatagattcatcaacagttgatccacaaacatcaagaaagatatcgacagccatctcaagatgccttttaaaagaaaagaaaggttacgctgaaagccctaagattctggatgctccggtgtctggaggtgttcctgctgcagaagctggcaagctaactttcatggtgggtggtcttgaggaagcgtatttagcagccaagcccttacttcaagcaatgggggaaaaaacaatctactgtggtggtgctggaaatggctcggctgcaaagatatgtaacaacatggcaatggcaatcagcatgcttggggtctccgaggcctttgctcttggccagaaccttgggatcaaagcaactactctcacagacattttcaactgttcaagcgctcgctgctggacgatacatataatccagttcctggagttatggaaggtgtaccatcatcaaggaactatagtggtggtttcacttccaaattaatggccaaagatttggatttggccatggcttctgcatctggagttggcttcaaatgccccatgggttccaatgcacttgaaatttaccgaaaactatgcgaggatggttgtgaactcaaagacttctcgtgtgcattccgacattactattctggcaagaatgaagagtgatcttggatacgctgcaaaatttcctcctttcgaaatcaataaaacagcaaataaagttaggacctgattatgtcccatgaattgaaacattgaaaccaatatctagaaagtgtgtttccttgtttcattattagattactttctaattggtctaaattcctggaaccgaacaggaccttattggaaagtttacagtataagctgtgtagcattgtaccagagtccagagacatggtggttgtttgttgaccagtggtgatgatctgatcatctggttaaaactgttattggttttgcttctaggcaatcaagtgatactgttctgggacagattcaaccatgagccaag

SEQ ID NO: 53362 - DNA, 1503 bp, Zea Mays
tgctgaaagcctgaaactgctcaagtagcgcgcaacgacaagagcaacgaggaacatcagttaggactacctccacaaattgagcatcggttaccccattgcatcgtcctcttcggcggcgctggcgcccacaccaccgaaccctcttccagcttccttccacccgagcacgccggtcacccatcatcgccgaagccctccccctcctgcttcagctgtgctggtattagattagatcaaagtggaccgcgtcgggttgggtccagtcctttcgctgcggtgcggaaggcaatggtggggttgggatggagagtcggctcaaaggtgcagagatggggccggagctgcctccggggtttctcttctgctgcagttccgtctcagctggaggtgactatccgtatccacgaaatgaaaattctatgaagaaattctcagaggatggaatccctacaaaacagtctccacttgaagtatcagaatcgagtgatgtcataattaccatgcttccttcatctactcatgttttagaagtatacaatggacccaatggcttgctttgtcggggcgaacgcttgggcccatggttatacatagattcatcaacagttgatccacaaacatcaagaaagatatcgacagccatctcaagatgccttttaaaagaaaagaaaggttacgctgaaagccctaagattctggatgctccggtgtctggaggtgttcctgctgcagaagctggcaagctaactttcatggctgcaaagatatgtaacaacatggcaatggcaatcagcatgcttggggtctccgaggcctttgctcttggccagaaccttgggatcaaagcaactactctcacagacattttcaactgttcaagcgctcgctgctggagtagcgatacatataatccagttcctggagttatggaaggtgtaccatcatcaaggaactatagtggtggtttcacttccaaattaatggccaaagatttggatttggccatggcttctgcatctggagttggcttcaaatgccccatgggttccaatgcacttgaaatttaccgaaaactatgcgaggatggttgtgaactcaaagacttctcgtgtgcattccgacattactattctggcaagaatgaagagtgatcttggatacgctgcaaaatttcctcctttcgaaatcaataaaacagcaaataaagttaggacctgattatgtcccatgaattgaaacattgaaaccaatatctagaaagtgtgtttccttgtttcattattagattactttctaattggtctaaattcctggaaccgaacaggaccttattggaaagtttacagtataagctgtgtagcattgtaccagagtccagagacatggtggttgtttgttgaccagtggtgatgatctgatcatctggttaaaactgttattggttttgcttctaggcaatcaagtgatactgttctgggacagattcaaccatgagccaag

SEQ ID NO: 53363 - DNA, 1667 bp, Zea Mays
tgctgaaagcctgaaactgctcaagtagcgcgcaacgacaagagcaacgaggaacatcagttaggactacctccacaaattgagcatcggttaccccattgcatcgtcctcttcggcggcgctggcgcccacaccaccgaaccctcttccagcttccttccacccgagcacgccggtcacccatcatcgccgaagccctccccctcctgcttcagctgtgctggtattagattagatcaaagtggaccgcgtcgggttgggtccagtcctttcgctgattgcggttgcagattcctctcctgcgaggcacgagctgagtcctatccctatccgcccttgttgcagcggtgcggaaggcaatggtggggttgggatggagagtcggctcaaaggtgcagagatggggccggagctgcctccggggtttctcttctgctgcagttccgtctcagctggaggtgactatccgtatccacgaaatgaaaattctatgaagaaattctcagaggatggaatccctacaaaacagtctccacttgaagtatcagaatcgagtgatgtcataattaccatgcttccttcatctactcatgttttagaagtatacaatggacccaatggcttgctttgtcggggcgaacgcttgggcccatggttatacatagattcatcaacagttgatccacaaacatcaagaaagatatcgacagccatctcaagatgccttttaaaagaaaagaaaggttacgctgaaagccctaagattctggatgctccggtgtctggaggtgttcctgctgcagaagctggcaagctaactttcatggtgggtggtcttgaggaagcgtatttagcagccaagcccttacttcaagcaatgggggaaaaaacaatctactgtggtggtgctggaaatggctcggctgcaaagatatgtaacaacatggcaatggcaatcagcatgcttggggtctccgaggcctttgctcttggccagaaccttgggatcaaagcaactactctcacagacattttcaactgttcaagcgctcgctgctggagtagcgatacatataatccagttcctggagttatggaaggtgtaccatcatcaaggaactatagtggtggtttcacttccaaattaatggccaaagatttggatttggccatggcttctgcatctggagttggcttcaaatgccccatgggttccaatgcacttgaaatttaccgaaaactatgcgaggatggttgtgaactcaaagacttctcgtgtgcattccgacattactattctggcaagaatgaagagtgatcttggatacgctgcaaaatttcctcctttcgaaatcaataaaacagcaaataaagttaggacctgattatgtcccatgaattgaaacattgaaaccaatatctagaaagtgtgtttccttgtttcattattagattactttctaattggtctaaattcctggaaccgaacaggaccttattggaaagtttacagtataagctgtgtagcattgtaccagagtccagagacatggtggttgtttgttgaccagtggtgatgatctgatcatctggttaaaactgttattggttttgcttctaggcaatcaagtgatactgttctgggacagattcaaccatgagccaag

SEQ ID NO: 53364 - DNA, 1676 bp, Zea Mays
tgctgaaagcctgaaactgctcaagtagcgcgcaacgacaagagcaacgaggaacatcagttaggactacctccacaaattgagcatcggttaccccattgcatcgtcctcttcggcggcgctggcgcccacaccaccgaaccctcttccagcttccttccacccgagcacgccggtcacccatcatcgccgaagccctccccctcctgcttcagctgtgctggtattagattagatcaaagtggaccgcgtcgggttgggtccagtcctttctagattgcggttgcagattcctctcctgcgaggcacgagctgagtcctatccctatccgcccttgttgcagcggtgcggaaggcaatggtggggttgggatggagagtcggctcaaaggtgcagagatggggccggagctgcctccggggtttctcttctgctgcagttccgtctcagctggagaatgtcggattcatcggacttgggaacatgggttcccatatggcaaggaacttgatcacggctggatataaagtgactgttcatgatatgtaaattcctgccaatccttatactactgttcatgatatgcgtcacagagttcattgtttttttcccttccagttcaaaactggtttcttcttatatctcagcttaatggactgttcttgtttgataaacattgaatctatctatcagaaatgaaaattctatgaagaaattctcagaggatggaatccctacaaaacagtctccacttgaagtatcagaatcgagtgatgtcataattaccatgcttccttcatctactcatgttttagaagtatacaatggacccaatggcttgctttgtcggggcgaacgcttgggcccatggttatacatagattcatcaacagttgatccacaaacatcaagaaagatatcgacagccatctcaagatgccttttaaaagaaaagaaaggtaagttccaccatataacagtaaagacatagggcctgtttgtttcagcttatagattatataatctagattataatctagattatataatctggattataatctatggagattataatctgtatgtagctgtctggtagttcagattatacgtatgcagattaatgttctgtgagacacaatgacaacaatgctcttgtttgtttagttgtcttctttttttacggtttggcattccatcgattcatacaactatttgcaaaataggaaattaaaattatgccaaatacaccattggaaagctacaaatttcgtttgtaaacatcagtcatagagactggtatacaatggcagtctttataagcatttcatcgattatgtggcgcacacataaaccatatagtgagcagcatcaatggagctagctcctatggtaaatagtccctgctgcgacatcaatggatcatcaaaagggagttgtgtttgctcgtcggggttgcgtttggtcgccggagcaacgcttgctcgcggcgaggacaccggagctgcgttcaggctgcggcgtgaaagcacgcccagaggcgacgccgccattcccaaggctgcacccgctccaccgttgccgaagcattccgcagagccattgtagatgccgcgctcgccgacgccacaatgttccccacgtgaagaggatcaacccaggagagggactcctg

SEQ ID NO: 53365 - DNA, 1529 bp, Zea Mays
tgctgaaagcctgaaactgctcaagtagcgcgcaacgacaagagcaacgaggaacatcagttaggactacctccacaaattgagcatcggttaccccattgcatcgtcctcttcggcggcgctggcgcccacaccaccgaaccctcttccagcttccttccacccgagcacgccggtcacccatcatcgccgaagccctccccctcctgcttcagctgtgctggtattagattagatcaaagtggaccgcgtcgggttgggtccagtcctttcgctgattgcggttgcagattcctctcctgcgaggcacgagctgagtcctatccctatccgcccttgttgcagcggtgcggaaggcaatggtggggttgggatggagagtcggctcaaaggtgcagagatggggccggagctgcctccggggtttctcttctgctgcagttccgtctcagctggagaatgtcggattcatcggacttgggaacatgggttcccatatggcaaggaacttgatcacggctggatataaagtgactgttcatgatataaatgaaaattctatgaagaaattctcagaggatggaatccctacaaaacagtctccacttgaagtatcagaatcgagtgatgtcataattaccatgcttccttcatctactcatgttttagaagtatacaatggacccaatggcttgctttgtcggggcgaacgcttgggcccatggttatacatagattcatcaacagttgatccacaaacatcaagaaagatatcgacagccatctcaagatgccttttaaaagaaaagaaaggtaagttccaccatataacagtaaagacatagggcctgtttgtttcagcttatagattatataatctagattataatctagattatataatctggattataatctatggagattataatctgtatgtagctgtctggtagttcagattatacgtatgcagattaatgttctgtgagacacaatgacaacaatgctcttgtttgtttagttgtcttctttttttacggtttggcattccatcgattcatacaactatttgcaaaataggaaattaaaattatgccaaatacaccattggaaagctacaaatttcgtttgtaaacatcagtcatagagactggtatacaatggcagtctttataagcatttcatcgattatgtggcgcacacataaaccatatagtgagcagcatcaatggagctagctcctatggtaaatagtccctgctgcgacatcaatggatcatcaaaagggagttgtgtttgctcgtcggggttgcgtttggtcgccggagcaacgcttgctcgcggcgaggacaccggagctgcgttcaggctgcggcgtgaaagcacgcccagaggcgacgccgccattcccaaggctgcacccgctccaccgttgccgaagcattccgcagagccattgtagatgccgcgctcgccgacgccacaatgttccccacgtgaagaggatcaacccaggagagggactcctg

SEQ ID NO: 53366 - DNA, 227 bp, Zea Mays
ttttttttttttttatttcttttttttttttttttaaacgaatgtcacatcatttatatataatagagtcctgtacaaaatagttaaataattatatcatataaagacagcgatccggcaacccaaagttgactgggagacggcggcctagacctctcacgaactcatcatagcatcctccatacgcatcatcctgtggtacctgttcttgacctgtgggagtgtga

SEQ ID NO: 53367 - DNA, 1525 bp, Zea Mays
catcatttaactcattttgttcaacatctgcagagttaataactgtgtaccatcgttctgtggcctgtgtagataatagctattgcggagcacattaacaatgagtggttcaagaaggtttatcaacctcccagatttgaaacaacagatgttattatggacgcaactttgatcctgaatgcgcacaactttagttgttctgtctgtttttagaggattcatttttagataggttgaatattgtcaaaatttggttgttcgaaatggttatgattgttgagttgattcttgatagcattactaaacaataacctatgcgtgcacaagtgtccctcattgcaatgcacgggcatatacctatcttgtcactgagtttgattctttggtgccaggtgcttctaatatcaatgtcactgacagccagatcccactgactgtgccaaactctcacattggaagagatgttgttgttcacgctgctcctggtgatcttagaaaggagctattggtttttataagtgtgcaactaaagatcagtgactatatcttggttttaggccatcgaatctgtttcaagttccagcaatggagcagtgaagcacacattcatgaggattgacagatgaatcgacgagagccatggaagcagcctttgctcaagaaaggtgacatcgtggtcgtggagatctccaacctctatcaggtggctatgctggtcaatgatctgtgcaggtcgaagagcgtgaacgacctatcctccccatcatgccaaacccacaaggacgacgacgacaacaacctagaggacgaggatgagtggtaggacgggaaaaagtttaatgcggtggccaccttcaagatcctcggcgaggttgacattgctcaccttagttagactttagaaacccagtcagctgcttctgcgttggtggtgctgagttcgtgcatttcagagtgttcgctgctactgttagtgatactgctcccctttttggttgttgccacgagcttagatttcataagctaaccgccgtcgttagtgaaacagctcattatgatcctaattgttctgtaaattttcaagtttaaatagccatgcctattttactgattgaacagatgcaacacgttattgtgtaccatactttgtgtaagtcgtcgacttggttgacttgtacctgtggtacgtagcatgctatctgtaatactttgtcaactggtgtgttctcatttatgtcggcgcttgttccgtgagtttcattcatgtgagtttttattttgtctaggctcccctcattgtcttatgtgattctgcatgtattcagatctcagatacccacatcatatcgaggataaagttctcaaatgaaattgtgttagtaatattgattctatatcacccccatgcgtgaaaatagcattacaaacttggaactaagatattctaaacaaccattgaaccttggtcatgttttccaattagcatctaaaaagtactttaacaactagctaagagtacttctat

SEQ ID NO: 53368 - DNA, 1468 bp, Zea Mays
catcatttaactcattttgttcaacatctgcagagttaataactgtgtaccatcgttctgtggcctgtgtagataatagctattgcggagcacattaacaatgagtggttcaagaaggtttatcaacctcccagatttgaaacaacagatgttattatggacgcaactttgatcctgaatgcgcacaactttagttgttctgtctgtttttagaggattcatttttagataggttgaatattgtcaaaatttggttgttcgaaatggttatgattgttgagttgattcttgatagcattactaaacaataacctatgcgtgcacaagtgtccctcattgcaatgcacgggcatatacctatcttgtcactgagtttgattctttggtgccaggtgcttctaatatcaatgtcactgacagccagatcccactgactgtgccaaactctcacattggaagagatgttgttgttcacgctgctcctggtgatcttagaaagggccatcgaatctgtttcaagttccagcaatggagcagtgaagcacacattcatgaggattgacagatgaatcgacgagagccatggaagcagcctttgctcaagaaaggtgacatcgtggtcgtggagatctccaacctctatcaggtggctatgctggtcaatgatctgtgcaggtcgaagagcgtgaacgacctatcctccccatcatgccaaacccacaaggacgacgacgacaacaacctagaggacgaggatgagtggtaggacgggaaaaagtttaatgcggtggccaccttcaagatcctcggcgaggttgacattgctcaccttagttagactttagaaacccagtcagctgcttctgcgttggtggtgctgagttcgtgcatttcagagtgttcgctgctactgttagtgatactgctcccctttttggttgttgccacgagcttagatttcataagctaaccgccgtcgttagtgaaacagctcattatgatcctaattgttctgtaaattttcaagtttaaatagccatgcctattttactgattgaacagatgcaacacgttattgtgtaccatactttgtgtaagtcgtcgacttggttgacttgtacctgtggtacgtagcatgctatctgtaatactttgtcaactggtgtgttctcatttatgtcggcgcttgttccgtgagtttcattcatgtgagtttttattttgtctaggctcccctcattgtcttatgtgattctgcatgtattcagatctcagatacccacatcatatcgaggataaagttctcaaatgaaattgtgttagtaatattgattctatatcacccccatgcgtgaaaatagcattacaaacttggaactaagatattctaaacaaccattgaaccttggtcatgttttccaattagcatctaaaaagtactttaacaactagctaagagtacttctat

SEQ ID NO: 53369 - DNA, 1101 bp, Zea Mays
cttgatcctaatgctaacactatgagtgcttctaatatcaatgtcactgacagccagatcccactgactgtgccaaactctcacattggaagagatgttgttgttcacgctgctcctggtgatcttagaaagggccatcgaatctgtttcaagttccagcaatggagcagtgaagcacacattcatgaggattgacagatgaatcgacgagagccatggaagcagcctttgctcaagaaaggtgacatcgtggtcgtggagatctccaacctctatcaggtggctatgctggtcaatgatctgtgcaggtcgaagagcgtgaacgacctatcctccccatcatgccaaacccacaaggacgacgacgacaacaacctagaggacgaggatgagtggtaggacgggaaaaagtttaatgcggtggccaccttcaagatcctcggcgaggttgacattgctcaccttagttagactttagaaacccagtcagctgcttctgcgttggtggtgctgagttcgtgcatttcagagtgttcgctgctactgttagtgatactgctcccctttttggttgttgccacgagcttagatttcataagctaaccgccgtcgttagtgaaacagctcattatgatcctaattgttctgtaaattttcaagtttaaatagccatgcctattttactgattgaacagatgcaacacgttattgtgtaccatactttgtgtaagtcgtcgacttggttgacttgtacctgtggtacgtagcatgctatctgtaatactttgtcaactggtgtgttctcatttatgtcggcgcttgttccgtgagtttcattcatgtgagtttttattttgtctaggctcccctcattgtcttatgtgattctgcatgtattcagatctcagatacccacatcatatcgaggataaagttctcaaatgaaattgtgttagtaatattgattctatatcacccccatgcgtgaaaatagcattacaaacttggaactaagatattctaaacaaccattgaaccttggtcatgttttccaattagcatctaaaaagtactttaacaactagctaagagtacttctat

SEQ ID NO: 53370 - DNA, 1158 bp, Zea Mays
cttgatcctaatgctaacactatgagtgcttctaatatcaatgtcactgacagccagatcccactgactgtgccaaactctcacattggaagagatgttgttgttcacgctgctcctggtgatcttagaaaggagctattggtttttataagtgtgcaactaaagatcagtgactatatcttggttttaggccatcgaatctgtttcaagttccagcaatggagcagtgaagcacacattcatgaggattgacagatgaatcgacgagagccatggaagcagcctttgctcaagaaaggtgacatcgtggtcgtggagatctccaacctctatcaggtggctatgctggtcaatgatctgtgcaggtcgaagagcgtgaacgacctatcctccccatcatgccaaacccacaaggacgacgacgacaacaacctagaggacgaggatgagtggtaggacgggaaaaagtttaatgcggtggccaccttcaagatcctcggcgaggttgacattgctcaccttagttagactttagaaacccagtcagctgcttctgcgttggtggtgctgagttcgtgcatttcagagtgttcgctgctactgttagtgatactgctcccctttttggttgttgccacgagcttagatttcataagctaaccgccgtcgttagtgaaacagctcattatgatcctaattgttctgtaaattttcaagtttaaatagccatgcctattttactgattgaacagatgcaacacgttattgtgtaccatactttgtgtaagtcgtcgacttggttgacttgtacctgtggtacgtagcatgctatctgtaatactttgtcaactggtgtgttctcatttatgtcggcgcttgttccgtgagtttcattcatgtgagtttttattttgtctaggctcccctcattgtcttatgtgattctgcatgtattcagatctcagatacccacatcatatcgaggataaagttctcaaatgaaattgtgttagtaatattgattctatatcacccccatgcgtgaaaatagcattacaaacttggaactaagatattctaaacaaccattgaaccttggtcatgttttccaattagcatctaaaaagtactttaacaactagctaagagtacttctat

SEQ ID NO: 53371 - DNA, 2068 bp, Zea Mays
cgagaccctagactctcgattctccctccacacccgccgccacccgcccaccctctcttcctccacgcgatctagcaaccgctcccaccgactcgttttctctctcgccaccccgatttgtctgccgccatggcatcggcatcgcgcgcgctcctcctctcccgtgcgctctagcctggcgtcgtgtaccttcgcatccccggccgcctacgctcgatcgctgcggacgtgagcctacttgcaacccagagagagatcgaggcgatatgcaatgggcacgaggctgccaccagggcggaagaggacgaagagcaggaaccgatgcagaagcggtgaacggggaggaaggagcaggatggggaaaactcagaaggcaggtgaagcctccagggcctggtggagacattcacgtcgcggtcggagtcggtgctgggaggctaccaccaacctcgaggacctcggctcggggttccgcttcgagacggcagcgctccaggccgtcgccgcacacgctgccccgacgctacccaacgcgttggaggccaccgcgtctgcctcctccaataaagtcaagtccatcggtcaggtcgttgatgacctcaatactgtcgccggtctcctctcgaacctacaagatcgtcgattacgtcgacgtcaagatgaacagcaccgtccacaaggggatgccgcaccagtcgcgtcaggaacaccaacaccaccaggtgtgccatcggcgtcgaaataaacaagcagttttagctgaagtagcactatatcaggcgtcagaatggcaccacatcctccacgagggaggttactgttgcgggagtcttcagcaggtcactcgccacatgcgccttccagcagaccgacaatgaagcgttgcttgctcgctcctcgacgaccaaggagaccgaaaaaactgctagaaaaaggtgcttctaatatcaatgtcactgacagccagatcccactgactgtgccaaactctcacattggaagagatgttgttgttcacgctgctcctggtgatcttagaaaggagctattggtttttataagtgtgcaactaaagatcagtgactatatcttggttttaggccatcgaatctgtttcaagttccagcaatggagcagtgaagcacacattcatgaggattgacagatgaatcgacgagagccatggaagcagcctttgctcaagaaaggtgacatcgtggtcgtggagatctccaacctctatcaggtggctatgctggtcaatgatctgtgcaggtcgaagagcgtgaacgacctatcctccccatcatgccaaacccacaaggacgacgacgacaacaacctagaggacgaggatgagtggtaggacgggaaaaagtttaatgcggtggccaccttcaagatcctcggcgaggttgacattgctcaccttagttagactttagaaacccagtcagctgcttctgcgttggtggtgctgagttcgtgcatttcagagtgttcgctgctactgttagtgatactgctcccctttttggttgttgccacgagcttagatttcataagctaaccgccgtcgttagtgaaacagctcattatgatcctaattgttctgtaaattttcaagtttaaatagccatgcctattttactgattgaacagatgcaacacgttattgtgtaccatactttgtgtaagtcgtcgacttggttgacttgtacctgtggtacgtagcatgctatctgtaatactttgtcaactggtgtgttctcatttatgtcggcgcttgttccgtgagtttcattcatgtgagtttttattttgtctaggctcccctcattgtcttatgtgattctgcatgtattcagatctcagatacccacatcatatcgaggataaagttctcaaatgaaattgtgttagtaatattgattctatatcacccccatgcgtgaaaatagcattacaaacttggaactaagatattctaaacaaccattgaaccttggtcatgttttccaattagcatctaaaaagtactttaacaactagctaagagtacttctat

SEQ ID NO: 53372 - DNA, 1262 bp, Zea Mays
cccgttcgtccattccgcgcgagaccctagactctcgattctccctccacacccgccgccacccgcccaccctctcttcctccacgcgatctagcaaccgctcccaccgactcgttttctctctcgccaccccgatttgtctgccgccatggcatcggcatcgcgcgcgctcctcctctcccgtgcgctctagcctggcgtcgtgtaccttcgcatccccggccgcctacgctcgatcgctgcggacgtgagcctacttgcaacccagagagagatcgaggcgatatgcaatgggcacgaggctgccaccagggcggaagaggacgaagagcaggaaccgatgcagaagcggtgaacggggaggaaggagcaggatggggaaaactcagaaggcaggtgaagcctccagggcctggtggagacattcacgtcgcggtcggagtcggtgctgggaggctaccaccaacctcgaggacctcggctcggggttccgcttcgagacggcagcgctccaggccgtcgccgcacacgctgccccgacgctacccaacgcgttggaggccaccgcgtctgcctcctccaataaagtcaagtccatcggtcaggtcgttgatgacctcaatactgtcgccggtctcctctcgaacctacaagatcgtcgattacgtcgacgtcaagatgaacagcaccgtccacaaggggatgccgcaccagtcgcgtcaggaacaccaacaccaccaggtgtgccatcggcgtcgaaataaacaagcagttttagctgaagtagcactatatcaggcgtcagaatggcaccacatcctccacgagggaggttactgttgcgggagtcttcagcaggtcactcgccacatgcgccttccagcagaccgacaatgaagcgttgcttgctcgctcctcgacgaccaaggagaccgaaaaaactgctagaaaaaggcatgtctcactaactgaaactatacttcttgcgtgaaatatggcaagcttcacatgtgaaaaactaccagttacacaatgaaaaactgtagatttcactgaacatgtgaagcttgaggtgctgaccacgactatgcttttatttatgttcttattttcactcaataaagtattttgttctcatgtccggtgctcttgtgtctactggttataaacaataaatgctatgatggagctaagggtgatctgtggtcatgtggagtgattttctttgtcctcatggcggggtacctcccatttaaagattc

SEQ ID NO: 53373 - DNA, 1001 bp, Zea Mays
ctcaaccgttcgtgtccactgcccacccacgtgcgtcaccccgttcgtccattccgcgcgagaccctagactctcgattctccctccacacccgccgccacccgcccaccctctcttcctccacgcgatctagcaaccgctcccaccgactcgttttctctctcgccaccccgatttgtctgccgccatggcatcggcatcgcgcgcgctcctcctctcccgtgcgctctagcctggcgtcgtgtaccttcgcatccccggccgcctacgctcgatcgctgcggacgtgagcctacttgcaacccagagagagatcgaggcgatatgcaatgggcacgaggctgccaccagggcggaagaggacgaagagcaggaaccgatgcagaagcggtgaacggggaggaaggagcaggatggggaaaactcagaaggcaggtgaagcctccagggcctggtggagacattcacgtcgcggtcggagtcggtgctgggaggctaccaccaacctcgaggacctcggctcggggttccgcttcgagacggcagcgctccaggccgtcgccgcacacgctgccccgacgctacccaacgcgttggaggccaccgcgtctgcctcctccaataaagtcaagtccatcggtcaggtcgttgatgacctcaatactgtcgccggtctcctctcgaacctacaagatcgtcgattacgtcgacgtcaagatgaacagcaccgtccacaaggggatgccgcaccagtcgcgtcaggaacaccaacaccaccaggtgtgccatcggcgtcgaaataaacaagcaggttactgttgcgggagtcttcagcaggtcactcgccacatgcgccttccagcagaccgacaatgaagcgttgcttgctcgctcctcgacgaccaaggagaccgaaaaaactgctagaaaaagggtgatctgtggtcatgtggagtgattttctttgtcctcatggcggggtacctcccatttaaagattc

SEQ ID NO: 53374 - DNA, 1241 bp, Zea Mays
ctcaaccgttcgtgtccactgcccacccacgtgcgtcaccccgttcgtccattccgcgcgagaccctagactctcgattctccctccacacccgccgccacccgcccaccctctcttcctccacgcgatctagcaaccgctcccaccgactcgttttctctctcgccaccccgatttgtctgccgccatggcatcggcatcgcgcgcgctcctcctctcccgtgcgctctagcctggcgtcgtgtaccttcgcatccccggccgcctacgctcgatcgctgcggacgtgagcctacttgcaacccagagagagatcgaggcgatatgcaatgggcacgaggctgccaccagggcggaagaggacgaagagcaggaaccgatgcagaagcggtgaacggggaggaaggagcaggatggggaaaactcagaaggcaggtgaagcctccagggcctggtggagacattcacgtcgcggtcggagtcggtgctgggaggctaccaccaacctcgaggacctcggctcggggttccgcttcgagacggcagcgctccaggccgtcgccgcacacgctgccccgacgctacccaacgcgttggaggccaccgcgtctgcctcctccaataaagtcaagtccatcggtcaggtcgttgatgacctcaatactgtcgccggtctcctctcgaacctacaagatcgtcgattacgtcgacgtcaagatgaacagcaccgtccacaaggggatgccgcaccagtcgcgtcaggaacaccaacaccaccaggtgtgccatcggcgtcgaaataaacaagcaggttactgttgcgggagtcttcagcaggtcactcgccacatgcgccttccagcagaccgacaatgaagcgttgcttgctcgctcctcgacgaccaaggagaccgaaaaaactgctagaaaaaggcatgtctcactaactgaaactatacttcttgcgtgaaatatggcaagcttcacatgtgaaaaactaccagttacacaatgaaaaactgtagatttcactgaacatgtgaagcttgaggtgctgaccacgactatgcttttatttatgttcttattttcactcaataaagtattttgttctcatgtccggtgctcttgtgtctactggttataaacaataaatgctatgatggagctaagggtgatctgtggtcatgtggagtgattttctttgtcctcatggcggggtacctcccatttaaagattc

SEQ ID NO: 53375 - DNA, 1255 bp, Zea Mays
ctcaaccgttcgtgtccactgcccacccacgtgcgtcaccccgttcgtccattccgcgcgagaccctagactctcgattctccctccacacccgccgccacccgcccaccctctcttcctccacgcgatctagcaaccgctcccaccgactcgttttctctctcgccaccccgatttgtctgccgccatggcatcggcatcgcgcgcgctcctcctctcccgtgcgctctagcctggcgtcgtgtaccttcgcatccccggccgcctacgctcgatcgctgcggacgtgagcctacttgcaacccagagagagatcgaggcgatatgcaatgggcacgaggctgccaccagggcggaagaggacgaagagcaggaaccgatgcagaagcggtgaacggggaggaaggagcaggatggggaaaactcagaaggcaggtgaagcctccagggcctggtggagacattcacgtcgcggtcggagtcggtgctgggaggctaccaccaacctcgaggacctcggctcggggttccgcttcgagacggcagcgctccaggccgtcgccgcacacgctgccccgacgctacccaacgcgttggaggccaccgcgtctgcctcctccaataaagtcaagtccatcggtcaggtcgttgatgacctcaatactgtcgccggtctcctctcgaacctacaagatcgtcgattacgtcgacgtcaagatgaacagcaccgtccacaaggggatgccgcaccagtcgcgtcaggaacaccaacaccaccaggtgtgccatcggcgtcgaaataaacaagcaggttactgttgcgggagtcttcagcaggtcactcgccacatgcgccttccagcagaaactataatgcagaccgacaatgaagcgttgcttgctcgctcctcgacgaccaaggagaccgaaaaaactgctagaaaaaggcatgtctcactaactgaaactatacttcttgcgtgaaatatggcaagcttcacatgtgaaaaactaccagttacacaatgaaaaactgtagatttcactgaacatgtgaagcttgaggtgctgaccacgactatgcttttatttatgttcttattttcactcaataaagtattttgttctcatgtccggtgctcttgtgtctactggttataaacaataaatgctatgatggagctaagggtgatctgtggtcatgtggagtgattttctttgtcctcatggcggggtacctcccatttaaagattc

SEQ ID NO: 53376 - DNA, 1422 bp, Zea Mays
aaaagtctctctctttctctctctcctagctagcccccgatctggccctctctctcacgcgctctagaactagaagggcatccgcagaagttgaccacgggtaggagaaggaggaggaggagtagaagcagctccacacctgtacgtagctgccgcgcgccgcctgcctccggggttcaggttccacccgcgcgacgacgagctcgtgctggactacctggccaagaagctcggcggcggcggaggccctgtggtggtgagcatctacggctgccccaccatggtcgacgtcgatctcaacaagtgcgagccctgggaccttcccgacatcgcgtgcattggtggaaaagagtggtatttctacagccttagagatagaaagtatgccactggccagcgtacaaacagagcaactgattcgggatactggaaggccacagggaaagaccgtccaataagccggaaagggttacttgttggtatgcgcaaaacccttgtgttttatcaaggtagagccccaaagggaaagaagaccgagtgggttatgcatgagtttcgcatggaagggcgagatgatcccatgaaattacctttcaaggaggactgggtcttgtgtagagttttctacaagagtagggcaacagttgcaaagccgcccacagagagcagcagcttcaatattgatgcagccacaacttcattgcctccccttattgacaacaacttcaatatctcctttgaccagcctggctcatcatcagtgcagaacctagagggttatgagcaagtgccctgcttctccagtaacccctctcagcagccatcgtcgtcgatgaacgccgcccggctgccgccgtctgccgccatggctgatccggagcagcagatggggaagtcaataatcaaggatgttctcatgagccagtttagcaggttcgaaggcagcgtcaagagggaggcgcctccaagcaatttttctcaggatgggtttgagtacttagctgagagtggcttcacgcagatgtggaattcgttcaattagttgattatgttttataggaagattatatatatattattgttatggagagcgatgcggatcgaaatgcctcgacgataacaggatggatatatagatgagtgctacaagaggcttgggtgtgtgtgcctcctgtgtggtattgcatgtagccgtagtagtagtaggtatatatatacatatagtagcagtaccatctcagtacacatccttcaaaaagaaggagaaatgaaaagagagatatatatatgtctgtatgccctatgccatcaattaatgacgacagatgtgtaaatacattatttgtgtactatggagaaatcagaaggaaaaaaatacagtgcgtacgtgatgacaaaaaacaagaatagaatcttattcat

SEQ ID NO: 53377 - DNA, 1261 bp, Zea Mays
attcagatgatagaatattggatgatttttgtggacaaattgaagagatgcccttaaatgctgacaaccctgaagaagtttctgatatatctgacagtagagacgataattcagatgtgcttcatgttgatattgaagaccgtgaatctagccctctactgtggatgatagctcatcgtcttgttcatctgactcagtgccttcagttactatgaatggatcatataaaggaggtgcctggacaagcgtcagatcctcatccaataagtatatctttgtgagctcctttatctttctataggttggtattgatcatgctgtactgtgattcaagggaaacaacaggaggaataaggatactgaagcacgggcaggatttgcacaaggtggatcatgttcatcgcataatggttttataggctctggcagcaatgcctctggccactcaaaggaaagacacgaaccatcgagttccccgccgaggaggacgaagacgaggacgccgaccggttagcacgctctcaggcgccgggggcggatggggtaattgcctggcagcgggttgtcgtgctgaagcccgacccgccgaaccctaaccctagcgctgatggggaggggatcggaaggcggcgtccgggcaggatgccgccgtcgccgcggcgcttgcgacgacctcgtctttccaggcggcgtacctccacctgcaggccgcccacacgacgttcctgccggatgcggacgccgccgctgtgtcgcacctccggaggctgtcggagctcaagcggatcgcgaggagcgggccagtgggcccgcccgtgccggacggtggttgggccctcacggcgcacctcgaggtccaagtgcgcgagaaccaggcactgctgcgggtcgttcgacgccgtggtgaaccgcctacaggccgcgctcgacgtcaaggccgccgcgctgtggctggacctcgaggcgctcgacgacgccaacgcgcggctcgtgggctgcctcgaccgcacgctcgcgcctccatcggacggctccgcaatccgaatcacgcacgcaacctcggcggctccgcgccgtgaatccgcgccgaatcagaggcctaaatggtggatcccgctgaagaaggatccgttgtggtgcggcacccgatgtggccgtgcggttcgcggcagagcggtcgcagcgggctttgcgggcgtgcggagcggtcaaggcgggcatgcgagcgcttcgcggcgggcgtgcagagcggtcaaggcgg

SEQ ID NO: 53378 - DNA, 1412 bp, Zea Mays
aaggaactggaataatgtaagataattaatcaccctctaatagcaaccttgccagatccttcaatgatctaaacaagtaaacatccgcacgtcaatacttgtgttggcagacatctaagctggagcaatatgtgctcaaaaacataaatgtaatatttctctaaatttgaacagtacaggacctccattagtaaaagcatgaaactgacaagtgttgccacatttacatcaataaggaaataattatggaccacagtcattcagatgatagaatattggatgatttttgtggacaaattgaagagatgcccttaaatgctgacaaccctgaagaagtttctgattcagtgccttcagttactatgaatggatcatataaaggaggtgcctggacaagcgtcagatcctcatccaataagtatatctttgtgagctcctttatctttctataggttggtattgatcatgctgtactgtgattcaagggaaacaacaggaggaataaggatactgaagcacgggcaggatttgcacaaggtggatcatgttcatcgcataatggttttataggctctggcagcaatgcctctggccactcaaaggaaagacacgaaccatcgagttccccgccgaggaggacgaagacgaggacgccgaccggttagcacgctctcaggcgccgggggcggatggggtaattgcctggcagcgggttgtcgtgctgaagcccgacccgccgaaccctaaccctagcgctgatggggaggggatcggaaggcggcgtccgggcaggatgccgccgtcgccgcggcgcttgcgacgacctcgtctttccaggcggcgtacctccacctgcaggccgcccacacgacgttcctgccggatgcggacgccgccgctgtgtcgcacctccggaggctgtcggagctcaagcggatcgcgaggagcgggccagtgggcccgcccgtgccggacggtggttgggccctcacggcgcacctcgaggtccaagtgcgcgagaaccaggcactgctgcgggtcgttcgacgccgtggtgaaccgcctacaggccgcgctcgacgtcaaggccgccgcgctgtggctggacctcgaggcgctcgacgacgccaacgcgcggctcgtgggctgcctcgaccgcacgctcgcgcctccatcggacggctccgcaatccgaatcacgcacgcaacctcggcggctccgcgccgtgaatccgcgccgaatcagaggcctaaatggtggatcccgctgaagaaggatccgttgtggtgcggcacccgatgtggccgtgcggttcgcggcagagcggtcgcagcgggctttgcgggcgtgcggagcggtcaaggcgggcatgcgagcgcttcgcggcgggcgtgcagagcggtcaaggcgg

SEQ ID NO: 53379 - DNA, 2353 bp, Zea Mays
aaatgttagtgtgttgtccgagatgtcgatgagcctgtagcatcctcgatgggcacctgaaagcgagatacattgattgaatcactattacaaccaattggctatttggtaataagtttctatctctaatcctgattattctagcccatggaccatggtagcctataaatactttgaaccatggtagcctataaatactttgatttactatccattacagacctaccatgaagagagttgtgctagcagaaaaaaagcaggaaggtggatgcaacataaatgaaggccctggcaatctgcccacttcttctcattgtatatacttcagcatcaaaagtagacattgtgctcaagcaaccaaggaagtcggttgtattccactacgaatagttgtcgatcgctttgtatctacctgtaagaaaaattaaataaatcaggtgtaaatgctgatgtatggaagagtcaatataccaaccgcaaacaatgaatctgtatgaaaaaatgttcgctcataccactttggatgttatagcaagaactgccattatgcttgcagcaagaacattggctaccagggtcctagtgggcaaccatttcaaggatctctatttgccaattccatggccattgagtgttgccaggtaccagcataaccaaacacctggaggtgctaccgaacagcccagcaagactatgcatctttactacagtcaacacaatgctcagaatccaaaagaaagacaccaaaattatcatcactgacaacatgagttagtacatataaaatccacactggtttctcttaaattccttgactcaaacttgttaaaaacgattatgcataccatatttagatggaagatcagggtaaattagggtttggtctgaggtgagtgccaagcagtctaggccaaacaacttttggagtccataccttgtgaatacctgattagttattaaaaacttaagtgctcctaaggaactggaataatgtaagataattaatcaccctctaatagcaaccttgccagatccttcaatgatctaaacaagtaaacatccgcacgtcaatacttgtgttggcagacatctaagctggagcaatatgtgctcaaaaacataaatgtaatatttctctaaatttgaacagtacaggacctccattagtaaaagcatgaaactgacaagtgttgccacatttacatcaataaggaaataattatggaccacagtcattcagatgatagaatattggatgatttttgtggacaaattgaagagatgcccttaaatgctgacaaccctgaagaagtttctgatatatctgacagtagagacgataattcagatgtgcttcatgttgatattgaagaccgtgaatctagacctctactgtggatgatagctcatcgtcttgttcatctgactcagtgccttcagttactatgaatggatcatataaaggaggtgcctggacaagcgtcagatcctcatccaataagtatatctttgtgagctcctttatctttctataggttggtattgatcatgctgtacatcgagttccccgccgaggaggacgaagacgaggacgccgaccggttagcacgctctcaggcgccgggggcggatggggtaattgcctggcagcgggttgtcgtgctgaagcccgacccgccgaaccctaaccctagcgctgatggggaggggatcggaaggcggcgtccgggcaggatgccgccgtcgccgcggcgcttgcgacgacctcgtctttccaggcggcgtacctccacctgcaggccgcccacacgacgttcctgccggatgcggacgccgccgctgtgtcgcacctccggaggctgtcggagctcaagcggatcgcgaggagcgggccagtgggcccgcccgtgccggacggtggttgggccctcacggcgcacctcgaggtccaagtgcgcgagaaccaggcactgctgcgggtcgttcgacgccgtggtgaaccgcctacaggccgcgctcgacgtcaaggccgccgcgctgtggctggacctcgaggcgctcgacgacgccaacgcgcggctcgtgggctgcctcgaccgcacgctcgcgcctccatcggacggctccgcaatccgaatcacgcacgcaacctcggcggctccgcgccgtgaatccgcgccgaatcagaggcctaaatggtggatcccgctgaagaaggatccgttgtggtgcggcacccgatgtggccgtgcggttcgcggcagagcggtcgcagcgggctttgcgggcgtgcggagcggtcaaggcgggcatgcgagcgcttcgcggcgggcgtgcagagcggtcaaggcgg

SEQ ID NO: 53380 - DNA, 1789 bp, Zea Mays
ctctgatgtaacatggttcaactgttgtatcctgcaaaataaagaaagaatgttgatgctcgatcttactttatgaccttggaatactgggaagatttattttgtaagctaaatgagatgagaagatataggagaatagttgggtctcttgcgggctcttgtttatcagctgccatcccacttctctcttccaataaggaaacagcatgccttgtggcccttgacattgtggagagtgctgctatatctattgccaatgttgaggaggcttataagtgtgaatgtcaaagcaaaggagtcattgaggaggccatccagttttgttcatttgacgagcttcttgatggtacagatgccaccgaagatgttgatgaaaataggctactcccagcaatgaacaaactgtggccttacttggttatctgtctaaggaacaagatctcagtgccggttgttaggaagtgcaccgaaatgttgaggcgagcaatttgcatatctggcggcgatttttatgtacgcaggtttcataaggatggacctattgtttggaggttgctggctttatctccattccgacgtctgtcaaagatggatgaaaaagcaatcattttaccatatagggatacctcacttaactcagaggaacctatggctgagatctccagccaaaagattcagattgcagtcctggacatgatcgctgcaatatcttcgaacaagagaagtgctgttgcactagaaagcgtactaaagaaggtctgtggccttgtggtaggcattgcctacagtagtttgacaggtttgcaggaagctgctataagggcattggcaggccttgcctgcatggatgctgatcttgtctggcttctccttgcggatgtgtactactcactaaaccaaagggaatctttacttcccaaccaagatctagccctggtatcagatcttttgccccctccagtgtcttcgagagaatacctctttgtacagtatggaggtgagggtgtcaggtgtgatgtagatccctcatctgttcattatgtgttcagaaggatgcagggtgtgtgatcttgtgtgacctgaaaatcaggttcctgatactgtgtatttgtaatcttgctgagtttctttggtcatgctagcaccctatgtcacacattgaacataatatcacctgctacagagaatggtaaactttttcatacgtgttctcgcactgaaaatcatcaagcaaacatcaggactcatgatgacaatgaaggatgtgatgggtttgtatctgttagccatataaggttgcacgttaagcatgcccctgacttgccggacgagcagcaagacttcgggacctagattggctaaggcactaagaatagaatagcttatctaccgatatgtaaagtcttatttccacctttcgaattcttttcctcggtagctaagcttatttagttgcctaatggtcgatgtaatctttttattgtgtgattcattccactttcatggtatttccgctcttgttacctccctctaccgcttcttcatctacatctaacctcatgcctggcgacctctaataagtaactgttgatccggccacataattggaatgccttcgcgtgaggttgccggcctttgtgtcagtcactcaacatgctctcaacatgctgaggaaggtcgttgttgtgccgtagccgagcgacgcaacaagtggctgttcagaacacggacaaggtgatgttgaacgtgtagaaacaacggcagcgtgatgcggaacgtctgaaacaac

SEQ ID NO: 53381 - DNA, 1879 bp, Zea Mays
atgtatggtactctggaacacctgactctgatgtaacatggttcaactgttgtatcctgcaaaataaagaaagaatgttgatgctcgatcttactttatgaccttggaatactgggaagatttattttgtaagctaaatgagatgagaagatataggagaatagttgggtctcttgcgggctcttgtttatcagctgccatcccacttctctcttccaataaggaaacagcatgccttgtggcccttgacattgtggagagtgctgctatatctattgccaatgttgaggaggcttataagtgtgaatgtcaaagcaaaggagtcattgaggaggccatccagttttgttcatttgacgagcttcttgatggtacagatgccaccgaagatgttgatgaaaataggctactcccagcaatgaacaaactgtggccttacttggttatctgtctaaggaacaagatctcagtgccggttgttaggaagtgcaccgaaatgttgaggcgagcaatttgcatatctggcggcgatttttatgtacgcaggtttcataaggatggacctattgtttggaggttgctggctttatctccattccgacgtctgtcaaagatggatgaaaaagcaatcattttaccatatagggatacctcacttaactcagaggaacctatggctgagatctccagccaaaagattcagattgcagtcctggacatgatcgctgcaatatcttcgaacaagagaagtgctgttgcactagaaagcgtactaaagaaggtctgtggccttgtggtaggcattgcctacagtagtttgacaggtttgcaggaagctgctataagggcattggcaggccttgcctgcatggatgctgatcttgtctggcttctccttgcggatgtgtactactcactaaaccaaagggaatctttacttcccaaccaagatctagccctggtatcagatcttttgccccctccagtgtcttcgagagaatacctctttgtacagtatggaggtgagggtgtcaggtgtgatgtagatccctcatctgttcattatgtgttcagaaggatgcagggtgtgtgatcttgtgtgacctgaaaatcaggttcctgatactgtgtatttgtaatcttgctgagtttctttggtcatgctagcaccctatgtcacacattgaacataatatcacctgctacagagaatggtaaactttttcatacgtgttctcgcactgaaaatcatcaaggttggtcacatgtctgaagaatgattatgacaagtctttaccactttgatcataattatattaagcaaacatcaggactcatgatgacaatgaaggatgtgatgggtttgtatctgttagccatataaggttgcacgttaagcatgcccctgacttgccggacgagcagcaagacttcgggacctagattggctaaggcactaagaatagaatagcttatctaccgatatgtaaagtcttatttccacctttcgaattcttttcctcggtagctaagcttatttagttgcctaatggtcgatgtaatctttttattgtgtgattcattccactttcatggtatttccgctcttgttacctccctctaccgcttcttcatctacatctaacctcatgcctggcgacctctaataagtaactgttgatccggccacataattggaatgccttcgcgtgaggttgccggcctttgtgtcagtcactcaacatgctctcaacatgctgaggaaggtcgttgttgtgccgtagccgagcgacgcaacaagtggctgttcagaacacggacaaggtgatgttgaacgtgtagaaacaacggcagcgtgatgcggaacgtctgaaacaac

SEQ ID NO: 53382 - DNA, 2949 bp, Zea Mays
taataaccgagcaaaagtggacccacgctcagtgtgtgacgaccatcgcgagaagggtccatccctaaaaactgcgcaataaaccccaagcaattcacacaaattgcttgggggctcgggggctgctgttgggtacgtaggaacgaggtacccaaaataaggcatataaaccttctggccgactaaagtctccctgccgagcaagaccgcgaggcaaagcgatcgaccaggtctccaccgagcaagtccacgaggcggagcgaccgaccaggtccctgtcgagcaagtccgcgaggcggagcggccaatcaggcccctgccaagcaagtccgcgaggctgagcgaacacccaggtctgtgccgagcaagtctgcgaggtgtggcgatcgaccagatcaccgtcgagcaagaccgcgaggcggagcgactgaccaggtccccgtcgagcaagtccgcgaggcgaaacgaccgaccaggtccctggcgagcaatcccgtgaggtagggcgaccacccaggtccctggcgagcaagtccgcgaggcagggtgatcgaccaggtcccgccaagaaaatcggcgaggcagaaaccgaagtcaaacgtcgcgagtccatgccaactaagacaaaacatgtcatcctagggcatggacatacatacgaacgacaggccgggggcacgccgagtggccgctatcgacatgaccacacctcctcaagtatggccctggcgcacccccactgcctcaatggtttggacgactctgttcatggaggacctcaacatcggagcttctatagtaacccgaatactggatagcgcggaacagatacaccaaccgggtggcgcgagcctgaaccagtataacccaccgtcccaagttcatcgttcgagtcctggtggctcaccattcagaatgcaatcaatttcttctgagcttgaggtacttggcaggcatgatcacccacgtctaactgttccatttctgaaggcagtttctgagatttccaaggcatgtagacatgaatccacttgtttgccagatgaggcacaatcattttatgagaaggtcagttctgagggtcaagaagtaaaaattatgattgagaagagaatggaatccagtgcaatatctgaaagaaagaatgttgatgctcgatcttactttatgaccttggaatactgggaagatttattttgtaagctaaatgagatgagaagatataggagaatagttgggtctcttgcgggctcttgtttatcagctgccatcccacttctctcttccaataaggaaacagcatgccttgtggcccttgacattgtggagagtgctgctatatctattgccaatgttgaggaggcttataagtgtgaatgtcaaagcaaaggagtcattgaggaggccatccagttttgttcatttgacgagcttcttgatggtacagatgccaccgaagatgttgatgaaaataggctactcccagcaatgaacaaactgtggccttacttggttatctgtctaaggaacaagatctcagtgccggttgttaggaagtgcaccgaaatgttgaggcgagcaatttgcatatctggcggcgatttttatgtacgcaggtttcataaggatggacctattgtttggaggttgctggctttatctccattccgacgtctgtcaaagatggatgaaaaagcaatcattttaccatatagggatacctcacttaactcagaggaacctatggctgagatctccagccaaaagattcagattgcagtcctggacatgatcgctgcaatatcttcgaacaagagaagtgctgttgcactagaaagcgtactaaagaaggtctgtggccttgtggtaggcattgcctacagtagtttgacaggtttgcaggaagctgctataagggcattggcaggccttgcctgcatggatgctgatcttgtctggcttctccttgcggatgtgtactactcactaaaccaaagggaatctttacttcccaaccaagatctagccctggtatcagatcttttgccccctccagtgtcttcgagagaatacctctttgtacagtatggaggtgagggtgtcaggtgtgatgtagatccctcatctgttcattatgtgttcagaaggatgcagggtgtgtgatcttgtgtgacctgaaaatcaggttcctgatactgtgtatttgtaatcttgctgagtttctttggtcatgctagcaccctatgtcacacattgaacataatatcacctgctacagagaatggtaaactttttcatacgtgttctcgcactgaaaatcatcaaggttggtcacatgtctgaagaatgattatgacaagtctttaccactttgatcataattatattaagcaaacatcaggactcatgatgacaatgaaggatgtgatgggtttgtatctgttagccatataaggttgcacgttaagcatgcccctgacttgccggacgagcagcaagacttcgggacctagattggctaaggcactaagaatagaatagcttatctaccgatatgtaaagtcttatttccacctttcgaattcttttcctcggtagctaagcttatttagttgcctaatggtcgatgtaatctttttattgtgtgattcattccactttcatggtatttccgctcttgttacctccctctaccgcttcttcatctacatctaacctcatgcctggcgacctctaataagtaactgttgatccggccacataattggaatgccttcgcgtgaggttgccggcctttgtgtcagtcactcaacatgctctcaacatgctgaggaaggtcgttgttgtgccgtagccgagcgacgcaacaagtggctgttcagaacacggacaaggtgatgttgaacgtgtagaaacaacggcagcgtgatgcggaacgtctgaaacaac

SEQ ID NO: 53383 - DNA, 2235 bp, Zea Mays
cttggacatccacaccatcaatggcaagaacttctaattttctttgttgtggtgtatctgtcccagtattagtcccagttgtgccactaccagtaccagtagctgttgttctagttccacttggatttggttcatcggatgggatggaaattggtgttgatgatgatgttgagataccaccaggagcattaacttcaacagatgcaatcaatttcttctgagcttgaggtacttggcaggcatgatcacccacgtctaactgttccatttctgaaggcagtttctgagatttccaaggcatgtagacatgaatccacttgtttgccagatgaggcacaatcattttatgagaaggtcagttctgagggtcaagaagtaaaaattatgattgagaagagaatggaatccagtgcaatatctgaaagaaagaatgttgatgctcgatcttactttatgaccttggaatactgggaagatttattttgtaagctaaatgagatgagaagatataggagaatagttgggtctcttgcgggctcttgtttatcagctgccatcccacttctctcttccaataaggaaacagcatgccttgtggcccttgacattgtggagagtgctgctatatctattgccaatgttgaggaggcttataagtgtgaatgtcaaagcaaaggagtcattgaggaggccatccagttttgttcatttgacgagcttcttgatggtacagatgccaccgaagatgttgatgaaaataggctactcccagcaatgaacaaactgtggccttacttggttatctgtctaaggaacaagatctcagtgccggttgttaggaagtgcaccgaaatgttgaggcgagcaatttgcatatctggcggcgatttttatgtacgcaggtttcataaggatggacctattgtttggaggttgctggctttatctccattccgacgtctgtcaaagatggatgaaaaagcaatcattttaccatatagggatacctcacttaactcagaggaacctatggctgagatctccagccaaaagattcagattgcagtcctggacatgatcgctgcaatatcttcgaacaagagaagtgctgttgcactagaaagcgtactaaagaaggtctgtggccttgtggtaggcattgcctacagtagtttgacaggtttgcaggaagctgctataagggcattggcaggccttgcctgcatggatgctgatcttgtctggcttctccttgcggatgtgtactactcactaaaccaaagggaatctttacttcccaaccaagatctagccctggtatcagatcttttgccccctccagtgtcttcgagagaatacctctttgtacagtatggaggtgagggtgtcaggtgtgatgtagatccctcatctgttcattatgtgttcagaaggatgcagggtgtgtgatcttgtgtgacctgaaaatcaggttcctgatactgtgtatttgtaatcttgctgagtttctttggtcatgctagcaccctatgtcacacattgaacataatatcacctgctacagagaatggtaaactttttcatacgtgttctcgcactgaaaatcatcaaggttggtcacatgtctgaagaatgattatgacaagtctttaccactttgatcataattatattaagcaaacatcaggactcatgatgacaatgaaggatgtgatgggtttgtatctgttagccatataaggttgcacgttaagcatgcccctgacttgccggacgagcagcaagacttcgggacctagattggctaaggcactaagaatagaatagcttatctaccgatatgtaaagtcttatttccacctttcgaattcttttcctcggtagctaagcttatttagttgcctaatggtcgatgtaatctttttattgtgtgattcattccactttcatggtatttccgctcttgttacctccctctaccgcttcttcatctacatctaacctcatgcctggcgacctctaataagtaactgttgatccggccacataattggaatgccttcgcgtgaggttgccggcctttgtgtcagtcactcaacatgctctcaacatgctgaggaaggtcgttgttgtgccgtagccgagcgacgcaacaagtggctgttcagaacacggacaaggtgatgttgaacgtgtagaaacaacggcagcgtgatgcggaacgtctgaaacaac

SEQ ID NO: 53384 - DNA, 2109 bp, Zea Mays
cttcaacaaaggatctgccatatacttttccagctcatttaagttgtttagatcagcaacatttgtgtcatagagatgcaatcaatttcttctgagcttgaggtacttggcaggcatgatcacccacgtctaactgttccatttctgaaggcagtttctgagatttccaaggcatgtagacatgaatccacttgtttgccagatgaggcacaatcattttatgagaaggtcagttctgagggtcaagaagtaaaaattatgattgagaagagaatggaatccagtgcaatatctgaaagaaagaatgttgatgctcgatcttactttatgaccttggaatactgggaagatttattttgtaagctaaatgagatgagaagatataggagaatagttgggtctcttgcgggctcttgtttatcagctgccatcccacttctctcttccaataaggaaacagcatgccttgtggcccttgacattgtggagagtgctgctatatctattgccaatgttgaggaggcttataagtgtgaatgtcaaagcaaaggagtcattgaggaggccatccagttttgttcatttgacgagcttcttgatggtacagatgccaccgaagatgttgatgaaaataggctactcccagcaatgaacaaactgtggccttacttggttatctgtctaaggaacaagatctcagtgccggttgttaggaagtgcaccgaaatgttgaggcgagcaatttgcatatctggcggcgatttttatgtacgcaggtttcataaggatggacctattgtttggaggttgctggctttatctccattccgacgtctgtcaaagatggatgaaaaagcaatcattttaccatatagggatacctcacttaactcagaggaacctatggctgagatctccagccaaaagattcagattgcagtcctggacatgatcgctgcaatatcttcgaacaagagaagtgctgttgcactagaaagcgtactaaagaaggtctgtggccttgtggtaggcattgcctacagtagtttgacaggtttgcaggaagctgctataagggcattggcaggccttgcctgcatggatgctgatcttgtctggcttctccttgcggatgtgtactactcactaaaccaaagggaatctttacttcccaaccaagatctagccctggtatcagatcttttgccccctccagtgtcttcgagagaatacctctttgtacagtatggaggtgagggtgtcaggtgtgatgtagatccctcatctgttcattatgtgttcagaaggatgcagggtgtgtgatcttgtgtgacctgaaaatcaggttcctgatactgtgtatttgtaatcttgctgagtttctttggtcatgctagcaccctatgtcacacattgaacataatatcacctgctacagagaatggtaaactttttcatacgtgttctcgcactgaaaatcatcaaggttggtcacatgtctgaagaatgattatgacaagtctttaccactttgatcataattatattaagcaaacatcaggactcatgatgacaatgaaggatgtgatgggtttgtatctgttagccatataaggttgcacgttaagcatgcccctgacttgccggacgagcagcaagacttcgggacctagattggctaaggcactaagaatagaatagcttatctaccgatatgtaaagtcttatttccacctttcgaattcttttcctcggtagctaagcttatttagttgcctaatggtcgatgtaatctttttattgtgtgattcattccactttcatggtatttccgctcttgttacctccctctaccgcttcttcatctacatctaacctcatgcctggcgacctctaataagtaactgttgatccggccacataattggaatgccttcgcgtgaggttgccggcctttgtgtcagtcactcaacatgctctcaacatgctgaggaaggtcgttgttgtgccgtagccgagcgacgcaacaagtggctgttcagaacacggacaaggtgatgttgaacgtgtagaaacaacggcagcgtgatgcggaacgtctgaaacaac

SEQ ID NO: 53385 - DNA, 4748 bp, Zea Mays
cggctcctcttcgccgtcgcaaccgatttatatatggcgatggaggcgtcggcggcctccgacgaaaccctagccgccgtcttcgcccagctcaagctccacaccgtcgctctcctcgacctcctccgcactcgccgccccatctctagctccggctcctccctacgcgaaatggccgctttcctccgcgccgccccggccccggcgctgcagctctgcttcgattatacagtgtttccactgctcctgctcctggatgcggcggtgcagtgcaggaagcaaggcaatgcgccggggcaggttgcagggggcattgatataggtgatgccgtcgccgaagctggtctgacctgccttgaggtcctcctcaccaagtgccacctcacctcggtcaatcagatggtagcaatgctgaaaaagttgacttccggggctatgctttcaccttcagaggcttcagaggaattccgtggtgcaattattagatgcttcagggctttggttttgcagttacagccatgcttggaccatttttgttcttgcaaacacggaatagtgttacctacgatcccaaccagtacatgcttggaggttagaagtgtagtccgcccaaatcactctgcgcagccagaggagtgcttgcttgcatttcttcagtctcaaaatgcttcagctgccgtaggacattggctctcacttcttctacaagcatcagaacttgaggcatcaagggggcaccggggaagtgcagatgttaggaaggaatcattgcacacgctgcgcattcttattggcaaggtaggctctgctgatgcacttgcctttttccttcctggaattgtcagtcgccttgggaaggttctctacacagctaagactatgattagtggtgctgctgggagttctttgagcattgaacaagccattcttggattgaccgaggctttgatgatagtactaaatgacaaggaaaatcttagtgcacttggtaagcacaagaatgagaatcattctggtggcagtgagtcaactgagcatatattgcagatgcttcgccagttgccaaccaaaaatatatctgataagataagccatgatgagattacagatgattctgtctccaatgtcaataattcctttgctgatagaaaggcactgcatgtgaagcggaccaaaaaatggcttgaggaaacaactagtaatgttgataaattgctgtctgctacattcccacatcttgctattcattcatctgagaaggtaaggaaggcagtggttagtggtgtaaaagggcttttgtctagttgcagttctacattaaaaagaaccaagatgctacttttggaatgtttatgtgttctggcatgtgatgatgctgcagctgtgtctgaggctgcacaagatgctcttgatcatcttttcaaccaaggccacaatctcgtaacagaaaaggagatttctgatacctttactaggctggttgaaaggctaccacaagtggtacttggaagcgaggagacaaccgcactttcacatgctaggatgttgttggctctgaccttttatgctggtccccagtttctgataaatcatcttcaccgttctcctgtcattgctgctcgtttctttgattgtttgggtttatgcataggtcatagctcacagttttctggttccatggacaagctaattgtatcaaagccactatctattgggtatctttattcagttgctgagttgaagagtggcgcctattctaaagatacaactaacatatctctgcatgccacgtcaacatctgcagcctccaaaatatctgttatccatgataatgctttgccaaatgcattacttggtacagttgaatatgagttgccccatgtgcctccatggttttttcatgctggtagccagaagctttatggggttcttgctggaataattagacttgttggcctatcaacagtgtcaggggaaggaactgctgcaaccttgtctctctttgttgatattctgcttgatcagtttaggaggttgagcactgagctgagagacaaagatgtttacaacgatggtctgcagcggtggtacatgaaaggtgaagctggacaagcattgcgccaggctagttcagctgtctgcatgctcaatgagctcatgtatggtttgtcaggtcgatcccttggtatgtttttacaacttttcagcaacggatcagcacagatgccaaggacagtttgtcagaaaaatcaactgcttgcttgtgttaaacataatgcagttactaacaaaagagaagtgtggggttttagtgaacaaaagggcactaaagacaacattcttcattgcatcagcagtattctgcatgaatatgtatcaccagaagtgtgggatcttccaacagagaaggacactgagctacacctaatagagttgaacctgccattgcacttctaccgtgatacaactgcattgcacacagtagtgcttgaaggaattggagtcttgggtgttcttcttggtcaagattttgcacttagtgggtttatgcactcttccctttatcttctgctccgtgaacttatcagctcaagtgctcagataagaactgcatgtgatgctgtcttgagagcccttgctactgctggcggtcattgttcggttggccaatttgtcgttgcgaatgcagactacattattgactctctttgcagatgcaatcaatttcttctgagcttgaggtacttggcaggcatgatcacccacgtctaactgttccatttctgaaggcagtttctgagatttccaaggcatgtagacatgaatccacttgtttgccagatgaggcacaatcattttatgagaaggtcagttctgagggtcaagaagtaaaaattatgattgagaagagaatggaatccagtgcaatatctgaaagaaagaatgttgatgctcgatcttactttatgaccttggaatactgggaagatttattttgtaagctaaatgagatgagaagatataggagaatagttgggtctcttgcgggctcttgtttatcagctgccatcccacttctctcttccaataaggaaacagcatgccttgtggcccttgacattgtggagagtgctgctatatctattgccaatgttgaggaggcttataagtgtgaatgtcaaagcaaaggagtcattgaggaggccatccagttttgttcatttgacgagcttcttgatggtacagatgccaccgaagatgttgatgaaaataggctactcccagcaatgaacaaactgtggccttacttggttatctgtctaaggaacaagatctcagtgccggttgttaggaagtgcaccgaaatgttgaggcgagcaatttgcatatctggcggcgatttttatgtacgcaggtttcataaggatggacctattgtttggaggttgctggctttatctccattccgacgtctgtcaaagatggatgaaaaagcaatcattttaccatatagggatacctcacttaactcagaggaacctatggctgagatctccagccaaaagattcagattgcagtcctggacatgatcgctgcaatatcttcgaacaagagaagtgctgttgcactagaaagcgtactaaagaaggtctgtggccttgtggtaggcattgcctacagtagtttgacaggtttgcaggaagctgctataagggcattggcaggccttgcctgcatggatgctgatcttgtctggcttctccttgcggatgtgtactactcactaaaccaaagggaatctttacttcccaaccaagatctagccctggtatcagatcttttgccccctccagtgtcttcgagagaatacctctttgtacagtatggaggtgagggtgtcaggtgtgatgtagatccctcatctgttcattatgtgttcagaaggatgcagggtgtgtgatcttgtgtgacctgaaaatcaggttcctgatactgtgtatttgtaatcttgctgagtttctttggtcatgctagcaccctatgtcacacattgaacataatatcacctgctacagagaatggtaaactttttcatacgtgttctcgcactgaaaatcatcaaggttggtcacatgtctgaagaatgattatgacaagtctttaccactttgatcataattatattaagcaaacatcaggactcatgatgacaatgaaggatgtgatgggtttgtatctgttagccatataaggttgcacgttaagcatgcccctgacttgccggacgagcagcaagacttcgggacctagattggctaaggcactaagaatagaatagcttatctaccgatatgtaaagtcttatttccacctttcgaattcttttcctcggtagctaagcttatttagttgcctaatggtcgatgtaatctttttattgtgtgattcattccactttcatggtatttccgctcttgttacctccctctaccgcttcttcatctacatctaacctcatgcctggcgacctctaataagtaactgttgatccggccacataattggaatgccttcgcgtgaggttgccggcctttgtgtcagtcactcaacatgctctcaacatgctgaggaaggtcgttgttgtgccgtagccgagcgacgcaacaagtggctgttcagaacacggacaaggtgatgttgaacgtgtagaaacaacggcagcgtgatgcggaacgtctgaaacaac

SEQ ID NO: 53386 - DNA, 4930 bp, Zea Mays
ccactaggcacgtcctggaaccttgcggggccggtattggaaagcaggcaagcacaacagcgatcccacaaaccacagctcggctcctcttcgccgtcgcaaccgatttatatatggcgatggaggcgtcggcggcctccgacgaaaccctagccgccgtcttcgcccagctcaagctccacaccgtcgctctcctcgacctcctccgcactcgccgccccatctctagctccggctcctccctacgcgaaatggccgctttcctccgcgccgccccggccccggcgctgcagctctgcttcgattatacagtgtttccactgctcctgctcctggatgcggcggtgcagtgcaggaagcaaggcaatgcgccggggcaggttgcagggggcattgatataggtgatgccgtcgccgaagctggtctgacctgccttgaggtcctcctcaccaagtgccacctcacctcggtcaatcagatggtagcaatgctgaaaaagttgacttccggggctatgctttcaccttcagaggcttcagaggaattccgtggtgcaattattagatgcttcagggctttggttttgcagttacagccatgcttggaccatttttgttcttgcaaacacggaatagtgttacctacgatcccaaccagtacatgcttggaggttagaagtgtagtccgcccaaatcactctgcgcagccagaggagtgcttgcttgcatttcttcagtctcaaaatgcttcagctgccgtaggacattggctctcacttcttctacaagcatcagaacttgaggcatcaagggggcaccggggaagtgcagatgttaggaaggaatcattgcacacgctgcgcattcttattggcaaggtaggctctgctgatgcacttgcctttttccttcctggaattgtcagtcgccttgggaaggttctctacacagctaagactatgattagtggtgctgctgggagttctttgagcattgaacaagccattcttggattgaccgaggctttgatgatagtactaaatgacaaggaaaatcttagtgcacttggtaagcacaagaatgagaatcattctggtggcagtgagtcaactgagcatatattgcagatgcttcgccagttgccaaccaaaaatatatctgataagataagccatgatgagattacagatgattctgtctccaatgtcaataattcctttgctgatagaaaggcactgcatgtgaagcggaccaaaaaatggcttgaggaaacaactagtaatgttgataaattgctgtctgctacattcccacatcttgctattcattcatctgagaaggtaaggaaggcagtggttagtggtgtaaaagggcttttgtctagttgcagttctacattaaaaagaaccaagatgctacttttggaatgtttatgtgttctggcatgtgatgatgctgcagctgtgtctgaggctgcacaagatgctcttgatcatcttttcaaccaaggccacaatctcgtaacagaaaaggagatttctgatacctttactaggctggttgaaaggctaccacaagtggtacttggaagcgaggagacaaccgcactttcacatgctaggatgttgttggctctgaccttttatgctggtccccagtttctgataaatcatcttcaccgttctcctgtcattgctgctcgtttctttgattgtttgggtttatgcataggtcatagctcacagttttctggttccatggacaagctaattgtatcaaagccactatctattgggtatctttattcagttgctgagttgaagagtggcgcctattctaaagatacaactaacatatctctgcatgccacgtcaacatctgcagcctccaaaatatctgttatccatgataatgctttgccaaatgcattacttggtacagttgaatatgagttgccccatgtgcctccatggttttttcatgctggtagccagaagctttatggggttcttgctggaataattagacttgttggcctatcaacagtgtcaggggaaggaactgctgcaaccttgtctctctttgttgatattctgcttgatcagtttaggaggttgagcactgagctgagagacaaagatgtttacaacgatggtctgcagcggtggtacatgaaaggtgaagctggacaagcattgcgccaggctagttcagctgtctgcatgctcaatgagctcatgtatggtttgtcaggtcgatcccttggtatgtttttacaacttttcagcaacggatcagcacagatgccaaggacagtttgtcagaaaaatcaactgcttgcttgtgttaaacataatgcagttactaacaaaagagaagtgtggggttttagtgaacaaaagggcactaaagacaacattcttcattgcatcagcagtattctgcatgaatatgtatcaccagaagtgtgggatcttccaacagagaaggacactgagctacacctaatagagttgaacctgccattgcacttctaccgtgatacaactgcattgcacacagtagtgcttgaaggaattggagtcttgggtgttcttcttggtcaagattttgcacttagtgggtttatgcactcttccctttatcttctgctccgtgaacttatcagctcaagtgctcagataagaactgcatgtgatgctgtcttgagagcccttgctactgctggcggtcattgttcggttggccaatttgtcgttgcgaatgcagactacattattgactctctttgcaggcaattgcgtcacctggacctgaacccccatgtccctgatgttcttgcttccatgctatgttacatcggtgcttctcgtgatatcttgccattcttggaagaaccgatgcaatcaatttcttctgagcttgaggtacttggcaggcatgatcacccacgtctaactgttccatttctgaagtttctgagatttccaaggcatgtagacatgaatccacttgtttgccagatgaggcacaatcattttatgagaaggtcagttctgagggtcaagaagtaaaaattatgattgagaagagaatggaatccagtgcaatatctgaaagaaagaatgttgatgctcgatcttactttatgaccttggaatactgggaagatttattttgtaagctaaatgagatgagaagatataggagaatagttgggtctcttgcgggctcttgtttatcagctgccatcccacttctctcttccaataaggaaacagcatgccttgtggcccttgacattgtggagagtgctgctatatctattgccaatgttgaggaggcttataagtgtgaatgtcaaagcaaaggagtcattgaggaggccatccagttttgttcatttgacgagcttcttgatggtacagatgccaccgaagatgttgatgaaaataggctactcccagcaatgaacaaactgtggccttacttggttatctgtctaaggaacaagatctcagtgccggttgttaggaagtgcaccgaaatgttgaggcgagcaatttgcatatctggcggcgatttttatgtacgcaggtttcataaggatggacctattgtttggaggttgctggctttatctccattccgacgtctgtcaaagatggatgaaaaagcaatcattttaccatatagggatacctcacttaactcagaggaacctatggctgagatctccagccaaaagattcagattgcagtcctggacatgatcgctgcaatatcttcgaacaagagaagtgctgttgcactagaaagcgtactaaagaaggtctgtggccttgtggtaggcattgcctacagtagtttgacaggtttgcaggaagctgctataagggcattggcaggccttgcctgcatggatgctgatcttgtctggcttctccttgcggatgtgtactactcactaaaccaaagggaatctttacttcccaaccaagatctagccctggtatcagatcttttgccccctccagtgtcttcgagagaatacctctttgtacagtatggaggtgagggtgtcaggtgtgatgtagatccctcatctgttcattatgtgttcagaaggatgcagggtgtgtgatcttgtgtgacctgaaaatcaggttcctgatactgtgtatttgtaatcttgctgagtttctttggtcatgctagcaccctatgtcacacattgaacataatatcacctgctacagagaatggtaaactttttcatacgtgttctcgcactgaaaatcatcaaggttggtcacatgtctgaagaatgattatgacaagtctttaccactttgatcataattatattaagcaaacatcaggactcatgatgacaatgaaggatgtgatgggtttgtatctgttagccatataaggttgcacgttaagcatgcccctgacttgccggacgagcagcaagacttcgggacctagattggctaaggcactaagaatagaatagcttatctaccgatatgtaaagtcttatttccacctttcgaattcttttcctcggtagctaagcttatttagttgcctaatggtcgatgtaatctttttattgtgtgattcattccactttcatggtatttccgctcttgttacctccctctaccgcttcttcatctacatctaacctcatgcctggcgacctctaataagtaactgttgatccggccacataattggaatgccttcgcgtgaggttgccggcctttgtgtcagtcactcaacatgctctcaacatgctgaggaaggtcgttgttgtgccgtagccgagcgacgcaacaagtggctgttcagaacacggacaaggtgatgttgaacgtgtagaaacaacggcagcgtgatgcggaacgtctgaaacaac

SEQ ID NO: 53387 - DNA, 4524 bp, Zea Mays
cgaaagacgtctcgtgtcgcctccactaggcacgtcctggaaccttgcggggccggtattggaaagcagatggtagcaatgctgaaaaagttgacttccggggctatgctttcaccttcagaggcttcagaggaattccgtggtgcaattattagatgcttcagggctttggttttgcagttacagccatgcttggaccatttttgttcttgcaaacacggaatagtgttacctacgatcccaaccagtacatgcttggaggttagaagtgtagtccgcccaaatcactctgcgcagccagaggagtgcttgcttgcatttcttcagtctcaaaatgcttcagctgccgtaggacattggctctcacttcttctacaagcatcagaacttgaggcatcaagggggcaccggggaagtgcagatgttaggaaggaatcattgcacacgctgcgcattcttattggcaaggtaggctctgctgatgcacttgcctttttccttcctggaattgtcagtcgccttgggaaggttctctacacagctaagactatgattagtggtgctgctgggagttctttgagcattgaacaagccattcttggattgaccgaggctttgatgatagtactaaatgacaaggaaaatcttagtgcacttggtaagcacaagaatgagaatcattctggtggcagtgagtcaactgagcatatattgcagatgcttcgccagttgccaaccaaaaatatatctgataagataagccatgatgagattacagatgattctgtctccaatgtcaataattcctttgctgatagaaaggcactgcatgtgaagcggaccaaaaaatggcttgaggaaacaactagtaatgttgataaattgctgtctgctacattcccacatcttgctattcattcatctgagaaggtaaggaaggcagtggttagtggtgtaaaagggcttttgtctagttgcagttctacattaaaaagaaccaagatgctacttttggaatgtttatgtgttctggcatgtgatgatgctgcagctgtgtctgaggctgcacaagatgctcttgatcatcttttcaaccaaggccacaatctcgtaacagaaaaggagatttctgatacctttactaggctggttgaaaggctaccacaagtggtacttggaagcgaggagacaaccgcactttcacatgctaggatgttgttggctctgaccttttatgctggtccccagtttctgataaatcatcttcaccgttctcctgtcattgctgctcgtttctttgattgtttgggtttatgcataggtcatagctcacagttttctggttccatggacaagctaattgtatcaaagccactatctattgggtatctttattcagttgctgagttgaagagtggcgcctattctaaagatacaactaacatatctctgcatgccacgtcaacatctgcagcctccaaaatatctgttatccatgataatgctttgccaaatgcattacttggtacagttgaatatgagttgccccatgtgcctccatggttttttcatgctggtagccagaagctttatggggttcttgctggaataattagacttgttggcctatcaacagtgtcaggggaaggaactgctgcaaccttgtctctctttgttgatattctgcttgatcagtttaggaggttgagcactgagctgagagacaaagatgtttacaacgatggtctgcagcggtggtacatgaaaggtgaagctggacaagcattgcgccaggctagttcagctgtctgcatgctcaatgagctcatgtatggtttgtcaggtcgatcccttggtatgtttttacaacttttcagcaacggatcagcacagatgccaaggacagtttgtcagaaaaatcaactgcttgcttgtgttaaacataatgcagttactaacaaaagagaagtgtggggttttagtgaacaaaagggcactaaagacaacattcttcattgcatcagcagtattctgcatgaatatgtatcaccagaagtgtgggatcttccaacagagaaggacactgagctacacctaatagagttgaacctgccattgcacttctaccgtgatacaactgcattgcacacagtagtgcttgaaggaattggagtcttgggtgttcttcttggtcaagattttgcacttagtgggtttatgcactcttccctttatcttctgctccgtgaacttatcagctcaagtgctcagataagaactgcatgtgatgctgtcttgagagcccttgctactgctggcggtcattgttcggttggccaatttgtcgttgcgaatgcagactacattattgactctctttgcaggcaattgcgtcacctggacctgaacccccatgtccctgatgttcttgcttccatgctatgttacatcggtgcttctcgtgatatcttgccattcttggaagaaccgatgcaatcaatttcttctgagcttgaggtacttggcaggcatgatcacccacgtctaactgttccatttctgaaggcagtttctgagatttccaaggcatgtagacatgaatccacttgtttgccagatgaggcacaatcattttatgagaaggtcagttctgagggtcaagaagtaaaaattatgattgagaagagaatggaatccagtgcaatatctgaaagaaagaatgttgatgctcgatcttactttatgaccttggaatactgggaagatttattttgtaagctaaatgagatgagaagatataggagaatagttgggtctcttgcgggctcttgtttatcagctgccatcccacttctctcttccaataaggaaacagcatgccttgtggcccttgacattgtggagagtgctgctatatctattgccaatgttgaggaggcttataagtgtgaatgtcaaagcaaaggagtcattgaggaggccatccagttttgttcatttgacgagcttcttgatggtacagatgccaccgaagatgttgatgaaaataggctactcccagcaatgaacaaactgtggccttacttggttatctgtctaaggaacaagatctcagtgccggttgttaggaagtgcaccgaaatgttgaggcgagcaatttgcatatctggcggcgatttttatgtacgcaggtttcataaggatggacctattgtttggaggttgctggctttatctccattccgacgtctgtcaaagatggatgaaaaagcaatcattttaccatatagggatacctcacttaactcagaggaacctatggctgagatctccagccaaaagattcagattgcagtcctggacatgatcgctgcaatatcttcgaacaagagaagtgctgttgcactagaaagcgtactaaagaaggtctgtggccttgtggtaggcattgcctacagtagtttgacaggtttgcaggaagctgctataagggcattggcaggccttgcctgcatggatgctgatcttgtctggcttctccttgcggatgtgtactactcactaaaccaaagggaatctttacttcccaaccaagatctagccctggtatcagatcttttgccccctccagtgtcttcgagagaatacctctttgtacagtatggaggtgagggtgtcaggtgtgatgtagatccctcatctgttcattatgtgttcagaaggatgcagggtgtgtgatcttgtgtgacctgaaaatcaggttcctgatactgtgtatttgtaatcttgctgagtttctttggtcatgctagcaccctatgtcacacattgaacataatatcacctgctacagagaatggtaaactttttcatacgtgttctcgcactgaaaatcatcaaggttggtcacatgtctgaagaatgattatgacaagtctttaccactttgatcataattatattaagcaaacatcaggactcatgatgacaatgaaggatgtgatgggtttgtatctgttagccatataaggttgcacgttaagcatgcccctgacttgccggacgagcagcaagacttcgggacctagattggctaaggcactaagaatagaatagcttatctaccgatatgtaaagtcttatttccacctttcgaattcttttcctcggtagctaagcttatttagttgcctaatggtcgatgtaatctttttattgtgtgattcattccactttcatggtatttccgctcttgttacctccctctaccgcttcttcatctacatctaacctcatgcctggcgacctctaataagtaactgttgatccggccacataattggaatgccttcgcgtgaggttgccggcctttgtgtcagtcactcaacatgctctcaacatgctgaggaaggtcgttgttgtgccgtagccgagcgacgcaacaagtggctgttcagaacacggacaaggtgatgttgaacgtgtagaaacaacggcagcgtgatgcggaacgtctgaaacaac

SEQ ID NO: 53388 - DNA, 4876 bp, Zea Mays
gtcgcttggcgcttccagagaaaaacccgaaagacgtctcgtgtcgcctccactaggcacgtcctggaaccttgcggggccggtattggaaagcaggcaagcacaacagcgatcccacaaaccacagctcggctcctcttcgccgtcgcaaccgatttatatatggcgatggaggcgtcggcggcctccgacgaaaccctagccgccgtcttcgcccagctcaagctccacaccgtcgctctcctcgacctcctccgcactcgccgccccatctctagctccggctcctccctacgcgaaatggccgctttcctccgcgccgccccggccccggcgctgcagctctgcttcgattatacagtgtttccactgctcctgctcctggatgcggcggtgcagtgcaggaagcaaggcaatgcgccggggcaggttgcagggggcattgatataggtgatgccgtcgccgaagctggtctgacctgccttgaggtcctcctcaccaagtgccacctcacctcggtcaatcagatggtagcaatgctgaaaaagttgacttccggggctatgctttcaccttcagaggcttcagaggaattccgtggtgcaattattagatgcttcagggctttggttttgcagttacagccatgcttggaccatttttgttcttgcaaacacggaatagtgttacctacgatcccaaccagtacatgcttggaggttagaagtgtagtccgcccaaatcactctgcgcagccagaggagtgcttgcttgcatttcttcagtctcaaaatgcttcagctgccgtaggacattggctctcacttcttctacaagcatcagaacttgaggcatcaagggggcaccggggaagtgcagatgttaggaaggaatcattgcacacgctgcgcattcttattggcaaggtaggctctgctgatgcacttgcctttttccttcctggaattgtcagtcgccttgggaaggttctctacacagctaagactatgattagtggtgctgctgggagttctttgagcattgaacaagccattcttggattgaccgaggctttgatgatagtactaaatgacaaggaaaatcttagtgcacttggtaagcacaagaatgagaatcattctggtggcagtgagtcaactgagcatatattgcagatgcttcgccagttgccaaccaaaaatatatctgataagataagccatgatgagattacagatgattctgtctccaatgtcaataattcctttgctgatagaaaggcactgcatgtgaagcggaccaaaaaatggcttgaggaaacaactagtaatgttgataaattgctgtctgctacattcccacatcttgctattcattcatctgagaaggtaaggaaggcagtggttagtggtgtaaaagggcttttgtctagttgcagttctacattaaaaagaaccaagatgctacttttggaatgtttatgtgttctggcatgtgatgatgctgcagctgtgtctgaggctgcacaagatgctcttgatcatcttttcaaccaaggccacaatctcgtaacagaaaaggagatttctgatacctttactaggctggttgaaaggctaccacaagtggtacttggaagcgaggagacaaccgcactttcacatgctaggatgttgttggctctgaccttttatgctggtccccagtttctgataaatcatcttcaccgttctcctgtcattgctgctcgtttctttgattgtttgggtttatgcataggtcatagctcacagttttctggttccatggacaagctaattgtatcaaagccactatctattgggtatctttattcagttgctgagttgaagagtggcgcctattctaaagatacaactaacatatctctgcatgccacgtcaacatctgcagcctccaaaatatctgttatccatgataatgctttgccaaatgcattacttggtacagttgaatatgagttgccccatgtgcctccatggttttttcatgctggtagccagaagctttatggggttcttgctggaataattagacttgttggcctatcaacagtgtcaggggaaggaactgctgcaaccttgtctctctttgttgatattctgcttgatcagtttaggaggttgagcactgagctgagagacaaagatgtttacaacgatggtctgcagcggtggtacatgaaaggtgaagctggacaagcattgcgccaggctagttcagctgtctgcatgctcaatgagctcatgtatggtttgtcaggtcgatcccttggtatgtttttacaacttttcagcaacggatcagcacagatgccaaggacagtttgtcagaaaaatcaactgcttgcttgtgttaaacataatgcagttactaacaaaagagaagtgtggggttttagtgaacaaaagggcactaaagacaacattcttcattgcatcagcagtattctgcatgaatatgtatcaccagaagtgtgggatcttccaacagagaaggacactgagctacacctaatagagttgaacctgccattgcacttctaccgtgatacaactgcattgcacacagtagtgcttgaaggaattggagtcttgggtgttcttcttggtcaagattttgcacttagtgggtttatgcactcttccctttatcttctgctccgtgaacttatcagctcaagtgctcagataagaactgcatgtgatgctgtcttgagagcccttgctactgctggcggtcattgttcggttggccaatttgtcgttgcgaatgcagactacattattgactctctttgcaggcaattgcgtcacctggacctgaacccccatgtccctgatgttcttgcttccatgctatgttacatcggtgcttctcgtgatatcttgccattcttggaagaaccgatgcaatcaatttcttctgagcttgaggtacttggcaggcatgatcacccacgtctaactgttccatttctgaaggcagtttctgagatttccaaggcatgtagacatgaatccacttgtttgccagatgaggcacaatcattttatgagaaggtcagttctgagggtcaagaagtaaaaattatgattgagaagagaatggaatccagtgcaatatctgaaagaaagaatgttgatgctcgatcttactttatgaccttggaatactgggaagatttattttgtaagctaaatgagatgagaagatataggagaatagttgggtctcttgcgggctcttgtttatcagctgccatcccacttctctcttccaataaggaaacagcatgccttgtggcccttgacattgtggagagtgctgctatatctattgccaatgttgaggaggcttataagtgtgaatgtcaaagcaaaggagtcattgaggaggccatccagttttgttcatttgacgagcttcttgatggtacagatgccaccgaagatgttgatgaaaataggctactcccagcaatgaacaaactgtggccttacttggttatctgtctaaggaacaagatctcagtgccggttgttaggaagtgcaccgaaatgttgaggcgagcaatttgcatatctggcggcgatttttatgtacgcaggtttcataaggatggacctattgtttggaggttgctggctttatctccattccgacgtctgtcaaagatggatgaaaaagcaatcattttaccatatagggatacctcacttaactcagaggaacctatggctgagatctccagccaaaagattcagattgcagtcctggacatgatcgctgcaatatcttcgaacaagagaagtgctgttgcactagaaagcgtactaaagaaggtctgtggccttgtggtaggcattgcctacagtagtttgacaggtttgcaggaagctgctataagggcattggcaggccttgcctgcatggatgctgatcttgtctggcttctccttgcggatgtgtactactcactaaaccaaagggaatctttacttcccaaccaagatctagccctggtatcagatcttttgccccctccagtgtcttcgagagaatacctctttgtacagtatggaggtgagggtgtcaggtgtgatgtagatccctcatctgttcattatgtgttcagaaggatgcagggtgtgtgatcttgtgtgacctgaaaatcaggttcctgatactgtgtatttgtaatcttgctgagtttctttggtcatgctagcaccctatgtcacacattgaacataatatcacctgctacagagaatgcaaacatcaggactcatgatgacaatgaaggatgtgatgggtttgtatctgttagccatataaggttgcacgttaagcatgcccctgacttgccggacgagcagcaagacttcgggacctagattggctaaggcactaagaatagaatagcttatctaccgatatgtaaagtcttatttccacctttcgaattcttttcctcggtagctaagcttatttagttgcctaatggtcgatgtaatctttttattgtgtgattcattccactttcatggtatttccgctcttgttacctccctctaccgcttcttcatctacatctaacctcatgcctggcgacctctaataagtaactgttgatccggccacataattggaatgccttcgcgtgaggttgccggcctttgtgtcagtcactcaacatgctctcaacatgctgaggaaggtcgttgttgtgccgtagccgagcgacgcaacaagtggctgttcagaacacggacaaggtgatgttgaacgtgtagaaacaacggcagcgtgatgcggaacgtctgaaacaac

SEQ ID NO: 53389 - DNA, 4980 bp, Zea Mays
cgtcgcttggcgcttccagagaaaaacccgaaagacgtctcgtgtcgcctccactaggcacgtcctggaaccttgcggggccggtattggaaagcaggcaagcacaacagcgatcccacaaaccacagctcggctcctcttcgccgtcgcaaccgatttatatatggcgatggaggcgtcggcggcctccgacgaaaccctagccgccgtcttcgcccagctcaagctccacaccgtcgctctcctcgacctcctccgcactcgccgccccatctctagctccggctcctccctacgcgaaatggccgctttcctccgcgccgccccggccccggcgctgcagctctgcttcgattatacagtgtttccactgctcctgctcctggatgcggcggtgcagtgcaggaagcaaggcaatgcgccggggcaggttgcagggggcattgatataggtgatgccgtcgccgaagctggtctgacctgccttgaggtcctcctcaccaagtgccacctcacctcggtcaatcagatggtagcaatgctgaaaaagttgacttccggggctatgctttcaccttcagaggcttcagaggaattccgtggtgcaattattagatgcttcagggctttggttttgcagttacagccatgcttggaccatttttgttcttgcaaacacggaatagtgttacctacgatcccaaccagtacatgcttggaggttagaagtgtagtccgcccaaatcactctgcgcagccagaggagtgcttgcttgcatttcttcagtctcaaaatgcttcagctgccgtaggacattggctctcacttcttctacaagcatcagaacttgaggcatcaagggggcaccggggaagtgcagatgttaggaaggaatcattgcacacgctgcgcattcttattggcaaggctctgctgatgcacttgcctttttccttcctggaattgtcagtcgccttgggaaggttctctacacagctaagactatgattagtggtgctgctgggagttctttgagcattgaacaagccattcttggattgaccgaggctttgatgatagtactaaatgacaaggaaaatcttagtgcacttggtaagcacaagaatgagaatcattctggtggcagtgagtcaactgagcatatattgcagatgcttcgccagttgccaaccaaaaatatatctgataagataagccatgatgagattacagatgattctgtctccaatgtcaataattcctttgctgatagaaaggcactgcatgtgaagcggaccaaaaaatggcttgaggaaacaactagtaatgttgataaattgctgtctgctacattcccacatcttgctattcattcatctgagaaggtaaggaaggcagtggttagtggtgtaaaagggcttttgtctagttgcagttctacattaaaaagaaccaagatgctacttttggaatgtttatgtgttctggcatgtgatgatgctgcagctgtgtctgaggctgcacaagatgctcttgatcatcttttcaaccaaggccacaatctcgtaacagaaaaggagatttctgatacctttactaggctggttgaaaggctaccacaagtggtacttggaagcgaggagacaaccgcactttcacatgctaggatgttgttggctctgaccttttatgctggtccccagtttctgataaatcatcttcaccgttctcctgtcattgctgctcgtttctttgattgtttgggtttatgcataggtcatagctcacagttttctggttccatggacaagctaattgtatcaaagccactatctattgggtatctttattcagttgctgagttgaagagtggcgcctattctaaagatacaactaacatatctctgcatgccacgtcaacatctgcagcctccaaaatatctgttatccatgataatgctttgccaaatgcattacttggtacagttgaatatgagttgccccatgtgcctccatggttttttcatgctggtagccagaagctttatggggttcttgctggaataattagacttgttggcctatcaacagtgtcaggggaaggaactgctgcaaccttgtctctctttgttgatattctgcttgatcagtttaggaggttgagcactgagctgagagacaaagatgtttacaacgatggtctgcagcggtggtacatgaaaggtgaagctggacaagcattgcgccaggctagttcagctgtctgcatgctcaatgagctcatgtatggtttgtcaggtcgatcccttggtatgtttttacaacttttcagcaacggatcagcacagatgccaaggacagtttgtcagaaaaatcaactgcttgcttgtgttaaacataatgcagttactaacaaaagagaagtgtggggttttagtgaacaaaagggcactaaagacaacattcttcattgcatcagcagtattctgcatgaatatgtatcaccagaagtgtgggatcttccaacagagaaggacactgagctacacctaatagagttgaacctgccattgcacttctaccgtgatacaactgcattgcacacagtagtgcttgaaggaattggagtcttgggtgttcttcttggtcaagattttgcacttagtgggtttatgcactcttccctttatcttctgctccgtgaacttatcagctcaagtgctcagataagaactgcatgtgatgctgtcttgagagcccttgctactgctggcggtcattgttcggttggccaatttgtcgttgcgaatgcagactacattattgactctctttgcaggcaattgcgtcacctggacctgaacccccatgtccctgatgttcttgcttccatgctatgttacatcggtgcttctcgtgatatcttgccattcttggaagaaccgatgcaatcaatttcttctgagcttgaggtacttggcaggcatgatcacccacgtctaactgttccatttctgaaggcagtttctgagatttccaaggcatgtagacatgaatccacttgtttgccagatgaggcacaatcattttatgagaaggtcagttctgagggtcaagaagtaaaaattatgattgagaagagaatggaatccagtgcaatatctgaaagaaagaatgttgatgctcgatcttactttatgaccttggaatactgggaagatttattttgtaagctaaatgagatgagaagatataggagaatagttgggtctcttgcgggctcttgtttatcagctgccatcccacttctctcttccaataaggaaacagcatgccttgtggcccttgacattgtggagagtgctgctatatctattgccaatgttgaggaggcttataagtgtgaatgtcaaagcaaaggagtcattgaggaggccatccagttttgttcatttgacgagcttcttgatggtacagatgccaccgaagatgttgatgaaaataggctactcccagcaatgaacaaactgtggccttacttggttatctgtctaaggaacaagatctcagtgccggttgttaggaagtgcaccgaaatgttgaggcgagcaatttgcatatctggcggcgatttttatgtacgcaggtttcataaggatggacctattgtttggaggttgctggctttatctccattccgacgtctgtcaaagatggatgaaaaagcaatcattttaccatatagggatacctcacttaactcagaggaacctatggctgagatctccagccaaaagattcagattgcagtcctggacatgatcgctgcaatatcttcgaacaagagaagtgctgttgcactagaaagcgtactaaagaaggtctgtggccttgtggtaggcattgcctacagtagtttgacaggtttgcaggaagctgctataagggcattggcaggccttgcctgcatggatgctgatcttgtctggcttctccttgcggatgtgtactactcactaaaccaaagggaatctttacttcccaaccaagatctagccctggtatcagatcttttgccccctccagtgtcttcgagagaatacctctttgtacagtatggaggtgagggtgtcaggtgtgatgtagatccctcatctgttcattatgtgttcagaaggatgcagggtgtgtgatcttgtgtgacctgaaaatcaggttcctgatactgtgtatttgtaatcttgctgagtttctttggtcatgctagcaccctatgtcacacattgaacataatatcacctgctacagagaatggtaaactttttcatacgtgttctcgcactgaaaatcatcaaggttggtcacatgtctgaagaatgattatgacaagtctttaccactttgatcataattatattaagcaaacatcaggactcatgatgacaatgaaggatgtgatgggtttgtatctgttagccatataaggttgcacgttaagcatgcccctgacttgccggacgagcagcaagacttcgggacctagattggctaaggcactaagaatagaatagcttatctaccgatatgtaaagtcttatttccacctttcgaattcttttcctcggtagctaagcttatttagttgcctaatggtcgatgtaatctttttattgtgtgattcattccactttcatggtatttccgctcttgttacctccctctaccgcttcttcatctacatctaacctcatgcctggcgacctctaataagtaactgttgatccggccacataattggaatgccttcgcgtgaggttgccggcctttgtgtcagtcactcaacatgctctcaacatgctgaggaaggtcgttgttgtgccgtagccgagcgacgcaacaagtggctgttcagaacacggacaaggtgatgttgaacgtgtagaaacaacggcagcgtgatgcggaacgtctgaaacaac

SEQ ID NO: 53390 - DNA, 4920 bp, Zea Mays
tcgtcgcttggcgcttccagagaaaaacccgaaagacgtctcgtgtcgcctccactaggcacgtcctggaaccttgcggggccggtattggaaagcaggcaagcacaacagcgatcccacaaaccacagctcggctcctcttcgccgtcgcaaccgatttatatatggcgatggaggcgtcggcggcctccgacgaaaccctagccgccgtcttcgcccagctcaagctccacaccgtcgctctcctcgacctcctccgcactcgccgccccatctctagctccggctcctccctacgcgaaatggccgctttcctccgcgccgccccggccccggcgctgcagctctgcttcgattatacagtgtttccactgctcctgctcctggatgcggcggtgcagtgcaggaagcaaggcaatgcgccggggcaggttgcagggggcattgatataggtgatgccgtcgccgaagctggtctgacctgccttgaggtcctcctcaccaagtgccacctcacctcggtcaatcagatggtagcaatgctgaaaaagttgacttccggggctatgctttcaccttcagaggcttcagaggaattccgtggtgcaattattagatgcttcagggctttggttttgcagttacagccatgcttggaccatttttgttcttgcaaacacggaatagtgttacctacgatcccaaccagtacatgcttggaggttagaagtgtagtccgcccaaatcactctgcgcagccagaggagtgcttgcttgcatttcttcagtctcaaaatgcttcagctgccgtaggacattggctctcacttcttctacaagcatcagaacttgaggcatcaagggggcaccggggaagtgcagatgttaggaaggaatcattgcacacgctgcgcattcttattggcaaggtaggctctgctgatgcacttgcctttttccttcctggaattgtcagtcgccttgggaaggttctctacacagctaagactatgattagtggtgctgctgggagttctttgagcattgaacaagccattcttggattgaccgaggctttgatgatagtactaaatgacaaggaaaatcttagtgcacttggtaagcacaagaatgagaatcattctggtggcagtgagtcaactgagcatatattgcagatgcttcgccagttgccaaccaaaaatatatctgataagataagccatgatgagattacagatgattctgtctccaatgtcaataattcctttgctgatagaaaggcactgcatgtgaagcggaccaaaaaatggcttgaggaaacaactagtaatgttgataaattgctgtctgctacattcccacatcttgctattcattcatctgagaaggtaaggaaggcagtggttagtggtgtaaaagggcttttgtctagttgcagttctacattaaaaagaaccaagatgctacttttggaatgtttatgtgttctggcatgtgatgatgctgcagctgtgtctgaggctgcacaagatgctcttgatcatcttttcaaccaaggccacaatctcgtaacagaaaaggagatttctgatacctttactaggctggttgaaaggctaccacaagtggtacttggaagcgaggagacaaccgcactttcacatgctaggatgttgttggctctgaccttttatgctggtccccagtttctgataaatcatcttcaccgttctcctgtcattgctgctcgtttctttgattgtttgggtttatgcataggtcatagctcacagttttctggttccatggacaagctaattgtatcaaagccactatctattgggtatctttattcagttgctgagttgaagagtggcgcctattctaaagatacaactaacatatctctgcatgccacgtcaacatctgcagcctccaaaatatctgttatccatgataatgctttgccaaatgcattacttggtacagttgaatatgagttgccccatgtgcctccatggttttttcatgctggtagccagaagctttatggggttcttgctggaataattagacttgttggcctatcaacagtgtcaggggaaggaactgctgcaaccttgtctctctttgttgatattctgcttgatcagtttaggaggttgagcactgagctgagagacaaagatgtttacaacgatggtctgcagcggtggtacatgaaaggtgaagctggacaagcattgcgccaggctagttcagctgtctgcatgctcaatgagctcatgtatggtttgtcaggtcgatcccttggtatgtttttacaacttttcagcaacggatcagcacagatgccaaggacagtttgtcagaaaaatcaactgcttgcttgtgttaaacataatgcagttactaacaaaagagaagtgtggggttttagtgaacaaaagggcactaaagacaacattcttcattgcatcagcagtattctgcatgaatatgtatcaccagaagtgtgggatcttccaacagagaaggacactgagctacacctaatagagttgaacctgccattgcacttctaccgtgatacaactgcattgcacacagtagtgcttgaaggaattggagtcttgggtgttcttcttggtcaagattttgcacttagtgggtttatgcactcttccctttatcttctgctccgtgaacttatcagctcaagtgctcagataagaactgcatgtgatgctgtcttgagagcccttgctactgctggcggtcattgttcggttggccaatttgtcgttgcgaatgcagactacattattgactctctttgcaggcaattgcgtcacctggacctgaacccccatgtccctgatgttcttgcttccatgctatgttacatcggtgcttctcgtgatatcttgccattcttggaagaaccgatgcaatcaatttcttctgagcttgaggtacttggcaggcatgatcacccacgtctaactgttccatttctgaaggcagtttctgagatttccaaggcatgtagacatgaatccacttgtttgccagatgaggcacaatcattttatgagaaggtcagttctgagggtcaagaagtaaaaattatgattgagaagagaatggaatccagtgcaatatctgaaagaaagaatgttgatgctcgatcttactttatgaccttggaatactgggaagatttattttgtaagctaaatgagatgagaagatataggagaatagttgggtctcttgcgggctcttgtttatcagctgccatcccacttctctcttccaataaggaaacagcatgccttgtggcccttgacattgtggagagtgctgctatatctattgccaatgttgaggaggcttataagtgtgaatgtcaaagcaaaggagtcattgaggaggccatccagttttgttcatttgacgagcttcttgatggtacagatgccaccgaagatgttgatgaaaataggctactcccagcaatgaacaaactgtggccttacttggttatctgtctaaggaacaagatctcagtgccggttgttaggaagtgcaccgaaatgttgaggcgagcaatttgcatatctggcggcgatttttatgtacgcaggtttcataaggatggacctattgtttggaggttgctggctttatctccattccgacgtctgtcaaagatggatgaaaaagcaatcattttaccatatagggatacctcacttaactcagaggaacctatggctgagatctccagccaaaagattcagattgcagtcctggacatgatcgctgcaatatcttcgaacaagagaagtgctgttgcactagaaagcgtactaaagaaggtctgtggccttgtggtaggcattgcctacagtagtttgacaggtttgcaggaagctgctataagggcattggcaggccttgcctgcatggatgctgatcttgtctggcttctccttgcggatgtgtactactcactaaaccaaagggaatctttacttcccaaccaagatctagccctggtatcagatcttttgccccctccagtgtcttcgagagaatacctctttgtacagtatggaggtgagggtgtcaggtgtgatgtagatccctcatctgttcattatgtgttcagaaggatgcagggtgtgtgatcttgtgtgacctgaaaatcaggttcctgatactgtgtatttgtaatcttgctgagtttctttggtcatgctagcaccctatgtcacacattgaacataatatcacctgctacagagaatggtaaactttttcatacgtgttctcgcactgaaaatcatcaagcaaacatcaggactcatgatgacaatgaaggatgtgatgggtttgtatctgttagccatataaggttgcacgttaagcatgcccctgacttgccggacgagcagcaagacttcgggacctagattggctaaggcactaagaatagaatagcttatctaccgatatgtaaagtcttatttccacctttcgaattcttttcctcggtagctaagcttatttagttgcctaatggtcgatgtaatctttttattgtgtgattcattccactttcatggtatttccgctcttgttacctccctctaccgcttcttcatctacatctaacctcatgcctggcgacctctaataagtaactgttgatccggccacataattggaatgccttcgcgtgaggttgccggcctttgtgtcagtcactcaacatgctctcaacatgctgaggaaggtcgttgttgtgccgtagccgagcgacgcaacaagtggctgttcagaacacggacaaggtgatgttgaacgtgtagaaacaacggcagcgtgatgcggaacgtctgaaacaac

SEQ ID NO: 53391 - DNA, 4889 bp, Zea Mays
tcgtcgcttggcgcttccagagaaaaacccgaaagacgtctcgtgtcgcctccactaggcacgtcctggaaccttgcggggccggtattggaaagcaggcaagcacaacagcgatcccacaaaccacagctcggctcctcttcgccgtcgcaaccgatttatatatggcgatggaggcgtcggcggcctccgacgaaaccctagccgccgtcttcgcccagctcaagctccacaccgtcgctctcctcgacctcctccgcactcgccgccccatctctagctccggctcctccctacgcgaaatggccgctttcctccgcgccgccccggccccggcgctgcagctctgcttcgattatacagtgtttccactgctcctgctcctggatgcggcggtgcagtgcaggaagcaaggcaatgcgccggggcaggttgcagggggcattgatataggtgatgccgtcgccgaagctggtctgacctgccttgaggtcctcctcaccaagtgccacctcacctcggtcaatcagatggtagcaatgctgaaaaagttgacttccggggctatgctttcaccttcagaggcttcagaggaattccgtggtgcaattattagatgcttcagggctttggttttgcagttacagccatgcttggaccatttttgttcttgcaaacacggaatagtgttacctacgatcccaaccagtacatgcttggaggttagaagtgtagtccgcccaaatcactctgcgcagccagaggagtgcttgcttgcatttcttcagtctcaaaatgcttcagctgccgtaggacattggctctcacttcttctacaagcatcagaacttgaggcatcaagggggcaccggggaagtgcagatgttaggaaggaatcattgcacacgctgcgcattcttattggcaaggtaggctctgctgatgcacttgcctttttccttcctggaattgtcagtcgccttgggaaggttctctacacagctaagactatgattagtggtgctgctgggagttctttgagcattgaacaagccattcttggattgaccgaggctttgatgatagtactaaatgacaaggaaaatcttagtgcacttggtaagcacaagaatgagaatcattctggtggcagtgagtcaactgagcatatattgcagatgcttcgccagttgccaaccaaaaatatatctgataagataagccatgatgagattacagatgattctgtctccaatgtcaataattcctttgctgatagaaaggcactgcatgtgaagcggaccaaaaaatggcttgaggaaacaactagtaatgttgataaattgctgtctgctacattcccacatcttgctattcattcatctgagaaggtaaggaaggcagtggttagtggtgtaaaagggcttttgtctagttgcagttctacattaaaaagaaccaagatgctacttttggaatgtttatgtgttctggcatgtgatgatgctgcagctgtgtctgaggctgcacaagatgctcttgatcatcttttcaaccaaggccacaatctcgtaacagaaaaggagatttctgatacctttactaggctggttgaaaggctaccacaagtggtacttggaagcgaggagacaaccgcactttcacatgctaggatgttgttggctctgaccttttatgctggtccccagtttctgataaatcatcttcaccgttctcctgtcattgctgctcgtttctttgattgtttgggtttatgcataggtcatagctcacagttttctggttccatggacaagctaattgtatcaaagccactatctattgggtatctttattcagttgctgagttgaagagtggcgcctattctaaagatacaactaacatatctctgcatgccacgtcaacatctgcagcctccaaaatatctgttatccatgataatgctttgccaaatgcattacttggtacagttgaatatgagttgccccatgtgcctccatggttttttcatgctggtagccagaagctttatggggttcttgctggaataattagacttgttggcctatcaacagtgtcaggggaaggaactgctgcaaccttgtctctctttgttgatattctgcttgatcagtttaggaggttgagcactgagctgagagacaaagatgtttacaacgatggtctgcagcggtggtacatgaaaggtgaagctggacaagcattgcgccaggctagttcagctgtctgcatgctcaatgagctcatgtatggtttgtcaggtcgatcccttgttactaacaaaagagaagtgtggggttttagtgaacaaaagggcactaaagacaacattcttcattgcatcagcagtattctgcatgaatatgtatcaccagaagtgtgggatcttccaacagagaaggacactgagctacacctaatagagttgaacctgccattgcacttctaccgtgatacaactgcattgcacacagtagtgcttgaaggaattggagtcttgggtgttcttcttggtcaagattttgcacttagtgggtttatgcactcttccctttatcttctgctccgtgaacttatcagctcaagtgctcagataagaactgcatgtgatgctgtcttgagagcccttgctactgctggcggtcattgttcggttggccaatttgtcgttgcgaatgcagactacattattgactctctttgcaggcaattgcgtcacctggacctgaacccccatgtccctgatgttcttgcttccatgctatgttacatcggtgcttctcgtgatatcttgccattcttggaagaaccgatgcaatcaatttcttctgagcttgaggtacttggcaggcatgatcacccacgtctaactgttccatttctgaaggcagtttctgagatttccaaggcatgtagacatgaatccacttgtttgccagatgaggcacaatcattttatgagaaggtcagttctgagggtcaagaagtaaaaattatgattgagaagagaatggaatccagtgcaatatctgaaagaaagaatgttgatgctcgatcttactttatgaccttggaatactgggaagatttattttgtaagctaaatgagatgagaagatataggagaatagttgggtctcttgcgggctcttgtttatcagctgccatcccacttctctcttccaataaggaaacagcatgccttgtggcccttgacattgtggagagtgctgctatatctattgccaatgttgaggaggcttataagtgtgaatgtcaaagcaaaggagtcattgaggaggccatccagttttgttcatttgacgagcttcttgatggtacagatgccaccgaagatgttgatgaaaataggctactcccagcaatgaacaaactgtggccttacttggttatctgtctaaggaacaagatctcagtgccggttgttaggaagtgcaccgaaatgttgaggcgagcaatttgcatatctggcggcgatttttatgtacgcaggtttcataaggatggacctattgtttggaggttgctggctttatctccattccgacgtctgtcaaagatggatgaaaaagcaatcattttaccatatagggatacctcacttaactcagaggaacctatggctgagatctccagccaaaagattcagattgcagtcctggacatgatcgctgcaatatcttcgaacaagagaagtgctgttgcactagaaagcgtactaaagaaggtctgtggccttgtggtaggcattgcctacagtagtttgacaggtttgcaggaagctgctataagggcattggcaggccttgcctgcatggatgctgatcttgtctggcttctccttgcggatgtgtactactcactaaaccaaagggaatctttacttcccaaccaagatctagccctggtatcagatcttttgccccctccagtgtcttcgagagaatacctctttgtacagtatggaggtgagggtgtcaggtgtgatgtagatccctcatctgttcattatgtgttcagaaggatgcagggtgtgtgatcttgtgtgacctgaaaatcaggttcctgatactgtgtatttgtaatcttgctgagtttctttggtcatgctagcaccctatgtcacacattgaacataatatcacctgctacagagaatggtaaactttttcatacgtgttctcgcactgaaaatcatcaaggttggtcacatgtctgaagaatgattatgacaagtctttaccactttgatcataattatattaagcaaacatcaggactcatgatgacaatgaaggatgtgatgggtttgtatctgttagccatataaggttgcacgttaagcatgcccctgacttgccggacgagcagcaagacttcgggacctagattggctaaggcactaagaatagaatagcttatctaccgatatgtaaagtcttatttccacctttcgaattcttttcctcggtagctaagcttatttagttgcctaatggtcgatgtaatctttttattgtgtgattcattccactttcatggtatttccgctcttgttacctccctctaccgcttcttcatctacatctaacctcatgcctggcgacctctaataagtaactgttgatccggccacataattggaatgccttcgcgtgaggttgccggcctttgtgtcagtcactcaacatgctctcaacatgctgaggaaggtcgttgttgtgccgtagccgagcgacgcaacaagtggctgttcagaacacggacaaggtgatgttgaacgtgtagaaacaacggcagcgtgatgcggaacgtctgaaacaac

SEQ ID NO: 53392 - DNA, 4956 bp, Zea Mays
ctcgtcgcttggcgcttccagagaaaaacccgaaagacgtctcgtgtcgcctccactaggcacgtcctggaaccttgcggggccggtattggaaagcaggcaagcacaacagcgatcccacaaaccacagctcggctcctcttcgccgtcgcaaccgatttatatatggcgatggaggcgtcggcggcctccgacgaaaccctagccgccgtcttcgcccagctcaagctccacaccgtcgctctcctcgacctcctccgcactcgccgccccatctctagctccggctcctccctacgcgaaatggccgctttcctccgcgccgccccggccccggcgctgcagctctgcttcgattatacagtgtttccactgctcctgctcctggatgcggcggtgcagtgcaggaagcaaggcaatgcgccggggcaggttgcagggggcattgatataggtgatgccgtcgccgaagctggtctgacctgccttgaggtcctcctcaccaagtgccacctcacctcggtcaatcagatggtagcaatgctgaaaaagttgacttccggggctatgctttcaccttcagaggcttcagaggaattccgtggtgcaattattagatgcttcagggctttggttttgcagttacagccatgcttggaccatttttgttcttgcaaacacggaatagtgttacctacgatcccaaccagtacatgcttggaggttagaagtgtagtccgcccaaatcactctgcgcagccagaggagtgcttgcttgcatttcttcagtctcaaaatgcttcagctgccgtaggacattggctctcacttcttctacaagcatcagaacttgaggcatcaagggggcaccggggaagtgcagatgttaggaaggaatcattgcacacgctgcgcattcttattggcaaggtaggctctgctgatgcacttgcctttttccttcctggaattgtcagtcgccttgggaaggttctctacacagctaagactatgattagtggtgctgctgggagttctttgagcattgaacaagccattcttggattgaccgaggctttgatgatagtactaaatgacaaggaaaatcttagtgcacttggtaagcacaagaatgagaatcattctggtggcagtgagtcaactgagcatatattgcagatgcttcgccagttgccaaccaaaaatatatctgataagataagccatgatgagattacagatgattctgtctccaatgtcaataattcctttgctgatagaaaggcactgcatgtgaagcggaccaaaaaatggcttgaggaaacaactagtaatgttgataaattgctgtctgctacattcccacatcttgctattcattcatctgagaaggtaaggaaggcagtggttagtggtgtaaaagggcttttgtctagttgcagttctacattaaaaagaaccaagatgctacttttggaatgtttatgtgttctggcatgtgatgatgctgcagctgtgtctgaggctgcacaagatgctcttgatcatcttttcaaccaaggccacaatctcgtaacagaaaaggagatttctgatacctttactaggctggttgaaaggctaccacaagtggtacttggaagcgaggagacaaccgcactttcacatgctaggatgttgttggctctgaccttttatgctggtccccagtttctgataaatcatcttcaccgttctcctgtcattgctgctcgtttctttgattgtttgggtttatgcataggtcatagctcacagttttctggttccatggacaagctaattgtatcaaagccactatctattgggtatctttattcagttgctgagttgaagagtggcgcctattctaaagatacaactaacatatctctgcatgccacgtcaacatctgcagcctccaaaatatctgttatccatgataatgctttgccaaatgcattacttggtacagttgaatatgagttgccccatgtgcctccatggttttttcatgctggtagccagaagctttatggggttcttgctggaataattagacttgttggcctatcaacagtgtcaggggaaggaactgctgcaaccttgtctctctttgttgatattctgcttgatcagtttaggaggttgagcactgagctgagagacaaagatgtttacaacgatggtctgcagcggtggtacatgaaaggtgaagctggacaagcattgcgccaggctagttcagctgtctgcatgctcaatgagctcatgtatggtttgtcaggtcgatcccttggtatgtttttacaacttttcagcaacggatcagcacagatgccaaggacagtttgtcagaaaaatcaactgcttgcttgtgttaaacataatgcagttactaacaaaagagaagtgtggggttttagtgaacaaaagggcactaaagacaacattcttcattgcatcagcagtattctgcatgaatatgtatcaccagaagtgtgggatcttccaacagagaaggacactgagctacacctaatagagttgaacctgccattgcacttctaccgtgatacaactgcattgcacacagtagtgcttgaaggaattggagtcttgggtgttcttcttggtcaagattttgcacttagtgggtttatgcactcttccctttatcttctgctccgtgaacttatcagctcaagtgctcagataagaactgcatgtgatgctgtcttgagagcccttgctactgctggcggtcattgttcggttggccaatttgtcgttgcgaatgcagactacattattgactctctttgcaggcaattgcgtcacctggacctgaacccccatgtccctgatgttcttgcttccatgctatgttacatcggtgcttctcgtgatatcttgccattcttggaagaaccgatgcaatcaatttcttctgagcttgaggtacttggcaggcatgatcacccacgtctaactgttccatttctgaaggcagtttctgagatttccaaggcatgtagacatgaatccacttgtttgccagatgaggcacaatcattttatgagaaggtcagttctgagggtcaagaagtaaaaattatgattgagaagagaatggaatccagtgcaatatctgaaagaaagaatgttgatgctcgatcttactttatgaccttggaatactgggaagatttattttgtaagctaaatgagatgagaagatataggagaatagttgggtctcttgcgggctcttgtttatcagctgccatcccacttctctcttccaataaggaaacagcatgccttgtggcccttgacattgtggagagtgctgctatatctattgccaatgttgaggaggcttataagtgtgaatgtcaaagcaaaggagtcattgaggaggccatccagttttgttcatttgacgagcttcttgatggtacagatgccaccgaagatgttgatgaaaataggctactcccagcaatgaacaaactgtggccttacttggttatctgtctaaggaacaagatctcagtgccggttgttaggaagtgcaccgaaatgttgaggcgagcaatttgcatatctggcggcgatttttatgtacgcaggtttcataaggatggacctattgtttggaggttgctggctttatctccattccgacgtctgtcaaagatggatgaaaaagcaatcattttaccatatagggatacctcacttaactcagaggaacctatggctgagatctccagccaaaagattcagattgcagtcctggacatgatcgctgcaatatcttcgaacaagagaagtgctgttgcactagaaagcgtactaaagaaggtctgtggccttgtggtaggcattgcctacagtagtttgacaggtttgcaggaagctgctataagggcattggcaggccttgcctgcatggatgctgatcttgtctggcttctccttgcggatgtgtactactcactaaaccaaagggaatctttacttcccaaccaagatctagccctggtatcagatcttttgccccctccagtgtcttcgagagaatacctctttgtacagtatggaggtgagggtgtcaggtgtgatgtagatccctcatctgttcattatgtgttcagaaggatgcagggttcctgatactgtgtatttgtaatcttgctgagtttctttggtcatgctagcaccctatgtcacacattgaacataatatcacctgctacagagaatggtaaactttttcatacgtgttctcgcactgaaaatcatcaaggttggtcacatgtctgaagaatgattatgacaagtctttaccactttgatcataattatattaagcaaacatcaggactcatgatgacaatgaaggatgtgatgggtttgtatctgttagccatataaggttgcacgttaagcatgcccctgacttgccggacgagcagcaagacttcgggacctagattggctaaggcactaagaatagaatagcttatctaccgatatgtaaagtcttatttccacctttcgaattcttttcctcggtagctaagcttatttagttgcctaatggtcgatgtaatctttttattgtgtgattcattccactttcatggtatttccgctcttgttacctccctctaccgcttcttcatctacatctaacctcatgcctggcgacctctaataagtaactgttgatccggccacataattggaatgccttcgcgtgaggttgccggcctttgtgtcagtcactcaacatgctctcaacatgctgaggaaggtcgttgttgtgccgtagccgagcgacgcaacaagtggctgttcagaacacggacaaggtgatgttgaacgtgtagaaacaacggcagcgtgatgcggaacgtctgaaacaac

SEQ ID NO: 53393 - DNA, 2237 bp, Zea Mays
aataaatgagacgtctctacagccgtctctatggggttttctgtaaaatttgtatccaccgggctctctgtggatagcccgtctctggtgcgttgctcgatggggaagagacggggacggctcaggctgtacatgttcgagtgtctcttccagatccgatgcggattgccagcttcattccctccaaatttctatcttcgcgcgggttttttcatttcgcgttgcgctttccttttgggcccattctgaactgaagcagtgccaggagagatcggccatgcagcagaagacgggcgccgctgcaggcatcggcttgcgacggtcgacctccactgccccgacaagccgccgctggatcccaccttcccccgctgtggcccctttgcccgcagccgccccgtccgcggttgccccatctggcccgtatgcaaccaccagcgccgcccaggcaggctccccgtcagcgtcaccagacgacgcgctgctctcccgcggcgcgcggatgggtttccgcgtcggcaccccgcccgacccgtcgtcttgtccaggcggtgcacggctctacaacgcaccaacagcggcaatgttcccctccaccaccggcccgtcgttctttgatttgcttcaaagcttcgagggcatcatgagctgtatgatgattcagccacacaaccagcccaaaaatgctcattttattggacatctgggacatacactaaataaccctattaacattcaggtgaagatgcttatgaagaagatgagatggagatggagttaggaccgtggcacgactaatctagaaacaaaaagatgggagagtggggaaacagcaaaaaatctgaacaatattggtcggatgtggcacaagagtacaacctgactactccaaagaacagacagaggactaaaaatcaggttaaggagaggtggcagtggcacaagataaataagtgggctagcatgttcaatgactgttatttgaagactaagaggaaggagacacagaaggataacaatgtagagggatgtggacttgatgatattgatcttcctcggtcaatgggacagaagaaggctaaacatgctgcatgtgaaagaaaaggaaaaacaaaagatagtgccatagacatcgatgagcttgatagatttgagaagatccagaatgatgttcgtgctaatcggcttaagctactagaaatgcaaggaaagttaaataacgacaagatggagctatcaaaaattgctctccaataagcaaaggaagggaaagatgcaaaactaattgaaaaggaaacaaagatgatggaaacttattccaccctcctcaatcaagacacttctggaatgaccgatgatatgaaagttgagcatgttgctgctctcaaatgttttaggcacaaattgccccagatttaccttaaaatgttgtaaccttactactagtcctgtccctagatttttattgtgaacctatggttacctgaacttatggttatctgaacctatggttatctaaatttgtgcctatctgattcctattgttgttctgatggtgtttatctcagatttatattatgtgaatgtgtgtttatctcagatttgtattgtgtacctatacttatcccacatttatattgtgtgaacctgattgctcttatgtgaaccggtttgcatctgtccaaggcctgtatattataaccaaaggagactctctgatcagtattgtttctgttcttccaggctacaatatttgagttgtgcgtcttttgcaatggtgttcctctctgttcactagtttctctgatcaccaaggatatcatggcttctctagtcaccaaggagcttcggcaccggaacacctttgatgcaggacaatgaaggggcgacgaagctagcttcgtcatagcaacacatggagacaatgcaaggagaaagagtcatcctgaatgctgaaagcaaaagataatgttgcccttgtattatttgtaaattctgtgtaatccttgtgggtgtacatgtaatttcgtacgaagctgtacgattccctataaatagatgaatagtgtcatgcataaagtatcttttgaagggctggacaatagctgtgtgtaatcctttctctagagcaccttcgtcttaactcactttgtgaagtcgaatgtacgattgtaaaattcattatatgaaagaggagaaatgtgatatgaatatatctgagatgagttatcatgttt

SEQ ID NO: 53394 - DNA, 2498 bp, Zea Mays
gaataatcgagtcaagactagaaatcatcacccttcctgtacaacaccaataaatgagacgtctctacagccgtctctatggggttttctgtaaaatttgtatccaccgggctctctgtggatagcccgtctctggtgcgttgctcgatggggaagagacggggacggctcaggctgtacatgttcgagtgtctcttccagatccgatgcggattgccagcttcattccctccaaatttctatcttcgcgcgggttttttcatttcgcgttgcgctttccttttgggcccattctgaactgaagcagtgccaggagagatcggccatgcagcagaagacgggcgccgctgcaggcatcggcttgcgacggtcgacctccactgccccgacaagccgccgctggatcccaccttcccccgctgtggcccctttgcccgcagccgccccgtccgcggttgccccatctggcccgtatgcaaccaccagcgccgcccaggcaggctccccgtcagcgtcaccagacgacgcgctgctctcccgcggcgcgcggatgggtttccgcgtcggcaccccgcccgacccgtcgtcttgtccaggcggtgcacggctctacaacgcaccaacagcggcaatgttcccctccaccaccggcccgtcgttctttgatttgcttcaaaggtaagcagagtctgattcttgaattgcattagctttgttgaagatggtaggagaggaaatatctctcgtccattagcagtaaacatacaagaaatttcgtctttggataatcatgaacaaccagatctgcataatcaaatgtatgtttaacacaactgaacaagcttctttggataatcagatgtatgttaaactgagtggttgtaccaaatctgagtgtttgttaaacttttgcagcttcgagggcatcatgagctgtatgatgattcagccacacaaccagcccaaaaatgctcattttattggacatctgggacatacactaaataaccctattaacattcaggtgaagatgcttatgaagaagatgagatggagatggagttaggaccgtggcacgactaatctagaaacaaaaagatgggagagtgatgagtgcatggctcaaacactctgttgactcaattaggggaaacagcaaaaaatctgaacaatattggtcggatgtggcacaagagtacaacctgactactccaaagaacagacagaggactaaaaatcaggttaaggagaggtggcagtggcacaagataaataagtgggctagcatgttcaatgactgttatttgaagactaagaggaaggagacacagaaggataacaatgtagagggatgtggacttgatgatattgatcttcctcggtcaatgggacagaagaaggctaaacatgctgcatgtgaaagaaaaggaaaaacaaaagatagtgccatagacatcgatgagcttgatagatttgagaagatccagaatgatgttcgtgctaatcggcttaagctactagaaatgcaaggaaagttaaataacgacaagatggagctatcaaaaattgctctccaataagcaaaggaagggaaagatgcaaaactaattgaaaaggaaacaaagatgatggaaacttattccaccctcctcaatcaagacacttctggaatgaccgatgatatgaaagttgagcatgttgctgctctcaaatgttttaggcacaaattgccccagatttaccttaaaatgttgtaaccttactactagtcctgtccctagatttttattgtgaacctatggttacctgaacttatggttatctgaacctatggttatctaaatttgtgcctatctgattcctattgttgttctgatggtgtttatctcagatttatattgtgtgaacctgattgctcttatgtgaaccggtttgcatctgtccaaggcctgtatattataaccaaaggagactctctgatcagtattgtttctgttcttccaggctacaatatttgagttgtgcgtcttttgcaatggtgttcctctctgttcactagtttctctgatcaccaaggatatcatggcttctctagtcaccaaggagcttcggcaccggaacacctttgatgcaggacaatgaaggggcgacgaagctagcttcgtcatagcaacacatggagacaatgcaaggagaaagagtcatcctgaatgctgaaagcaaaagataatgttgcccttgtattatttgtaaattctgtgtaatccttgtgggtgtacatgtaatttcgtacgaagctgtacgattccctataaatagatgaatagtgtcatgcataaagtatcttttgaagggctggacaatagctgtgtgtaatcctttctctagagcaccttcgtcttaactcactttgtgaagtcgaatgtacgattgtaaaattcattatatgaaagaggagaaatgtgatatgaatatatctgagatgagttatcatgttt

SEQ ID NO: 53395 - DNA, 2152 bp, Zea Mays
gaataatcgagtcaagactagaaatcatcacccttcctgtacaacaccaataaatgagacgtctctacagccgtctctatggggttttctgtaaaatttgtatccaccgggctctctgtggatagcccgtctctggtgcgttgctcgatggggaagagacggggacggctcaggctgtacatgttcgagtgtctcttccagatccgatgcggattgccagcttcattccctccaaatttctatcttcgcgcgggttttttcatttcgcgttgcgctttccttttgggcccattctgaactgaagcagtgccaggagagatcggccatgcagcagaagacgggcgccgctgcaggcatcggcttgcgacggtcgacctccactgccccgacaagccgccgctggatcccaccttcccccgctgtggcccctttgcccgcagccgccccgtccgcggttgccccatctggcccgtatgcaaccaccagcgccgcccaggcaggctccccgtcagcgtcaccagacgacgcgctgctctcccgcggcgcgcggatgggtttccgcgtcggcaccccgcccgacccgtcgtcttgtccaggcggtgcacggctctacaacgcaccaacagcggcaatgttcccctccaccaccggcccgtcgttctttgatttgcttcaaaggtgaagatgcttatgaagaagatgagatggagatggagttaggaccgtggcacgactaatctagaaacaaaaagatgggagagtgatgagtgcatggctcaaacactctgttgactcaattaggggaaacagcaaaaaatctgaacaatattggtcggatgtggcacaagagtacaacctgactactccaaagaacagacagaggactaaaaatcaggttaaggagaggtggcagtggcacaagataaataagtgggctagcatgttcaatgactgttatttgaagactaagaggaaggagacacagaaggataacaatgtagagggatgtggacttgatgatattgatcttcctcggtcaatgggacagaagaaggctaaacatgctgcatgtgaaagaaaaggaaaaacaaaagatagtgccatagacatcgatgagcttgatagatttgagaagatccagaatgatgttcgtgctaatcggcttaagctactagaaatgcaaggaaagttaaataacgacaagatggagctatcaaaaattgctctccaataagcaaaggaagggaaagatgcaaaactaattgaaaaggaaacaaagatgatggaaacttattccaccctcctcaatcaagacacttctggaatgaccgatgatatgaaagttgagcatgttgctgctctcaaatgttttaggcacaaattgccccagatttaccttaaaatgttgtaaccttactactagtcctgtccctagatttttattgtgaacctatggttacctgaacttatggttatctgaacctatggttatctaaatttgtgcctatctgattcctattgttgttctgatggtgtttatctcagatttatattgtgtgaacctgattgctcttatgtgaaccggtttgcatctgtccaaggcctgtatattataaccaaaggagactctctgatcagtattgtttctgttcttccaggctacaatatttgagttgtgcgtcttttgcaatggtgttcctctctgttcactagtttctctgatcaccaaggatatcatggcttctctagtcaccaaggagcttcggcaccggaacacctttgatgcaggacaatgaaggggcgacgaagctagcttcgtcatagcaacacatggagacaatgcaaggagaaagagtcatcctgaatgctgaaagcaaaagataatgttgcccttgtattatttgtaaattctgtgtaatccttgtgggtgtacatgtaatttcgtacgaagctgtacgattccctataaatagatgaatagtgtcatgcataaagtatcttttgaagggctggacaatagctgtgtgtaatcctttctctagagcaccttcgtcttaactcactttgtgaagtcgaatgtacgattgtaaaattcattatatgaaagaggagaaatgtgatatgaatatatctgagatgagttatcatgttt

SEQ ID NO: 53396 - DNA, 2900 bp, Zea Mays
atgtcatatacgtactgatacagggcgtgccgactttccagggcgccaattcccctccaagatccgtcttctccggccgctccacccaattcgtcgtcctccccgcctccggatctgaacatgagcgacgcgaccacggcccccgccaccggagccggggaccacgttgtcgatgccgccgcgcacaagccgccggctgccccgtcgccggacatggcaagcatcagacggggcgggagctccgtgaccgagacagtcacccaggcaacgcagcagcagcagtcgcggctggacgacgaccagctggcggagctgcgggagatattccggtccttcgaccgcaacgccgacggcagcctgacgcagctggagctgggctccttgctccggtccctgggcctgacgcccagcgccgaccagctcgacgcgctcatcacccgtgccgacaccaactccaacggcctcatcgagttctccgagtttgtggcgctcgtggcccccgacctcctccaagaccggtccccttactcggaggaccagctccgcaagctcttcgccatcttcgaccgcgacggcaacgggttcatcaccgcggccgagctggcgcactccatggccaagctcggccacgcgctcaccgtcaaggagctcacgggaatgatcaaggaggcagacaccgacggcgatggccgcatcaatttccaggagttctcgcgcgccatcaccgccgccgcatttgacaacatcttctcctgaccgaccgaccgaccgaggccgcaaacaggatgcgttgtgtcgatcatcgattcagttcttggtgattctcagttttcaatttgttcgtcttcttttggggagattaatttaggaagctatagatgaggtgaggtgttcttatgaataacagatcaaacaaaaaaggaatcaatttagggacaaattacatgcatggttgattgtgttcgtctatttccatgattgtttgcgagcccgttacatttgtgcatgccattttagtctttgtaaatatgttgggcggatcgcgaataatcgagtcaagactagaaatcatcacccttcctgtacaacaccaataaatgagacgtctctacagccgtctctatggggttttctgtaaaatttgtatccaccgggctctctgtggatagcccgtctctggtgcgttgctcgatggggaagagacggggacggctcaggctgtacatgttcgagtgtctcttccagatccgatgcggattgccagcttcattccctccaaatttctatcttcgcgcgggttttttcatttcgcgttgcgctttccttttgggcccattctgaactgaagcagtgccaggagagatcggccatgcagcagaagacgggcgccgctgcaggcatcggcttgcgacggtcgacctccactgccccgacaagccgccgctggatcccaccttcccccgctgtggcccctttgcccgcagccgccccgtccgcggttgccccatctggcccgtatgcaaccaccagcgccgcccaggcaggctccccgtcagcgtcaccagacgacgcgctgctctcccgcggcgcgcggatgggtttccgcgtcggcaccccgcccgacccgtcgtcttgtccaggcggtgcacggctctacaacgcaccaacagcggcaatgttcccctccaccaccggcccgtcgttctttgatttgcttcaaagcttcgagggcatcatgagctgtgaagatgcttatgaagaagatgagatggagatggagttaggaccgtggcacgactaatctagaaacaaaaagatgggagagtgatgagtgcatggctcaaacactctgttgactcaattaggggaaacagcaaaaaatctgaacaatattggtcggatgtggcacaagagtacaacctgactactccaaagaacagacagaggactaaaaatcaggttaaggagaggtggcagtggcacaagataaataagtgggctagcatgttcaatgactgttatttgaagactaagaggaaggagacacagaaggataacaatgtagagggatgtggacttgatgatattgatcttcctcggtcaatgggacagaagaaggctaaacatgctgcatgtgaaagaaaaggaaaaacaaaagatagtgccatagacatcgatgagcttgatagatttgagaagatccagaatgatgttcgtgctaatcggcttaagctactagaaatgcaaggaaagttaaataacgacaagatggagctatcaaaaattgctctccaataagcaaaggaagggaaagatgcaaaactaattgaaaaggaaacaaagatgatggaaacttattccaccctcctcaatcaagacacttctggaatgaccgatgatatgaaagctacaatatttgagttgtgcgtcttttgcaatggtgttcctctctgttcactagtttctctgatcaccaaggatatcatggcttctctagtcaccaaggagcttcggcaccggaacacctttgatgcaggacaatgaaggggcgacgaagctagcttcgtcatagcaacacatggagacaatgcaaggagaaagagtcatcctgaatgctgaaagcaaaagataatgttgcccttgtattatttgtaaattctgtgtaatccttgtgggtgtacatgtaatttcgtacgaagctgtacgattccctataaatagatgaatagtgtcatgcataaagtatcttttgaagggctggacaatagctgtgtgtaatcctttctctagagcaccttcgtcttaactcactttgtgaagtcgaatgtacgattgtaaaattcattatatgaaagaggagaaatgtgatatgaatatatctgagatgagttatcatgttt

SEQ ID NO: 53397 - DNA, 3285 bp, Zea Mays
gtggtgccgtgtcgtgccacagtttggaaaactgctattcgttgtcagttgttggcttgttgccctctcatgtcatatacgtactgatacagggcgtgccgactttccagggcgccaattcccctccaagatccgtcttctccggccgctccacccaattcgtcgtcctccccgcctccggatctgaacatgagcgacgcgaccacggcccccgccaccggagccggggaccacgttgtcgatgccgccgcgcacaagccgccggctgccccgtcgccggacatggcaagcatcagacggggcgggagctccgtgaccgagacagtcacccaggcaacgcagcagcagcagtcgcggctggacgacgaccagctggcggagctgcgggagatattccggtccttcgaccgcaacgccgacggcagcctgacgcagctggagctgggctccttgctccggtccctgggcctgacgcccagcgccgaccagctcgacgcgctcatcacccgtgccgacaccaactccaacggcctcatcgagttctccgagtttgtggcgctcgtggcccccgacctcctccaagaccggtccccttactcggaggaccagctccgcaagctcttcgccatcttcgaccgcgacggcaacgggttcatcaccgcggccgagctggcgcactccatggccaagctcggccacgcgctcaccgtcaaggagctcacgggaatgatcaaggaggcagacaccgacggcgatggccgcatcaatttccaggagttctcgcgcgccatcaccgccgccgcatttgacaacatcttctcctgaccgaccgaccgaccgaggccgcaaacaggatgcgttgtgtcgatcatcgattcagttcttggtgattctcagttttcaatttgttcgtcttcttttggggagattaatttaggaagctatagatgaggtgaggtgttcttatgaataacagatcaaacaaaaaaggaatcaatttagggacaaattacatgcatggttgattgtgttcgtctatttccatgattgtttgcgagcccgttacatttgtgcatgccattttagtctttgtaaatatgttgggcggatcgcgaataatcgagtcaagactagaaatcatcacccttcctgtacaacaccaataaatgagacgtctctacagccgtctctatggggttttctgtaaaatttgtatccaccgggctctctgtggatagcccgtctctggtgcgttgctcgatggggaagagacggggacggctcaggctgtacatgttcgagtgtctcttccagatccgatgcggattgccagcttcattccctccaaatttctatcttcgcgcgggttttttcatttcgcgttgcgctttccttttgggcccattctgaactgaagcagtgccaggagagatcggccatgcagcagaagacgggcgccgctgcaggcatcggcttgcgacggtcgacctccactgccccgacaagccgccgctggatcccaccttcccccgctgtggcccctttgcccgcagccgccccgtccgcggttgccccatctggcccgtatgcaaccaccagcgccgcccaggcaggctccccgtcagcgtcaccagacgacgcgctgctctcccgcggcgcgcggatgggtttccgcgtcggcaccccgcccgacccgtcgtcttgtccaggcggtgcacggctctacaacgcaccaacagcggcaatgttcccctccaccaccggcccgtcgttctttgatttgcttcaaagcttcgagggcatcatgagctgtgaagatgcttatgaagaagatgagatggagatggagttaggaccgtggcacgactaatctagaaacaaaaagatgggagagtgatgagtgcatggctcaaacactctgttgactcaattaggggaaacagcaaaaaatctgaacaatattggtcggatgtggcacaagagtacaacctgactactccaaagaacagacagaggactaaaaatcaggttaaggagaggtggcagtggcacaagataaataagtgggctagcatgttcaatgactgttatttgaagactaagaggaaggagacacagaaggataacaatgtagagggatgtggacttgatgatattgatcttcctcggtcaatgggacagaagaaggctaaacatgctgcatgtgaaagaaaaggaaaaacaaaagatagtgccatagacatcgatgagcttgatagatttgagaagatccagaatgatgttcgtgctaatcggcttaagctactagaaatgcaaggaaagttaaataacgacaagatggagctatcaaaaattgctctccaataagcaaaggaagggaaagatgcaaaactaattgaaaaggaaacaaagatgatggaaacttattccaccctcctcaatcaagacacttctggaatgaccgatgatatgaaagttgagcatgttgctgctctcaaatgttttaggcacaaattgccccagatttaccttaaaatgttgtaaccttactactagtcctgtccctagatttttattgtgaacctatggttacctgaacttatggttatctgaacctatggttatctaaatttgtgcctatctgattcctattgttgttctgatggtgtttatctcagatttatattgtgtgaacctgattgctcttatgtgaaccggtttgcatctgtccaaggcctgtatattataaccaaaggagactctctgatcagtattgtttctgttcttccaggctacaatatttgagttgtgcgtcttttgcaatggtgttcctctctgttcactagtttctctgatcaccaaggatatcatggcttctctagtcaccaaggagcttcggcaccggaacacctttgatgcaggacaatgaaggggcgacgaagctagcttcgtcatagcaacacatggagacaatgcaaggagaaagagtcatcctgaatgctgaaagcaaaagataatgttgcccttgtattatttgtaaattctgtgtaatccttgtgggtgtacatgtaatttcgtacgaagctgtacgattccctataaatagatgaatagtgtcatgcataaagtatcttttgaagggctggacaatagctgtgtgtaatcctttctctagagcaccttcgtcttaactcactttgtgaagtcgaatgtacgattgtaaaattcattatatgaaagaggagaaatgtgatatgaatatatctgagatgagttatcatgttt

SEQ ID NO: 53398 - DNA, 896 bp, Zea Mays
taattaattaaaaatcgaaaatctattattctctgttgccgaatcgagcgcaagctcatgaaccgacgcgtgtggcatgcagctgtgagagacggagtggccgttacggtccgaatttgaggatttacagacatgaaacaccatctgaagaaaggcacattcgcgtgtggcggaaatcaccagacgagacggtacaccacatttgacgatgaaaagcaactacggcgcagggaaatcggcgaagaagagagccaagaaaaaaacaccaaatgaagcgtcgggtctagctggattactggatactactagatctgccattgaagaaaagaagagaaaaccgacaggcggaacaagagcgcgagcaaataaaaataagagagagagagagagagagagagagagagagagagagagagagagagaacgcaagggtccgggagcagggagggcgaaagtaattcacctcgatctggaggacggcagcattgtggacgtgtggtggtgtgaggccggggcaagggaggagtgcccggccgactggagaagtggagagtgggggtgccggtgggaggcggagggggagggacggggaagcagcaggaggcacaaaaagcctgcaaagccaaaaggcggccgaaagggctgtgggaggcgaggtgtcaggtgtgcaggccgccagacgcccaggccagaggaagcagcgtccgtccgtcgtctcccgtcgccgacggcaaagcgaattcctcgttcccgaactactcctacgtgctacactgctccatctccggctgcgaggacgaagaaggtgagagcggtcgttggctggctggctcgtcgcgagctgcggtacactgtggctctatgcctctatagtgcatcgtcatccttgctcgtgc

SEQ ID NO: 53399 - DNA, 2337 bp, Zea Mays
cttgcacaccagcagcaacaaaccacgcaacggctagtacggaagaagaggggcgagcggcgagcagcgccgttccgtcttcgccgtctcctcgtccgttcgccaagacaacggtcatattaccgttgtcctgccaaaattccaacactttaaaactgccacccaacgcgctcctccgccgccgtctccagcacacgcttccccttccctcccgctcccattcacgtcgtctctttcctcgagcctccgcttcgccagcgacgcgcccttctcacccacctcgccgaggaagtattcaccgatggagacgccgctgtcttccaggaggatcacccgctcgctcgccgccgcatctgcccagaagagcgccgccgccgggccggactccgccgccctcttctcccgcgccaagaacgccgccgctggggagacccagcctcgcgccgccctgcacgacatcaccaacgactcccccatcgtcgggctcgcggcgggcgccctccacgccaccgataccacccccgcctccaccgccgccaagacccgccgcagggccccgcgtcgcacgcccggctccggggaggcgctcctgcgcggccaggtcaaggcgctcctccacaaggtcgaagaggagcagggctgcgccgccgcggccatcgtcaggcccgcgcgcatccaggcgctgctcggtgtatccaggtcgccggcccagcttcttgcgccgacgccagccaacacgccgcagatcgagcccgtccccactcccagggaaggtctcctcctgcttgatggcgctacggtcgtgccctgcgtcctagacgaagaggaactgctgattcctaagcttcaggtaatgtaactgtcgattctgcacttattgaaccccccttgtatgaaatcttccaacttcccgaggagcaatactctgcaactcggcatgtgcatggtaggtagaacttgatccaatgtttctgttccaatttcagtcagggaacgcatatagtcaaccttatgccgaagtacctaccatttgtccaattcatctagtatcttcattcgttaaccttatttgtgcacgtccatgagattagatgcaattctgcatgacctgttgtatgtaggggtggtaatgggttcctatttttccctgaactaaaattaattaaggcgagtaactgtaagcagtataatcttgatatatgatgaattttctgaatgttttcatgttgcactgttagcccctactcaaatgtcaatggcatcccagctctttcagaactgcaaattagatttctactcgtatcatctaacctggaattcagcctagatgttttagaggcgtagcactttgtcgtaaggtgtcttcctgctgctccccttattgtgcaggtcattgcagcttccctacctccacctcatcaggcagaggagaagctcggggactgccagctgaaccgtgcgctggtgttcgatgactcccctgagaaatgtgaagagtccagtggatcagccgtctcgtcaaccttctccctccaggagagcagcaccggcagctacgtggacaagtcatcatcacctgaggacgacagctcctctgcctggtccattcaggtccatgccagctctgagaagggcgacgaagaagagctgggcgtggaggagctggcagcagagtacactgacgaagaggaggaggaggaggaggaggactgggacgaagacagcgatgacgactgctacgatgatctgtgcgaggagatgagcaggatgaccgtgttggaggaggaggagaagaagaagaccgtgctgccgcagttcgaggggaagcacaccaggttcatctacaacagtgacgacgagatcgagcgggtggaggaggcggatgcagctgaggcgacggcggagcttcgcgcattgatgctcaggggcctgctggtgccggaggggaggcacctgcgcttccacgacgaggatgccgacgaataagaatctcagttgtgttgtcaagtggttggttgtctttcgctgacaccagccaaaattcttttgcggggctctgagtccagttctgtacgttgattcatgtctccgttcttaagagaaataatccaacttttctgaaaatcaaaaattttgtggcattcgattacatggcaagtcttttatgtgctgtgtgctatgtgggaactctcatgtttctgattttttttgtaccttcaaattttcttctagcgccaaacgatttctacaaccctaaacctctgggactcaggaatgttgacgatttttttgattttttttattttgcggaacgacctggcctactgagggtcgaca

SEQ ID NO: 53400 - DNA, 3341 bp, Zea Mays
aataatgcaagtggggtcacggcaaaggtgtggcgcgtgcgtggacctcgccctcatctcgtctcctccggcggtccggcctgtccaataattctagtattccaccgccgcacacctcctgtcttccttcaccttcgcgctccgccgccgccgtcgattcgtgctgctctcacccctaacctgtccaacatcgccggggagggaagcagcagaagaagctccccttacctccggctatcgcctgaggataaagtggggtctgtaggggagtcttaggggggagcaaaagggataggatagggagagatgaagcaatcaatttcttcgtccgccttcgcccctgcttacgtccccgctactaaccctaggatcattctgtcttttctcgtttcttatccgactcttcttcgttttatgcctatcagttatgaggttgaacgccttcagaagcttctctactagattagtgtaaatagtagacttgttcgagtttagcttggctggaagaattagtctctggtccgtgtttatatctgctagcaataatggctgcgatgaacggagaggtattgggtgaatgtggaaggaacataaatagtctcaagagaaagcgggagagccccgctgcatatgctgctggcgtattctgcacctctgaattgcatcagcatactgtcaatgattctgctgttaggtttcatcttgataaagaccgtaaggcaaagatcgtgtgccacttcaacaagcaggttttgcagagctataagaaattcatgagtagtgcaccacctaagcgtattttgcttcgccaaggtgctgtctggaaagactttccagaaaagattgtcaaattggcccaagctgacttcagggcaaaaaagatgatcacagaaacaggatatcagaaccagctatttttgctggattttgcccatatgacattcatagacacaaagacaggttttcagaggccaattgcttggatcgatgaaaatgaaaagtgctacttcccggaatcatttatacaagatcagaagttatttatgaagaaagattttggcaacggaaatcatgagtacattagtgaagagcgaaatgggacacgagaaacgaatcaccagtttggagcatcagaaagttctgctgaaagctcaaactttgagtcaagtattggagatgtttctagtcctaagagagctagggctgaaaagaatttcattgtaaaaaaatattgtgatatgggagaagctattggagaaaatgagtcatgcactttgttgcctacagcctgtaacctactaccacaccaagctaatctgggtgaggtatcccgtgctcagcgcactattgaagccgtggagaagctgttgctgcaggggatgggttcagttattgaatccaaggacattattggaatctacaggactccattattggatgaccacggacaagtccgttaccatattcaccaaaagcaagtacaggttaccggatgtcatcgtggaaacgcaaatgtccgttatgcatggcttccttgctccaaaagcactgtgcatgtaatgatgctgaatggtgttttgcaagttgataagcctcccaataagtgtgcagcctatggagagggcactctccttacaccagcaaatcgttcggatgcctggtatgttcttgatatatcaattattacatatatgtcaggatttttttctccccccttcctaaagtgttgctggcacctaactctcgtatcttcttatctatgcttcgtagccattcacattttctgagttctgttatgtttgcatctatgactcagatgtttgcacacactttttgatagataacaacaactaaatactgtttcattttgttattctctttcctcaccaagttcatttcccttcctctaaccgttgccaattcaatatttgtattactttttgcagtgtgaaatactctgatgttgatgaaaatggcattgtccgtatgatgttgtgccgtgtaataatggggaacgtagaaatagttcaccctggatctaagcagtgccaacctagtaataagtattttgatagtggagtagacgaccttaaaaatccacggcattacgttgtgtgggatatgaatctgaatagtcatatctattctgagtttgtagtcactgtcaaattgccttctaaaaccaaagattcctttgtatcgcaagaaaactgtcagaattcgtctgatctatcactggtgttgaactctagttcacctgattgtatttcacaggtaagatgctttacatggggtattaacaagatagtactgtaacactagagacaactgttgctaacttgatatacagaagagttccactgttggagcagcaagagtgcagtaattcagattctgtgatttgactcaataattgacatgattgcattattgagattataacttggagctgattatattcgttatctatgatagaaacctccaaatatgataagtttccctgtgaaaccatgctattttagccacgctggagttggttaaagcaccagttaacaacttccttttatgcataaaacaggagatgaacctggaggcacctccagcattgggaggtggatgtgcagcccccatgctaggagattcgatggaaaaggctccaagctcaccttggatgcctttctccatgctgtttgcagcgatctctaccaaagtgtctcctgagaatatggacgtgattattggttgctatgaagagtttaagagcaagaaaataagccgaggtgaactagtgaagaagctgaggcatgtagttggtgatagagtgctaatatcgacgataatgcgtctccaagataagttacctccagtggataagcgtgaggaaccagacacatcggcgtccaaggtggtggcggaaccatgagatgggtgtcaggaggtgggcgaggaatgcagaaagggaggaaccagccgacttgacatagaaaaccctgtgggaagcagcaactatgaagcctcttgcatcagtcttgtgcatggaggctgctgtttgttctctgtatcgtaggtgtctacgtttgcgaggaaattgtatccggtgtttctctttcttcaaattaaaccacgcacatgcagctgccgtactttttggaccattgaagtgtttcgtccgtgaaaaaggctccttttaccttcccgtttgccttcctaagagcatctccagtagttttgtaaaataaaactccctaaaagacgatgtagagagttgctaaataataatagagagtaaaaaattgcatgttcttcaatagttctctattttcagttgctaaattttttaa

SEQ ID NO: 53401 - DNA, 3284 bp, Zea Mays
aataatgcaagtggggtcacggcaaaggtgtggcgcgtgcgtggacctcgccctcatctcgtctcctccggcggtccggcctgtccaataattctagtattccaccgccgcacacctcctgtcttccttcaccttcgcgctccgccgccgccgtcgattcgtgctgctctcacccctaacctgtccaacatcgccggggagggaagcagcagaagaagctccccttacctccggctatcgcctgaggataaagtggggtctgtaggggagtcttaggggggagcaaaagggataggatagggagagatgaagcaatcaatttcttcgtccgccttcgcccctgcttacgtccccgctactaaccctagttatgaggttgaacgccttcagaagcttctctactagattagtgtaaatagtagacttgttcgagtttagcttggctggaagaattagtctctggtccgtgtttatatctgctagcaataatggctgcgatgaacggagaggtattgggtgaatgtggaaggaacataaatagtctcaagagaaagcgggagagccccgctgcatatgctgctggcgtattctgcacctctgaattgcatcagcatactgtcaatgattctgctgttaggtttcatcttgataaagaccgtaaggcaaagatcgtgtgccacttcaacaagcaggttttgcagagctataagaaattcatgagtagtgcaccacctaagcgtattttgcttcgccaaggtgctgtctggaaagactttccagaaaagattgtcaaattggcccaagctgacttcagggcaaaaaagatgatcacagaaacaggatatcagaaccagctatttttgctggattttgcccatatgacattcatagacacaaagacaggttttcagaggccaattgcttggatcgatgaaaatgaaaagtgctacttcccggaatcatttatacaagatcagaagttatttatgaagaaagattttggcaacggaaatcatgagtacattagtgaagagcgaaatgggacacgagaaacgaatcaccagtttggagcatcagaaagttctgctgaaagctcaaactttgagtcaagtattggagatgtttctagtcctaagagagctagggctgaaaagaatttcattgtaaaaaaatattgtgatatgggagaagctattggagaaaatgagtcatgcactttgttgcctacagcctgtaacctactaccacaccaagctaatctgggtgaggtatcccgtgctcagcgcactattgaagccgtggagaagctgttgctgcaggggatgggttcagttattgaatccaaggacattattggaatctacaggactccattattggatgaccacggacaagtccgttaccatattcaccaaaagcaagtacaggttaccggatgtcatcgtggaaacgcaaatgtccgttatgcatggcttccttgctccaaaagcactgtgcatgtaatgatgctgaatggtgttttgcaagttgataagcctcccaataagtgtgcagcctatggagagggcactctccttacaccagcaaatcgttcggatgcctggtatgttcttgatatatcaattattacatatatgtcaggatttttttctccccccttcctaaagtgttgctggcacctaactctcgtatcttcttatctatgcttcgtagccattcacattttctgagttctgttatgtttgcatctatgactcagatgtttgcacacactttttgatagataacaacaactaaatactgtttcattttgttattctctttcctcaccaagttcatttcccttcctctaaccgttgccaattcaatatttgtattactttttgcagtgtgaaatactctgatgttgatgaaaatggcattgtccgtatgatgttgtgccgtgtaataatggggaacgtagaaatagttcaccctggatctaagcagtgccaacctagtaataagtattttgatagtggagtagacgaccttaaaaatccacggcattacgttgtgtgggatatgaatctgaatagtcatatctattctgagtttgtagtcactgtcaaattgccttctaaaaccaaagattcctttgtatcgcaagaaaactgtcagaattcgtctgatctatcactggtgttgaactctagttcacctgattgtatttcacaggtaagatgctttacatggggtattaacaagatagtactgtaacactagagacaactgttgctaacttgatatacagaagagttccactgttggagcagcaagagtgcagtaattcagattctgtgatttgactcaataattgacatgattgcattattgagattataacttggagctgattatattcgttatctatgatagaaacctccaaatatgataagtttccctgtgaaaccatgctattttagccacgctggagttggttaaagcaccagttaacaacttccttttatgcataaaacaggagatgaacctggaggcacctccagcattgggaggtggatgtgcagcccccatgctaggagattcgatggaaaaggctccaagctcaccttggatgcctttctccatgctgtttgcagcgatctctaccaaagtgtctcctgagaatatggacgtgattattggttgctatgaagagtttaagagcaagaaaataagccgaggtgaactagtgaagaagctgaggcatgtagttggtgatagagtgctaatatcgacgataatgcgtctccaagataagttacctccagtggataagcgtgaggaaccagacacatcggcgtccaaggtggtggcggaaccatgagatgggtgtcaggaggtgggcgaggaatgcagaaagggaggaaccagccgacttgacatagaaaaccctgtgggaagcagcaactatgaagcctcttgcatcagtcttgtgcatggaggctgctgtttgttctctgtatcgtaggtgtctacgtttgcgaggaaattgtatccggtgtttctctttcttcaaattaaaccacgcacatgcagctgccgtactttttggaccattgaagtgtttcgtccgtgaaaaaggctccttttaccttcccgtttgccttcctaagagcatctccagtagttttgtaaaataaaactccctaaaagacgatgtagagagttgctaaataataatagagagtaaaaaattgcatgttcttcaatagttctctattttcagttgctaaattttttaa

SEQ ID NO: 53402 - DNA, 3058 bp, Zea Mays
aataatgcaagtggggtcacggcaaaggtgtggcgcgtgcgtggacctcgccctcatctcgtctcctccggcggtccggcctgtccaataattctagtattccaccgccgcacacctcctgtcttccttcaccttcgcgctccgccgccgccgtcgattcgtgctgctctcacccctaacctgtccaacatcgccggggagggaagcagcagaagaagctccccttacctccggctatcgcctgaggataaagtggggtctgtaggggagtcttaggggggagcaaaagggataggatagggagagatgaagcaatcaatttcttcgtccgccttcgcccctgcttacgtccccgctactaaccctaggatcattctgtcttttctcgtttcttatccgactcttcttcgttttatgcctatcagttatgaggttgaacgccttcagaagcttctctactagattagtgtaaatagtagacttgttcgagtttagcttggctggaagaattagtctctggtccgtgtttatatctgctagcaataatggctgcgatgaacggagaggtattgggtgaatgtggaaggaacataaatagtctcaagagaaagcgggagagccccgctgcatatgctgctggcgtattctgcacctctgaattgcatcagcatactgtcaatgattctgctgttaggtttcatcttgataaagaccgtaaggcaaagatcgtgtgccacttcaacaagcaggttttgcagagctataagaaattcatgagtagtgcaccacctaagcgtattttgcttcgccaaggtgctgtctggaaagactttccagaaaagattgtcaaattggcccaagctgacttcagggcaaaaaagatgatcacagaaacaggatatcagaaccagctatttttgctggattttgcccatatgacattcatagacacaaagacaggttttcagaggccaattgcttggatcgatgaaaatgaaaagtgctacttcccggaatcatttatacaagatcagaagttatttatgaagaaagattttggcaacggaaatcatgagtacattagtgaagagcgaaatgggacacgagaaacgaatcaccagtttggagcatcagaaagttctgctgaaagctcaaactttgagtcaagtattggagatgtttctagtcctaagagagctagggctgaaaagaatttcattgtaaaaaaatattgtgatatgggagaagctattggagaaaatgagtcatgcactttgttgcctacagcctgtaacctactaccacaccaagctaatctgggtgaggtatcccgtgctcagcgcactattgaagccgtggagaagctgttgctgcaggggatgggttcagttattgaatccaaggacattattggaatctacaggactccattattggatgaccacggacaagtccgttaccatattcaccaaaagcaagtacaggttaccggatgtcatcgtggaaacgcaaatgtccgttatgcatggcttccttgctccaaaagcactgtgcatgtaatgatgctgaatggtgttttgcaagttgataagcctcccaataagtgtgcagcctatggagagggcactctccttacaccagcaaatcgttcggatgcctgtgtgaaatactctgatgttgatgaaaatggcattgtccgtatgatgttgtgccgtgtaataatggggaacgtagaaatagttcaccctggatctaagcagtgccaacctagtaataagtattttgatagtggagtagacgaccttaaaaatccacggcattacgttgtgtgggatatgaatctgaatagtcatatctattctgagtttgtagtcactgtcaaattgccttctaaaaccaaagattcctttgtatcgcaagaaaactgtcagaattcgtctgatctatcactggtgttgaactctagttcacctgattgtatttcacaggtaagatgctttacatggggtattaacaagatagtactgtaacactagagacaactgttgctaacttgatatacagaagagttccactgttggagcagcaagagtgcagtaattcagattctgtgatttgactcaataattgacatgattgcattattgagattataacttggagctgattatattcgttatctatgatagaaacctccaaatatgataagtttccctgtgaaaccatgctattttagccacgctggagttggttaaagcaccagttaacaacttccttttatgcataaaacaggagatgaacctggaggcacctccagcattgggaggtggatgtgcagcccccatgctaggagattcgatggaaaaggctccaagctcaccttggatgcctttctccatgctgtttgcagcgatctctaccaaagtgtctcctgagaatatggacgtgattattggttgctatgaagagtttaagagcaagaaaataagccgaggtgaactagtgaagaagctgaggcatgtagttggtgatagagtgctaatatcgacgataatgcgtctccaagataagcagttacctccagtggataagcgtgaggaaccagacacatcggcgtccaaggtggtggcggaaccatgagatgggtgtcaggaggtgggcgaggaatgcagaaagggaggaaccagccgacttgacatagaaaaccctgtgggaagcagcaactatgaagcctcttgcatcagtcttgtgcatggaggctgctgtttgttctctgtatcgtaggtgtctacgtttgcgaggaaattgtatccggtgtttctctttcttcaaattaaaccacgcacatgcagctgccgtactttttggaccattgaagtgtttcgtccgtgaaaaaggctccttttaccttcccgtttgccttcctaagagcatctccagtagttttgtaaaataaaactccctaaaagacgatgtagagagttgctaaataataatagagagtaaaaaattgcatgttcttcaatagttctctattttcagttgctaaattttttaa

SEQ ID NO: 53403 - DNA, 3022 bp, Zea Mays
aataatgcaagtggggtcacggcaaaggtgtggcgcgtgcgtggacctcgccctcatctcgtctcctccggcggtccggcctgtccaataattctagtattccaccgccgcacacctcctgtcttccttcaccttcgcgctccgccgccgccgtcgattcgtgctgctctcacccctaacctgtccaacatcgccggggagggaagcagcagaagaagctccccttacctccggctatcgcctgaggataaagtggggtctgtaggggagtcttaggggggagcaaaagggataggatagggagagatgaagcaatcaatttcttcgtccgccttcgcccctgcttacgtccccgctactaaccctaggatcattctgtcttttctcgtttcttatccgactcttcttcgttttatgcctatcagttatgaggttgaacgccttcagaagcttctctactagattagtgtaaatagtagacttgttcgagtttagcttggctggaagaattagtctctggtccgtgtttatatctgctagcaataatggctgcgatgaacggagaggtattgggtgaatgtggaaggaacataaatagtctcaagagaaagcgggagagccccgctgcatatgctgctggcgtattctgcacctctgaattgcatcagcatactgtcaatgattctgctgttaggtttcatcttgataaagaccgtaaggcaaagatcgtgtgccacttcaacaagcaggttttgcagagctataagaaattcatgagtagtgcaccacctaagcgtattttgcttcgccaaggtgctgtctggaaagactttccagaaaagattgtcaaattggcccaagctgacttcagggcaaaaaagatgatcacagaaacaggatatcagaaccagctatttttgctggattttgcccatatgacattcatagacacaaagacaggttttcagaggccaattgcttggatcgatgaaaatgaaaagtgctacttcccggaatcatttatacaagatcagaagttatttatgaagaaagattttggcaacggaaatcatgagtacattagtgaagagcgaaatgggacacgagaaacgaatcaccagtttggagcatcagaaagttctgctgaaagctcaaactttgagtcaagtattggagatgtttctagtcctaagagagctagggctgaaaagaatttcattgtaaaaaaatattgtgatatgggagaagctattggagaaaatgagtcatgcactttgttgcctacagcctgtaacctactaccacaccaagctaatctgggtgaggtatcccgtgctcagcgcactattgaagccgtggagaagctgttgctgcaggggatgggttcagttattgaatccaaggacattattggaatctacaggactccattattggatgaccacggacaagtccgttaccatattcaccaaaagcaagtacaggttaccggatgtcatcgtggaaacgcaaatgtccgttatgcatggcttccttgctccaaaagcactgtgcatgtaatgatgctgaatggtgttttgcaagttgataagcctcccaataagtgtgcagcctatggagagggcactctccttacaccagcaaatcgttcggatgcctgtgtgaaatactctgatgttgatgaaaatggcattgtccgtatgatgttgtgccgtgtaataatggggaacgtagaaatagttcaccctggatctaagcagtgccaacctagtaataagtattttgatagtggagtagacgaccttaaaaatccacggcattacgttgtgtgggatatgaatctgaatagtcatatctattctgagtttgtagtcactgtcaaattgccttctaaaaccaaagattcctttgtatcgcaagaaaactgtcagaattcgtctgatctatcactggtgttgaactctagttcacctgattgtatttcacaggagatgaacctggaggcacctccagcattgggaggtggatgtgcagcccccatgctaggagattcgatggaaaaggctccaagctcaccttggatgcctttctccatgctgtttgcagcgatctctaccaaagtgtctcctgagaatatggacgtgattattggttgctatgaagagtttaagagcaagaaaataagccgaggtgaactagtgaagaagctgaggcatgtagttggtgatagagtgctaatatcgacgataatgcgtctccaagataaggtgtgaattgttctgcttgaaccttgctgatacagttatcttggattctttttggaagactgaaatccttttagccgtaaggtgtgtcagctggtggggttctgggatggaccgccagtccgccacgcaccgaacttctgaaggcctatatcttttgctgtgaacaagctacttttcaagagcatcagaacagcagtggtttgataacctgattctttttacactgttttctgaggaaatgcttcttttgtgtgtgtctatttggcagcagttacctccagtggataagcgtgaggaaccagacacatcggcgtccaaggtggtggcggaaccatgagatgggtgtcaggaggtgggcgaggaatgcagaaagggaggaaccagccgacttgacatagaaaaccctgtgggaagcagcaactatgaagcctcttgcatcagtcttgtgcatggaggctgctgtttgttctctgtatcgtaggtgtctacgtttgcgaggaaattgtatccggtgtttctctttcttcaaattaaaccacgcacatgcagctgccgtactttttggaccattgaagtgtttcgtccgtgaaaaaggctccttttaccttcccgtttgccttcctaagagcatctccagtagttttgtaaaataaaactccctaaaagacgatgtagagagttgctaaataataatagagagtaaaaaattgcatgttcttcaatagttctctattttcagttgctaaattttttaa

SEQ ID NO: 53404 - DNA, 2925 bp, Zea Mays
aataatgcaagtggggtcacggcaaaggtgtggcgcgtgcgtggacctcgccctcatctcgtctcctccggcggtccggcctgtccaataattctagtattccaccgccgcacacctcctgtcttccttcaccttcgcgctccgccgccgccgtcgattcgtgctgctctcacccctaacctgtccaacatcgccggggagggaagcagcagaagaagctccccttacctccggctatcgcctgaggataaagtggggtctgtaggggagtcttaggggggagcaaaagggataggatagggagagatgaagcaatcaatttcttcgtccgccttcgcccctgcttacgtccccgctactaaccctagttatgaggttgaacgccttcagaagcttctctactagattagtgtaaatagtagacttgttcgagtttagcttggctggaagaattagtctctggtccgtgtttatatctgctagcaataatggctgcgatgaacggagaggtattgggtgaatgtggaaggaacataaatagtctcaagagaaagcgggagagccccgctgcatatgctgctggcgtattctgcacctctgaattgcatcagcatactgtcaatgattctgctgttaggtttcatcttgataaagaccgtaaggcaaagatcgtgtgccacttcaacaagcaggttttgcagagctataagaaattcatgagtagtgcaccacctaagcgtattttgcttcgccaaggtgctgtctggaaagactttccagaaaagattgtcaaattggcccaagctgacttcagggcaaaaaagatgatcacagaaacaggatatcagaaccagctatttttgctggattttgcccatatgacattcatagacacaaagacaggttttcagaggccaattgcttggatcgatgaaaatgaaaagtgctacttcccggaatcatttatacaagatcagaagttatttatgaagaaagattttggcaacggaaatcatgagtacattagtgaagagcgaaatgggacacgagaaacgaatcaccagtttggagcatcagaaagttctgctgaaagctcaaactttgagtcaagtattggagatgtttctagtcctaagagagctagggctgaaaagaatttcattgtaaaaaaatattgtgatatgggagaagctattggagaaaatgagtcatgcactttgttgcctacagcctgtaacctactaccacaccaagctaatctgggtgaggtatcccgtgctcagcgcactattgaagccgtggagaagctgttgctgcaggggatgggttcagttattgaatccaaggacattattggaatctacaggactccattattggatgaccacggacaagtccgttaccatattcaccaaaagcaagtacaggttaccggatgtcatcgtggaaacgcaaatgtccgttatgcatggcttccttgctccaaaagcactgtgcatgtaatgatgctgaatggtgttttgcaagttgataagcctcccaataagtgtgcagcctatggagagggcactctccttacaccagcaaatcgttcggatgcctgtgtgaaatactctgatgttgatgaaaatggcattgtccgtatgatgttgtgccgtgtaataatggggaacgtagaaatagttcaccctggatctaagcagtgccaacctagtaataagtattttgatagtggagtagacgaccttaaaaatccacggcattacgttgtgtgggatatgaatctgaatagtcatatctattctgagtttgtagtcactgtcaaattgccttctaaaaccaaagattcctttgtatcgcaagaaaactgtcagaattcgtctgatctatcactggtgttgaactctagttcacctgattgtatttcacagaagagttccactgttggagcagcaagagtgcagtaattcagattctgtgatttgactcaataattgacatgattgcattattgagattataacttggagctgattatattcgttatctatgatagaaacctccaaatatgataagtttccctgtgaaaccatgctattttagccacgctggagttggttaaagcaccagttaacaacttccttttatgcataaaacaggagatgaacctggaggcacctccagcattgggaggtggatgtgcagcccccatgctaggagattcgatggaaaaggctccaagctcaccttggatgcctttctccatgctgtttgcagcgatctctaccaaagtgtctcctgagaatatggacgtgattattggttgctatgaagagtttaagagcaagaaaataagccgaggtgaactagtgaagaagctgaggcatgtagttggtgatagagtgctaatatcgacgataatgcgtctccaagataagcagttacctccagtggataagcgtgaggaaccagacacatcggcgtccaaggtggtggcggaaccatgagatgggtgtcaggaggtgggcgaggaatgcagaaagggaggaaccagccgacttgacatagaaaaccctgtgggaagcagcaactatgaagcctcttgcatcagtcttgtgcatggaggctgctgtttgttctctgtatcgtaggtgtctacgtttgcgaggaaattgtatccggtgtttctctttcttcaaattaaaccacgcacatgcagctgccgtactttttggaccattgaagtgtttcgtccgtgaaaaaggctccttttaccttcccgtttgccttcctaagagcatctccagtagttttgtaaaataaaactccctaaaagacgatgtagagagttgctaaataataatagagagtaaaaaattgcatgttcttcaatagttctctattttcagttgctaaattttttaa

SEQ ID NO: 53405 - DNA, 3326 bp, Zea Mays
aataatgcaagtggggtcacggcaaaggtgtggcgcgtgcgtggacctcgccctcatctcgtctcctccggcggtccggcctgtccaataattctagtattccaccgccgcacacctcctgtcttccttcaccttcgcgctccgccgccgccgtcgattcgtgctgctctcacccctaacctgtccaacatcgccggggagggaagcagcagaagaagctccccttacctccggctatcgcctgaggataaagtggggtctgtaggggagtcttaggggggagcaaaagggataggatagggagagatgaagcaatcaatttcttcgtccgccttcgcccctgcttacgtccccgctactaaccctaggatcattctgtcttttctcgtttcttatccgactcttcttcgttttatgcctatcagttatgaggttgaacgccttcagaagcttctctactagattagtgtaaatagtagacttgttcgagtttagcttggctggaagaattagtctctggtccgtgtttatatctgctagcaataatggctgcgatgaacggagaggtattgggtgaatgtggaaggaacataaatagtctcaagagaaagcgggagagccccgctgcatatgctgctggcgtattctgcacctctgaattgcatcagcatactgtcaatgattctgctgttaggtttcatcttgataaagaccgtaaggcaaagatcgtgtgccacttcaacaagcaggttttgcagagctataagaaattcatgagtagtgcaccacctaagcgtattttgcttcgccaaggtgctgtctggaaagactttccagaaaagattgtcaaattggcccaagctgacttcagggcaaaaaagatgatcacagaaacaggatatcagaaccagctatttttgctggattttgcccatatgacattcatagacacaaagacaggttttcagaggccaattgcttggatcgatgaaaatgaaaagtgctacttcccggaatcatttatacaagatcagaagttatttatgaagaaagattttggcaacggaaatcatgagtacattagtgaagagcgaaatgggacacgagaaacgaatcaccagtttggagcatcagaaagttctgctgaaagctcaaactttgagtcaagtattggagatgtttctagtcctaagagagctagggctgaaaagaatttcattgtaaaaaaatattgtgatatgggagaagctattggagaaaatgagtcatgcactttgttgcctacagcctgtaacctactaccacaccaagctaatctgggtgaggtatcccgtgctcagcgcactattgaagccgtggagaagctgttgctgcaggggatgggttcagttattgaatccaaggacattattggaatctacaggactccattattggatgaccacggacaagtccgttaccatattcaccaaaagcaagtacaggttaccggatgtcatcgtggaaacgcaaatgtccgttatgcatggcttccttgctccaaaagcactgtgcatgtaatgatgctgaatggtgttttgcaagttgataagcctcccaataagtgtgcagcctatggagagggcactctccttacaccagcaaatcgttcggatgcctgtgtgaaatactctgatgttgatgaaaatggcattgtccgtatgatgttgtgccgtgtaataatggggaacgtagaaatagttcaccctggatctaagcagtgccaacctagtaataagtattttgatagtggagtagacgaccttaaaaatccacggcattacgttgtgtgggatatgaatctgaatagtcatatctattctgagtttgtagtcactgtcaaattgccttctaaaaccaaagattcctttgtatcgcaagaaaactgtcagaattcgtctgatctatcactggtgttgaactctagttcacctgattgtatttcacaggtaagatgctttacatggggtattaacaagatagtactgtaacactagagacaactgttgctaacttgatatacagaagagttccactgttggagcagcaagagtgcagtaattcagattctgtgatttgactcaataattgacatgattgcattattgagattataacttggagctgattatattcgttatctatgatagaaacctccaaatatgataagtttccctgtgaaaccatgctattttagccacgctggagttggttaaagcaccagttaacaacttccttttatgcataaaacaggagatgaacctggaggcacctccagcattgggaggtggatgtgcagcccccatgctaggagattcgatggaaaaggctccaagctcaccttggatgcctttctccatgctgtttgcagcgatctctaccaaagtgtctcctgagaatatggacgtgattattggttgctatgaagagtttaagagcaagaaaataagccgaggtgaactagtgaagaagctgaggcatgtagttggtgatagagtgctaatatcgacgataatgcgtctccaagataaggtgtgaattgttctgcttgaaccttgctgatacagttatcttggattctttttggaagactgaaatccttttagccgtaaggtgtgtcagctggtggggttctgggatggaccgccagtccgccacgcaccgaacttctgaaggcctatatcttttgctgtgaacaagctacttttcaagagcatcagaacagcagtggtttgataacctgattctttttacactgttttctgaggaaatgcttcttttgtgtgtgtctatttggcagcagttacctccagtggataagcgtgaggaaccagacacatcggcgtccaaggtggtggcggaaccatgagatgggtgtcaggaggtgggcgaggaatgcagaaagggaggaaccagccgacttgacatagaaaaccctgtgggaagcagcaactatgaagcctcttgcatcagtcttgtgcatggaggctgctgtttgttctctgtatcgtaggtgtctacgtttgcgaggaaattgtatccggtgtttctctttcttcaaattaaaccacgcacatgcagctgccgtactttttggaccattgaagtgtttcgtccgtgaaaaaggctccttttaccttcccgtttgccttcctaagagcatctccagtagttttgtaaaataaaactccctaaaagacgatgtagagagttgctaaataataatagagagtaaaaaattgcatgttcttcaatagttctctattttcagttgctaaattttttaa

SEQ ID NO: 53406 - DNA, 3336 bp, Zea Mays
aataatgcaagtggggtcacggcaaaggtgtggcgcgtgcgtggacctcgccctcatctcgtctcctccggcggtccggcctgtccaataattctagtattccaccgccgcacacctcctgtcttccttcaccttcgcgctccgccgccgccgtcgattcgtgctgctctcacccctaacctgtccaacatcgccggggagggaagcagcagaagaagctccccttacctccggctatcgcctgaggataaagtggggtctgtaggggagtcttaggggggagcaaaagggataggatagggagagatgaagcaatcaatttcttcgtccgccttcgcccctgcttacgtccccgctactaaccctagttatgaggttgaacgccttcagaagcttctctactagattagtgtaaatagtagacttgttcgagtttagcttggctggaagaattagtctctggtccgtgtttatatctgctagcaataatggctgcgatgaacggagaggtattgggtgaatgtggaaggaacataaatagtctcaagagaaagcgggagagccccgctgcatatgctgctggcgtattctgcacctctgaattgcatcagcatactgtcaatgattctgctgttaggtttcatcttgataaagaccgtaaggcaaagatcgtgtgccacttcaacaagcaggttttgcagagctataagaaattcatgagtagtgcaccacctaagcgtattttgcttcgccaaggtgctgtctggaaagactttccagaaaagattgtcaaattggcccaagctgacttcagggcaaaaaagatgatcacagaaacaggatatcagaaccagctatttttgctggattttgcccatatgacattcatagacacaaagacaggttttcagaggccaattgcttggatcgatgaaaatgaaaagtgctacttcccggaatcatttatacaagatcagaagttatttatgaagaaagattttggcaacggaaatcatgagtacattagtgaagagcgaaatgggacacgagaaacgaatcaccagtttggagcatcagaaagttctgctgaaagctcaaactttgagtcaagtattggagatgtttctagtcctaagagagctagggctgaaaagaatttcattgtaaaaaaatattgtgatatgggagaagctattggagaaaatgagtcatgcactttgttgcctacagcctgtaacctactaccacaccaagctaatctgggtgaggtatcccgtgctcagcgcactattgaagccgtggagaagctgttgctgcaggggatgggttcagttattgaatccaaggacattattggaatctacaggactccattattggatgaccacggacaagtccgttaccatattcaccaaaagcaagtacaggttaccggatgtcatcgtggaaacgcaaatgtccgttatgcatggcttccttgctccaaaagcactgtgcatgtaatgatgctgaatggtgttttgcaagttgataagcctcccaataagtgtgcagcctatggagagggcactctccttacaccagcaaatcgttcggatgcctggtatgttcttgatatatcaattattacatatatgtcaggatttttttctccccccttcctaaagtgttgctggcacctaactctcgtatcttcttatctatgcttcgtagccattcacattttctgagttctgttatgtttgcatctatgactcagatgtttgcacacactttttgatagataacaacaactaaatactgtttcattttgttattctctttcctcaccaagttcatttcccttcctctaaccgttgccaattcaatatttgtattactttttgcagtgtgaaatactctgatgttgatgaaaatggcattgtccgtatgatgttgtgccgtgtaataatggggaacgtagaaatagttcaccctggatctaagcagtgccaacctagtaataagtattttgatagtggagtagacgaccttaaaaatccacggcattacgttgtgtgggatatgaatctgaatagtcatatctattctgagtttgtagtcactgtcaaattgccttctaaaaccaaagattcctttgtatcgcaagaaaactgtcagaattcgtctgatctatcactggtgttgaactctagttcacctgattgtatttcacaggagatgaacctggaggcacctccagcattgggaggtggatgtgcagcccccatgctaggagattcgatggaaaaggctccaagctcaccttggatgcctttctccatgctgtttgcagcgatctctaccaaagtgtctcctgagaatatggacgtgattattggttgctatgaagagtttaaggtctggtacacttttttcatcttttgacctgaagtcaccttcccttgtgtggtatccaaaatcacttgtagactgtatttgccagagcaagaaaataagccgaggtgaactagtgaagaagctgaggcatgtagttggtgatagagtgctaatatcgacgataatgcgtctccaagataaggtgtgaattgttctgcttgaaccttgctgatacagttatcttggattctttttggaagactgaaatccttttagccgtaaggtgtgtcagctggtggggttctgggatggaccgccagtccgccacgcaccgaacttctgaaggcctatatcttttgctgtgaacaagctacttttcaagagcatcagaacagcagtggtttgataacctgattctttttacactgttttctgaggaaatgcttcttttgtgtgtgtctatttggcagcagttacctccagtggataagcgtgaggaaccagacacatcggcgtccaaggtggtggcggaaccatgagatgggtgtcaggaggtgggcgaggaatgcagaaagggaggaaccagccgacttgacatagaaaaccctgtgggaagcagcaactatgaagcctcttgcatcagtcttgtgcatggaggctgctgtttgttctctgtatcgtaggtgtctacgtttgcgaggaaattgtatccggtgtttctctttcttcaaattaaaccacgcacatgcagctgccgtactttttggaccattgaagtgtttcgtccgtgaaaaaggctccttttaccttcccgtttgccttcctaagagcatctccagtagttttgtaaaataaaactccctaaaagacgatgtagagagttgctaaataataatagagagtaaaaaattgcatgttcttcaatagttctctattttcagttgctaaattttttaa

SEQ ID NO: 53407 - DNA, 3016 bp, Zea Mays
cttgaggacgaagggcggtgggtgaaacgcaattgctaataatgcaagtggggtcacggcaaaggtgtggcgcgtgcgtggacctcgccctcatctcgtctcctccggcggtccggcctgtccaataattctagtattccaccgccgcacacctcctgtcttccttcaccttcgcgctccgccgccgccgtcgattcgtgctgctctcacccctaacctgtccaacatcgccggggagggaagcagcagaagaagctccccttacctccggctatcgcctgaggataaagtggggtctgtaggggagtcttaggggggagcaaaagggataggatagggagagatgaagcaatcaatttcttcgtccgccttcgcccctgcttacgtccccgctactaaccctaggatcattctgtcttttctcgtttcttatccgactcttcttcgttttatgcctatcagttatgaggttgaacgccttcagaagcttctctactagattagtgtaaatagtagacttgttcgagtttagcttggctggaagaattagtctctggtccgtgtttatatctgctagcaataatggctgcgatgaacggagaggtattgggtgaatgtggaaggaacataaatagtctcaagagaaagcgggagagccccgctgcatatgctgctggcgtattctgcacctctgaattgcatcagcatactgtcaatgattctgctgttaggtttcatcttgataaagaccgtaaggcaaagatcgtgtgccacttcaacaagcaggttttgcagagctataagaaattcatgagtagtgcaccacctaagcgtattttgcttcgccaaggtgctgtctggaaagactttccagaaaagattgtcaaattggcccaagctgacttcagggcaaaaaagatgatcacagaaacaggatatcagaaccagctatttttgctggattttgcccatatgacattcatagacacaaagacaggttttcagaggccaattgcttggatcgatgaaaatgaaaagtgctacttcccggaatcatttatacaagatcagaagttatttatgaagaaagattttggcaacggaaatcatgagtacattagtgaagagcgaaatgggacacgagaaacgaatcaccagtttggagcatcagaaagttctgctgaaagctcaaactttgagtcaagtattggagatgtttctagtcctaagagagctagggctgaaaagaatttcattgtaaaaaaatattgtgatatgggagaagctattggagaaaatgagtcatgcactttgttgcctacagcctgtaacctactaccacaccaagctaatctgggtgaggtatcccgtgctcagcgcactattgaagccgtggagaagctgttgctgcaggggatgggttcagttattgaatccaaggacattattggaatctacaggactccattattggatgaccacggacaagtccgttaccatattcaccaaaagcaagtacaggttaccggatgtcatcgtggaaacgcaaatgtccgttatgcatggcttccttgctccaaaagcactgtgcatgtaatgatgctgaatggtgttttgcaagttgataagcctcccaataagtgtgcagcctatggagagggcactctccttacaccagcaaatcgttcggatgcctgtgtgaaatactctgatgttgatgaaaatggcattgtccgtatgatgttgtgccgtgtaataatggggaacgtagaaatagttcaccctggatctaagcagtgccaacctagtaataagtattttgatagtggagtagacgaccttaaaaatccacggcattacgttgtgtgggatatgaatctgaatagtcatatctattctgagtttgtagtcactgtcaaattgccttctaaaaccaaagattcctttgtatcgcaagaaaactgtcagaattcgtctgatctatcactggtgttgaactctagttcacctgattgtatttcacagaagagttccactgttggagcagcaagagtgcagtaattcagattctgtgatttgactcaataattgacatgattgcattattgagattataacttggagctgattatattcgttatctatgatagaaacctccaaatatgataagtttccctgtgaaaccatgctattttagccacgctggagttggttaaagcaccagttaacaacttccttttatgcataaaacaggagatgaacctggaggcacctccagcattgggaggtggatgtgcagcccccatgctaggagattcgatggaaaaggctccaagctcaccttggatgcctttctccatgctgtttgcagcgatctctaccaaagtgtctcctgagaatatggacgtgattattggttgctatgaagagtttaagagcaagaaaataagccgaggtgaactagtgaagaagctgaggcatgtagttggtgatagagtgctaatatcgacgataatgcgtctccaagataagttacctccagtggataagcgtgaggaaccagacacatcggcgtccaaggtggtggcggaaccatgagatgggtgtcaggaggtgggcgaggaatgcagaaagggaggaaccagccgacttgacatagaaaaccctgtgggaagcagcaactatgaagcctcttgcatcagtcttgtgcatggaggctgctgtttgttctctgtatcgtaggtgtctacgtttgcgaggaaattgtatccggtgtttctctttcttcaaattaaaccacgcacatgcagctgccgtactttttggaccattgaagtgtttcgtccgtgaaaaaggctccttttaccttcccgtttgccttcctaagagcatctccagtagttttgtaaaataaaactccctaaaagacgatgtagagagttgctaaataataatagagagtaaaaaattgcatgttcttcaatagttctctattttcagttgctaaattttttaa

SEQ ID NO: 53408 - DNA, 967 bp, Zea Mays
cagatccagaaataactccaccggatattgcagctattgtctccctcaaatttacatttgttgtcacttatgacaatgaatcttatggaggccatagcaagatattccttatcagatcaattctagcaacatatggaagagactctttactgccacaaatacaagaaaatgtggacattacctatccaaacactccaatgcaactcacagctaaagaacacaagtctccatctacagcaatgtcaaatctgacaaccaactcaccacctcatgccaagcgtgtgctaacgtatcttagctcacaaacctctacttcggaaaaggatgacctttcaaaacaaaaggggccacagatgccagaaaacactttagaggactctaatcctacaaaagctacttttgaatctccaccaaaaagacgcaaggagcttgattcaagctgcactttcaatgacagcgatgctaccaagactccatgatcgctccatcaaataaataatacatcagcaacttcaaactatcttttcccactatgtagtcatgaacaaactacttagatgtaaataggtggcaaccatcatttgctacaatgcacttgtgatcaatctgcttagatatatactatgctactatgtagttataaacaacctacttagatgtaaatatgtgacagccatcttttgctactgataaatattatgccagtcttatgtttcttttattcctagctacatcacacatttttttctatctatgcatgtatatatatatctcaattatcgatactctaccattagtacttcacttttacaaccttaaatcgaataatttttttatttctatcaatcaacagcatatgccagaaaattattatagcaaatttgtatgtttatcatctatttcaattaaattatttttattaaaaacatttatataatactatttctatacatattacattgcttac

SEQ ID NO: 53409 - DNA, 2707 bp, Zea Mays
atgggactgagcctccaaagtccagactgctatactttcggggactcgcgagccttccagagtccagaaagaaacgaatggatgcaaaaaaacaccatccacaaccgctgccaaacgcttcgtctctcttatttctctgtatccgctagccgctaccagaggcttccactctgccttccgccgcgtgctcttatttctctgtatccgctagccgctaccagaggcttccagacggcgaataaatcagccggctcgcgactgcaaaagctgagtaaccacgccgccgcccccagtttggccgtggccgtctccgtggccgcgcatccatcctggttctggctccccgctccaccgctgcgaccttcgagtctcgctgtcttcgcgactgaaatccttttctttggtctggaaaaaggaagggcttcattaagttctacatatctggccagggagaaaacctgcttcatcaaggtttggaagccttatctttggtttggaaaaaggaagggcttcattaacttctacatatctggccagggagaaaacctgcttcatcaagaaaatccttatctttggtttggaaaaaggaagggcttcattaacttctacatatctggtcagggaaaaaacctgcttcatcaagcatgacatacaaggcactttcaaatctatcgcctcaggataaagatgcggcattgcaagtgcaagtgaatagaaaatgggagtttaggggaatcaaagatgatggcccaatacttcacatagatatggtgctcacagatgcaatgggaaatagcatatatgctgagattccaagcgacatagtagatgagcagaatcctctaattaatgtgaacaaggtgtacattataaggcgctttcgagtcatctatgcaaaatcatcttacaaagttgttgatgctccttttatgatatgcttcacaaaattcactataattgagctatgtcgtgaaccaccaacaacatttcctcaatatgtttatcgattgacaccatacaatgaaattgacccatttggtccaaaagctaaaacattccatgatgttattggtctcatcaaggaggttactaaaatcaacccgatatattctggacccactcaatcaacctctaagattagaaatgtattcatcacagatctcagtgataacattatgaagataactctatggggaaatcgggcagaacaattttcctataattctgtctatgatccacaaaggaaaaatccaattgtagttctatttgtcggatgtttaccaaaagaatatcaaggtgacatagttctcaatggtggagcagcttgccatactatgacaggatttcaacacaagaaatggtactacaattgccgctgcttacaaaagacgacattgttccatttgacgtcccaaaacgtcaacacaaaaactatcaaagaactactggaatttgatccctacactataccgaaagaaggttgtgaatgcactgtgactattgttcgaatttctgaaaaaaataaatggtggtatccagcatgcaccaaatgtccaaagaaaccagcaatgaaccgtaagacaatgcaatgtcgcgaatgtggatccattgactactgtttcagatatagattaagttttattgcatctgatggaaccgctgaagcaaatatgttctgcttcgaaaatgtcgctacaaaaattgttggaaaatcatcagcttcactcttagcttctgcagcagatccagaaataactccaccggatattgcagctattgtctccctcaaatttacatttgttgtcacttatgacaatgaatcttatggaggccatagcaagatattccttatcagatcaattctagcaacatatggaagagactctttactgccacaaatacaagaaaatgtggacattacctatccaaacactccaatgcaactcacagctaaagaacacaagtctccatctacagcaatgtcaaatctgacaaccaactcaccacctcatgccaagcgtgtgctaacgtatcttagctcacaaacctctacttcggaaaaggatgacctttcaaaacaaaaggggccacagatgccagaaaacactttagaggactctaatcctacaaaagctacttttgaatctccaccaaaaagacgcaaggagcttgattcaagctgcactttcaatgacagcgatgctaccaagactccatgatcgctccatcaaataaataatacatcagcaacttcaaactatcttttcccactatgtagtcatgaacaaactacttagatgtaaataggtggcaaccatcatttgctacaatgcacttgtgatcaatctgcttagatatatactatgctactatgtagttataaacaacctacttagatgtaaatatgtgacagccatcttttgctactgataaatattatgccagtcttatgtttcttttattcctagctacatcacacatttttttctatctatgcatgtatatatatatctcaattatcgatactctaccattagtacttcacttttacaaccttaaatcgaataatttttttatttctatcaatcaacagcatatgccagaaaattattatagcaaatttgtatgtttatcatctatttcaattaaattatttttattaaaaacatttatataatactatttctatacatattacattgcttac

SEQ ID NO: 53410 - DNA, 1032 bp, Zea Mays
caactcctggccggttgattgatatgctggaagctggtcacacaaacctacgtaaagtgacataccttgtgttggatgaggcggaccggatgctagatatggggtttgagccctaaattcagaaaatagtagcacattgcaacacagattatgagaaaacatccgagagagcagtctcaaattcagtagtcagataccgacatgatgcatcggggagtacacgacatcagttgcagacgacaataagcaaccacctgacaatgaacgattaacactgatagcaagagctacaatcttgacaccacctacaagctactgctgcttctccctgagtgagctttggctttcatcagtgcctcacacatctttgttgcttctgccagttctaccatggtcagacggtgtccggggtctcgtcatttccaggacaacaaggagaccaacatggcctagagaagttgaagccttagcaagacagtttctacaaaatccttacaagccctcctcgctagctttgcgtctggtccagattagccgcctctagctccctccccaaatcgccccacccaccgtcatcctcaccagcgtcgcgtctcgtgaaagatggtgctgcaatctgaaggacatggattagatgggtgccacacgctgcttttatatggatctaatgattgtggccttgaacactctcgccagacatgtctcgtgtttttacatggattagatgagtacatggatctttatttaatcctaaggtaattgagattgcgaagaagatgaaagaggagagggtcaggttgcttgcttcagaatattttgcttacatctgatatgactagatcaaatcagttgcattgtgacatgttggtaggatgtcagtttcccttttaacttgactcttgtttgcctcttgtgtaatatccctaagatgaacattttggtaatctgggtgctcattcaattggttgatttgatcttcaagtatttaatcgagtatttaatctaggtgctcatataagtggttgattttca

SEQ ID NO: 53411 - DNA, 948 bp, Zea Mays
agcggtttggtggagtcgtggagatgctcggctgctccagcagttgtgcccagtgcaacacagattatgagaaaacatccgagagagcagtctcaaattcagtagtcagataccgacatgatgcatcggggagtacacgacatcagttgcagacgacaataagcaaccacctgacaatgaacgattaacactgatagcaagagctacaatcttgacaccacctacaagctactgctgcttctccctgagtgagctttggctttcatcagtgcctcacacatctttgttgcttctgccagttctaccatggtcagacggtgtccggggtctcgtcatttccaggacaacaaggagaccaacatggcctagagaagttgaagccttagcaagacagtttctacaaaatccttacaagccctcctcgctagctttgcgtctggtccagattagccgcctctagctccctccccaaatcgccccacccaccgtcatcctcaccagcgtcgcgtctcgtgaaagatggtgctgcaatctgaaggacatggattagatgggtgccacacgctgcttttatatggatctaatgattgtggccttgaacactctcgccagacatgtctcgtgtttttacatggattagatgagtacatggatctttatttaatcctaaggtaattgagattgcgaagaagatgaaagaggagagggtcaggttgcttgcttcagaatattttgcttacatctgatatgactagatcaaatcagttgcattgtgacatgttggtaggatgtcagtttcccttttaacttgactcttgtttgcctcttgtgtaatatccctaagatgaacattttggtaatctgggtgctcattcaattggttgatttgatcttcaagtatttaatcgagtatttaatctaggtgctcatataagtggttgattttca

SEQ ID NO: 53412 - DNA, 2360 bp, Zea Mays
cctggtgaattgatgaagaggctgttgttagagtccgggtcgaggaggaggagctggctggcgacggcgtccgcgagtaagtccacgatctcgttgccgaggaagactatgcgctcccggaagaggaggcccataacgtcgccggcgccggcgccggcaccaccgcccgcggcatccgactccgctcgtcacagcggtgcgtgcggtgtcagtgaggcgcaaggcttgaggctgagtgccccttgctgcgcccactgggagggagcccaagcgcgagcgcatggccgcttgacacgcagagcggctgctcttcccgccgcgacggagagggacgcggtggcactggaacttccggccgccatatatgtaccgaatgggactgagccgaactgctctgcagtagcggccggcggcggtgttccccaccagagagaagggagcagagccgaggagaggaaatggataacacacaacatacctttcagagttttgatgagttttcccttgagacagcatgactgcaggcgggaaagaggaccttgcgttgcgtgggcctggtcttatgtggactgggccgtcattctctttgggcctaaaaatatagtcttggactcttggtccacttaagcgcgagcagatatgttagcacttagcagcattctttggtccaacaagtcgagagaagcgggccgtacgccaccacggcaacggagaagaggactttcagctgcggcggctggccggcgcggcgacggggatgggggatgggcgcacaggcggcgccaaccgtccggcgtggctgcagcagtacgaactgattggcaagattggggaggggacctatggcctcgtcttcctcgcgcgccttaagccgccccacccggcacctggccgacgcggcccccctatcgccataaagaagtttaagcagtcaaaggagggggacggagtatcacccaccgcaattagagagatcatgctcctgcgcgagatcaaccacgagaatgtcgtcaagctcgtcaatgtgcacatcaaccacgctgacatgtccctatacctcgcattcgattacgcagagcacgacctctatgagattatcaggcatcacagggagaagctgagttcctccattaacccatacactgtcaaatccttgctgtggcaactgctcaacggcctcaactatcttcacagtaactggattatacatcgagatctaaagccttccaacatactggtcatgggagaaggagatgaacatggaattataaagatagccgattttggacttgctaggatatatcaagctccactgaaaccattatgtgataatggggttgttgtaactatctggtatcgtgctcctgagctgttacttggggggaaacactacaccagtgctgtcgatatgtgggcagttggttgcatttttgctgaactgcttacactgaaacctctattccaaggtgtggaagcaaaaaatcctccgaacccattccagcttgatcaactcgacaagatttttaaggtcttaggccaccctacagttgaaaagtggcctacccttgccaatcttccatggtggcaaaacgaccaccaacacattcaaggacataagtatgagaacccaggtttccataacattgttcatttaccaccaaagagtcctgcatttgatcttctctcaaaaatgcttgagtatgatccccgaaagcgtataacagctgcacaagctttggagcatgaatactttcggatggacccactacctggacgaaacgcgcttttaccatcccagccaggggagaaaattgtacagtatcctattcgtccagtagatactacaacagattttgaaggaacaacaagccttcaaccaactcaaccgccatcagggaacgctcctcctggaggtcaatctgtagcaagacccatgccacgacaaatgccgcagcaacctatggttggggggattccaagagtggcaggtggagtaaccatggctgccttcaacgctgcctcacaggctggcatggctgggctaaatcctggtaacatgcctatgcagagaggcgcaggtggtcagtctcatccgcaccagttgagaaggaaggcggatcaagggatggggatgcagaaccctgggtatcctcagcagaagagacgattctgacgctatcaagatggagccatctgctgtatatcagaaaaatggttctagatgctctttttggagatgggaggaggactacttggacatgattagcaagatgcagaagaaacaagaagggttggaggatgaaacaaagaaggattacagattcaggaagggtgaacaagatttggagatgtctgtttag

SEQ ID NO: 53413 - DNA, 2541 bp, Zea Mays
cctggtgaattgatgaagaggctgttgttagagtccgggtcgaggaggaggagctggctggcgacggcgtccgcgagtaagtccacgatctcgttgccgaggaagactatgcgctcccggaagaggaggcccataacgtcgccggcgccggcgccggcaccaccgcccgcggcatccgactccgctcgtcacagcggtgcgtgcggtgtcagtgaggcgcaaggcttgaggctgagtgccccttgctgcgcccactgggagggagcccaagcgcgagcgcatggccgcttgacacgcagagcggctgctcttcccgccgcgacggagagggacgcggtggcactggaacttccggccgccatatatgtaccgaatgggactgagccgaactgctctgcagtagcggccggcggcggtgttccccaccagagagaagggagcagagccgaggagaggaaatggataacacacaacatacctttcagagttttgatgagttttcccttgagacagcatgactgcaggcgggaaagaggaccttgcgttgcgtgggcctggtcttatgtggactgggccgtcattctctttgggcctaaaaatatagtcttggactcttggtccacttaagcgcgagcagatatgttagcacttagcagcattctttggtccaacaagtcgagagaagcgggccgtacgccaccacggcaacggagaagaggactttcagctgcggcggctggccggcgcggcgacggggatgggggatgggcgcacaggcggcgccaaccgtccggcgtggctgcagcagtacgaactgattggcaagattggggaggggacctatggcctcgtcttcctcgcgcgccttaagccgccccacccggcacctggccgacgcggcccccctatcgccataaagaagtttaagcagtcaaaggagggggacggagtatcacccaccgcaattagagagatcatgctcctgcgcgagatcaaccacgagaatgtcgtcaagctcgtcaatgtgcacatcaaccacgctgacatgtccctatacctcgcattcgattacgcagagcacgacctctatgagattatcaggcatcacagggagaagctgagttcctccattaacccatacactgtcaaatccttgctgtggcaactgctcaacggcctcaactatcttcacagtaactggattatacatcgagatctaaagccttccaacatactggtcatgggagaaggagatgaacatggaattataaagatagccgattttggacttgctaggatatatcaagctccactgaaaccattatgtgataatggggttgttgtaactatctggtatcgtgctcctgagctgttacttggggggaaacactacaccagtgctgtcgatatgtgggcagttggttgcatttttgctgaactgcttacactgaaacctctattccaaggtgtggaagcaaaaaatcctccgaacccattccagcttgatcaactcgacaagatttttaaggtcttaggccaccctacagttgaaaagtggcctacccttgccaatcttccatggtggcaaaacgaccaccaacacattcaaggacataagtatgagaacccaggtttccataacattgttcatttaccaccaaagagtcctgcatttgatcttctctcaaaaatgcttgagtatgatccccgaaagcgtataacagctgcacaagctttggagcatgaatactttcggatggacccactacctggacgaaaccaggggagaaaattgtacagtatcctattcgtccagtagatactacaacagattttgaaggaacaacaagccttcaaccaactcaaccgccatcagggaacgctcctcctggaggtcaatctgtagcaagacccatgccacgacaaatgccgcagcaacctatggttggggggattccaagagtggcaggtggagtaaccatggctgccttcaacgctgcctcacaggctggcatggctgggctaaatcctggtaacatgcctatgcagagaggcgcaggtggtcagtctcatccgcaccagttgagaaggaaggcggatcaagggatggggatgcagaaccctgggtatcctcagcagaagagacgattctgacgctatcaagatggagccatctgctgtatatcaggtgtttgaaacacgttgcctgtgtaagctgctgtagttttgttatcagcatccgaatgccaatgctggcacctgtaaaacacattaatcagtcgagagtccagataccagttgtccttatgggttatgatctaagctgctcgaatttggctgatttggtttgcaacagaaaggtcttgcttttgctcatggcccagtggaattatccacatgcgtaggaaatttagcatctatttggcttgagaaaagattttcattaaattctagtggcagtaaatatttttatggccacaaactacacagaattgagcagttgagcttgtgttgattttgatttttgatagggacatgcaa

SEQ ID NO: 53414 - DNA, 2512 bp, Zea Mays
cctggtgaattgatgaagaggctgttgttagagtccgggtcgaggaggaggagctggctggcgacggcgtccgcgagtaagtccacgatctcgttgccgaggaagactatgcgctcccggaagaggaggcccataacgtcgccggcgccggcgccggcaccaccgcccgcggcatccgactccgctcgtcacagcggtgcgtgcggtgtcagtgaggcgcaaggcttgaggctgagtgccccttgctgcgcccactgggagggagcccaagcgcgagcgcatggccgcttgacacgcagagcggctgctcttcccgccgcgacggagagggacgcggtggcactggaacttccggccgccatatatgtaccgaatgggactgagccgaactgctctgcagtagcggccggcggcggtgttccccaccagagagaagggagcagagccgaggagaggaaatggataacacacaacatacctttcagagttttgatgagttttcccttgagacagcatgactgcaggcgggaaagaggaccttgcgttgcgtgggcctggtcttatgtggactgggccgtcattctctttgggcctaaaaatatagtcttggactcttggtccacttaagcgcgagcagatatgttagcacttagcagcattctttggtccaacaagtcgagagaagcgggccgtacgccaccacggcaacggagaagaggactttcagctgcggcggctggccggcgcggcgacggggatgggggatgggcgcacaggcggcgccaaccgtccggcgtggctgcagcagtacgaactgattggcaagattggggaggggacctatggcctcgtcttcctcgcgcgccttaagccgccccacccggcacctggccgacgcggcccccctatcgccataaagaagtttaagcagtcaaaggagggggacggagtatcacccaccgcaattagagagatcatgctcctgcgcgagatcaaccacgagaatgtcgtcaagctcgtcaatgtgcacatcaaccacgctgacatgtccctatacctcgcattcgattacgcagagcacgacctctatgagattatcaggcatcacagggagaagctgagttcctccattaacccatacactgtcaaatccttgctgtggcaactgctcaacggcctcaactatcttcacagtaactggattatacatcgagatctaaagccttccaacatactggtcatgggagaaggagatgaacatggaattataaagatagccgattttggacttgctaggatatatcaagctccactgaaaccattatgtgataatggggttgttgtaactatctggtatcgtgctcctgagctgttacttggggggaaacactacaccagtgctgtcgatatgtgggcagttggttgcatttttgctgaactgcttacactgaaacctctattccaaggtgtggaagcaaaaaatcctccgaacccattccagcttgatcaactcgacaagatttttaaggtcttaggccaccctacagttgaaaagtggcctacccttgccaatcttccatggtggcaaaacgaccaccaacacattcaaggacataagtatgagaacccaggtttccataacattgttcatttaccaccaaagagtcctgcatttgatcttctctcaaaaatgcttgaatactttcggatggacccactacctggacgaaacgcgcttttaccatcccagccaggggagaaaattgtacagtatcctattcgtccagtagatactacaacagattttgaaggaacaacaagccttcaaccaactcaaccgccatcagggaacgctcctcctggaggtcaatctgtagcaagacccatgccacgacaaatgccgcagcaacctatggttggggggattccaagagtggcaggtggagtaaccatggctgccttcaacgctgcctcacaggctggcatggctgggctaaatcctggtaacatgcctatgcagagaggcgcaggtggtcagtctcatccgcaccagttgagaaggaaggcggatcaagggatggggatgcagaaccctgggtatcctcagcagaagagacgattctgacgctatcaagatggagccatctgctgtatatcaggtgtttgaaacacgttgcctgtgtaagctgctgtagttttgttatcagcatccgaatgccaatgctggcacctgtaaaacacattaatcagtcgagagtccagataccagttgtccttatgggttatgatctaagctgctcgaatttggctgatttggtttgcaacagaaaggtcttgcttttgctcatggcccagtggaattatccacatgcgtaggaaatttagcatctatttggcttgagaaaagattttcattaaattctagtggcagtaaatatttttatggccacaaactacacagaattgagcagttgagcttgtgttgattttgatttttgatagggacatgcaa

SEQ ID NO: 53415 - DNA, 2548 bp, Zea Mays
cctggtgaattgatgaagaggctgttgttagagtccgggtcgaggaggaggagctggctggcgacggcgtccgcgagtaagtccacgatctcgttgccgaggaagactatgcgctcccggaagaggaggcccataacgtcgccggcgccggcgccggcaccaccgcccgcggcatccgactccgctcgtcacagcggtgcgtgcggtgtcagtgaggcgcaaggcttgaggctgagtgccccttgctgcgcccactgggagggagcccaagcgcgagcgcatggccgcttgacacgcagagcggctgctcttcccgccgcgacggagagggacgcggtggcactggaacttccggccgccatatatgtaccgaatgggactgagccgaactgctctgcagtagcggccggcggcggtgttccccaccagagagaagggagcagagccgaggagaggaaatggataacacacaacatacctttcagagttttgatgagttttcccttgagacagcatgactgcaggcgggaaagaggaccttgcgttgcgtgggcctggtcttatgtggactgggccgtcattctctttgggcctaaaaatatagtcttggactcttggtccacttaagcgcgagcagatatgttagcacttagcagcattctttggtccaacaagtcgagagaagcgggccgtacgccaccacggcaacggagaagaggactttcagctgcggcggctggccggcgcggcgacggggatgggggatgggcgcacaggcggcgccaaccgtccggcgtggctgcagcagtacgaactgattggcaagattggggaggggacctatggcctcgtcttcctcgcgcgccttaagccgccccacccggcacctggccgacgcggcccccctatcgccataaagaagtttaagcagtcaaaggagggggacggagtatcacccaccgcaattagagagatcatgctcctgcgcgagatcaaccacgagaatgtcgtcaagctcgtcaatgtgcacatcaaccacgctgacatgtccctatacctcgcattcgattacgcagagcacgacctctatgagattatcaggcatcacagggagaagctgagttcctccattaacccatacactgtcaaatccttgctgtggcaactgctcaacggcctcaactatcttcacagtaactggattatacatcgagatctaaagccttccaacatactggtcatgggagaaggagatgaacatggaattataaagatagccgattttggacttgctaggatatatcaagctccactgaaaccattatgtgataatggggttgttgtaactatctggtatcgtgctcctgagctgttacttggggggaaacactacaccagtgctgtcgttggttgcatttttgctgaactgcttacactgaaacctctattccaaggtgtggaagcaaaaaatcctccgaacccattccagcttgatcaactcgacaagatttttaaggtcttaggccaccctacagttgaaaagtggcctacccttgccaatcttccatggtggcaaaacgaccaccaacacattcaaggacataagtatgagaacccaggtttccataacattgttcatttaccaccaaagagtcctgcatttgatcttctctcaaaaatgcttgagtatgatccccgaaagcgtataacagctgcacaagctttggagcatgaatactttcggatggacccactacctggacgaaacgcgcttttaccatcccagccaggggagaaaattgtacagtatcctattcgtccagtagatactacaacagattttgaaggaacaacaagccttcaaccaactcaaccgccatcagggaacgctcctcctggaggtcaatctgtagcaagacccatgccacgacaaatgccgcagcaacctatggttggggggattccaagagtggcaggtggagtaaccatggctgccttcaacgctgcctcacaggctggcatggctgggctaaatcctggtaacatgcctatgcagagaggcgcaggtggtcagtctcatccgcaccagttgagaaggaaggcggatcaagggatggggatgcagaaccctgggtatcctcagcagaagagacgattctgacgctatcaagatggagccatctgctgtatatcaggtgtttgaaacacgttgcctgtgtaagctgctgtagttttgttatcagcatccgaatgccaatgctggcacctgtaaaacacattaatcagtcgagagtccagataccagttgtccttatgggttatgatctaagctgctcgaatttggctgatttggtttgcaacagaaaggtcttgcttttgctcatggcccagtggaattatccacatgcgtaggaaatttagcatctatttggcttgagaaaagattttcattaaattctagtggcagtaaatatttttatggccacaaactacacagaattgagcagttgagcttgtgttgattttgatttttgatagggacatgcaa

SEQ ID NO: 53416 - DNA, 2163 bp, Zea Mays
atggcaataacaccaaggctcgccgcaatcttcttctccttgctctgctgccgctcagcgtcctccttgcgccctccgaatctcatctccaacagcagcggcggcgtcatcacccatctccctggcttccaggggcccctccccttccacctccaaacagggtacgtggaagtggacgaggacaatggcgtccacctcttctactacttcgtccggtcggagcgggaggacagccccggcgacgaccccgtcgtgctctggctcacgggcggccctggatgctctgtcctcaccggcctcgcctacgagatcggccctctcagtttcgatcttaacggctacgttggtggcttacccaagttggtgtataaacaagattcatggaccaaggtgagcaatgtcatatttcttgattctccggttggcgctggattttcgtattctcacacggaggaaggctacaaatcgagtgataccagagctgtgaaccaaatcctcgtcttcctcaaaaagtggtttgataagtatccacagttcttttcaagtcctctctacatcgccggcgattcctactctggcatgatcgtgccaaccgttacatctgaaattgctagaggtaaagaagaggggagccaaccgaatctaaatctaaagggctacctcgttggtaatccagtcacagatttcaacttcgatggtccgtccagaatcccatttgctcacgggatgggtctcatatcggacgaaatatacgaggcatacgagaagagctgcagtgtgggtgacagtagacgccaaagcattgagtgcataaatagccttggcgccatagacgaggcataagcccgaaccacgttctggagcccctgtgcgctttcgcgagtcccaagccgaagctaataagttcaggtgcacgggagatgctccagctcccagtcccagtgcacactgaggaggaggaggaggagcttcgcttgtctgagatctcgctgcagtgcagaacggcaggatacatgatgtccagcatgtgggcgaacgatgcctcggtacgacaggctcttggtatccacaagggaacagttccttcgtggtcaaggtgcaactacgacataccttacacgaacgatattccgagtgcagtgaagtaccatctggatgtgaccaccaaaggctacaggagtctagtttacaacggtgaccatgatatggtcgtgccttttatcggcacgcaagcctggatcaggtctcttaatttctctaccgtggatgagtggaggccatggtttgtggacggccaagttgcaggttacattattcagccaggctatttatgcagatttacaaggtcatactcaaacaacctcacctttgcaaccgtcaagggtggtgggcatactgctccggagtacatgccaaggcaatgctttgctatgtttgtgaggtgggtttctggtgaccccctttgatggcgtacatagcagctccaagttccagtgatgcgttacattattacaagcgaaacgtattggttaggggctccggagaaggaaaagcagttgtggaagggcatcctgatatatacatgcaagttattcttaaatcttgtcagtttcaaacaaacgacctataagttggcttttaaaaaagctgtaaaattagcttcaacagaatggcccgctcgatttcctctatggtgactcacctagcaggatgtctgctcgaggttctctatagtgactcgcccagtaagattttattatggtgatgcggaagaatctggatgagtaatacatggatggaaaagagatgggaaattggaggttaatatacgatgtctacatataaaaagagtggtaagtaggggaggggaagacttatatgattcgtgcagaacaatgatcgaaactggtgctttatagaaatagagatttggctagaagttgccgacatgttcgtttggttttaatctatatcaactactgctacttctataatgttttgtctctatagattgtagctgcagcagtttgaataattgcctttaatgcgaagcgaaccatgtaatataagcgtaccggcttctatggatcgcttatctctgctgtttgcgataccatgtaatataagcatgcgtttggtgtggacgagttgtccacattttct

SEQ ID NO: 53417 - DNA, 2123 bp, Zea Mays
atggcaataacaccaaggctcgccgcaatcttcttctccttgctctgctgccgctcagcgtcctccttgcgccctccgaatctcatctccaacagcagcggcggcgtcatcacccatctccctggcttccaggggcccctccccttccacctccaaacagggtacgtggaagtggacgaggacaatggcgtccacctcttctactacttcgtccggtcggagcgggaggacagccccggcgacgaccccgtcgtgctctggctcacgggcggccctggatgctctgtcctcaccggcctcgcctacgagatcggccctctcagtttcgatcttaacggctacgttggtggcttacccaagttggtgtataaacaagattcatggaccaagtggtttgataagtatccacagttcttttcaagtcctctctacatcgccggcgattcctactctggcatgatcgtgccaaccgttacatctgaaattgctagaggtaaagaagaggggagccaaccgaatctaaatctaaagggctacctcgttggtaatccagtcacagatttcaacttcgatggtccgtccagaatcccatttgctcacgggatgggtctcatatcggacgaaatatacgagaggcatacgagaagagctgcagtgtgggtgacagtagacgccaaagcattgagtgcataaatagccttggcgccatagacgaggcacatatccaattcttgtttaattgtttccaatgaccgacaactgagaacggttccttaactttttgaagtgcatcaaaggcataagcccgaaccacgttctggagcccctgtgcgctttcgcgagtcccaagccgaagctaataagttcaggtgcacgggagatgctccagctcccagtcccagtgcacactgaggaggaggaggaggagcttcgcttgtctgagatctcgctgcagtgcagaacggcaggatacatgatgtccagcatgtgggcgaacgatgcctcggtacgacaggctcttggtatccacaagggaacagttccttcgtggtcaaggtgcaactacgacataccttacacgaacgatattccgagtgcagtgaagtaccatctggatgtgaccaccaaaggctacaggagtctagtttacaacggtgaccatgatatggtcgtgccttttatcggcacgcaagcctggatcaggtctcttaatttctctaccgtggatgagtggaggccatggtttgtggacggccaagttgcaggttacattattcagccaggctatttatgcagatttacaaggtcatactcaaacaacctcacctttgcaaccgtcaagggtggtgggcatactgctccggagtacatgccaaggcaatgctttgctatgtttgtgaggtgggtttctggtgaccccctttgatggcgtacatagcagctccaagttccagtgatgcgttacattattacaagcgaaacgtattggttaggggctccggagaaggaaaagcagttgtggaagggcatcctgatatatacatgcaagttattcttaaatcttgtcagtttcaaacaaacgacctataagttggcttttaaaaaagctgtaaaattagcttcaacagaatggcccgctcgatttcctctatggtgactcacctagcaggatgtctgctcgaggttctctatagtgactcgcccagtaagattttattatggtgatgcggaagaatctggatgagtaatacatggatggaaaagagatgggaaattggaggttaatatacgatgtctacatataaaaagagtggtaagtaggggaggggaagacttatatgattcgtgcagaacaatgatcgaaactggtgctttatagaaatagagatttggctagaagttgccgacatgttcgtttggttttaatctatatcaactactgctacttctataatgttttgtctctatagattgtagctgcagcagtttgaataattgcctttaatgcgaagcgaaccatgtaatataagcgtaccggcttctatggatcgcttatctctgctgtttgcgataccatgtaatataagcatgcgtttggtgtggacgagttgtccacattttct

SEQ ID NO: 53418 - DNA, 2256 bp, Zea Mays
gacaaacatacacgccagcgagaaagaaaataggagggacgagagagacgcacaactgtacaaaggacggaagtcaatatatatactagggcggagtgttccacgagctgagctcgtctcgttccaaaatggcaataacaccaaggctcgccgcaatcttcttctccttgctctgctgccgctcagcgtcctccttgcgccctccgaatctcatctccaacagcagcggcggcgtcatcacccatctccctggcttccaggggcccctccccttccacctccaaacagggtacgtggaagtggacgaggacaatggcgtccacctcttctactacttcgtccggtcggagcgggaggacagccccggcgacgaccccgtcgtgctctggctcacgggcggccctggatgctctgtcctcaccggcctcgcctacgagatcggccctctcagtttcgatcttaacggctacgttggtggcttacccaagttggtgtataaacaagattcatggaccaaggtgagcaatgtcatatttcttgattctccggttggcgctggattttcgtattctcacacggaggaaggctacaaatcgagtgataccagagctgtgaaccaaatcctcgtcttcctcaaaaagtggtttgataagtatccacagttcttttcaagtcctctctacatcgccggcgattcctactctggcatgatcgtgccaaccgttacatctgaaattgctagaggtaaagaagaggggagccaaccgaatctaaatctaaagggctacctcgttggtaatccagtcacagatttcaacttcgatggtccgtccagaatcccatttgctcacgggatgggtctcatatcggacgaaatatacgaggcatacgagaagagctgcagtgtgggtgacagtagacgccaaagcattgagtgcataaatagccttggcgccatagacgaggcacatatccaattcttgtttaattgtttccaatgaccgacaactgagaacggttccttaactttttgaagtgcatcaaaggcataagcccgaaccacgttctggagcccctgtgcgctttcgcgagtcccaagccgaagctaataagttcaggtgcacgggagatgctccagctcccagtcccagtgcacactgaggaggaggaggaggagcttcgcttgtctgagatctcgctgcagtgcagagatacatgatgtccagcatgtgggcgaacgatgcctcggtacgacaggctcttggtatccacaagggaacagttccttcgtggtcaaggtgcaactacgacataccttacacgaacgatattccgagtgcagtgaagtaccatctggatgtgaccaccaaaggctacaggagtctagtttacaacggtgaccatgatatggtcgtgccttttatcggcacgcaagcctggatcaggtctcttaatttctctaccgtggatgagtggaggccatggtttgtggacggccaagttgcagggctatttatgcagatttacaaggtcatactcaaacaacctcacctttgcaaccgtcaagggtggtgggcatactgctccggagtacatgccaaggcaatgctttgctatgtttgtgaggggctccggagaaggaaaagcagttgtggaagggcatcctgatatatacatgcaagttattcttaaatcttgtcagtttcaaacaaacgacctataagttggcttttaaaaaagctgtaaaattagcttcaacagaatggcccgctcgatttcctctatggtgactcacctagcaggatgtctgctcgaggttctctatagtgactcgcccagtaagattttattatggtgatgcggaagaatctggatgagtaatacatggatggaaaagagatgggaaattggaggttaatatacgatgtctacatataaaaagagtggtaagtaggggaggggaagacttatatgattcgtgcagaacaatgatcgaaactggtgctttatagaaatagagatttggctagaagttgccgacatgttcgtttggttttaatctatatcaactactgctacttctataatgttttgtctctatagattgtagctgcagcagtttgaataattgcctttaatgcgaagcgaaccatgtaatataagcgtaccggcttctatggatcgcttatctctgctgtttgcgataccatgtaatataagcatgcgtttggtgtggacgagttgtccacattttct

SEQ ID NO: 53419 - DNA, 2231 bp, Zea Mays
ggaagaattcagcaagcaagaaatacatgcgtatacatatagacaaacatacacgccagcgagaaagaaaataggagggacgagagagacgcacaactgtacaaaggacggaagtcaatatatatactagggcggagtgttccacgagctgagctcgtctcgttccaaaatggcaataacaccaaggctcgccgcaatcttcttctccttgctctgctgccgctcagcgtcctccttgcgccctccgaatctcatctccaacagcagcggcggcgtcatcacccatctccctggcttccaggggcccctccccttccacctccaaacagggtacgtggaagtggacgaggacaatggcgtccacctcttctactacttcgtccggtcggagcgggaggacagccccggcgacgaccccgtcgtgctctggctcacgggcggccctggatgctctgtcctcaccggcctcgcctacgagatcggccctctcagtttcgatcttaacggctacgttggtggcttacccaagttggtgtataaacaagattcatggaccaaggtgagcaatgtcatatttcttgattctccggttggcgctggattttcgtattctcacacggaggaaggctacaaatcgagtgataccagagctgtgaaccaaatcctcgtcttcctcaaaaagtggtttgataagtatccacagttcttttcaagtcctctctacatcgccggcgattcctactctggcatgatcgtgccaaccgttacatctgaaattgctagaggtaaagaagaggggagccaaccgaatctaaatctaaagggctacctcgttggtaatccagtcacagatttcaacttcgatggtccgtccagaatcccatttgctcacgggatgggtctcatatcggacgaaatatacgagtgcatcaaaggcataagcccgaaccacgttctggagcccctgtgcgctttcgcgagtcccaagccgaagctaataagttcaggtgcacgggagatgctccagctcccagtcccagtgcacactgaggaggaggaggaggagcttcgcttgtctgagatctcgctgcagtgcagaacggcaggatacatgatgtccagcatgtgggcgaacgatgcctcggtacgacaggctcttggtatccacaagggaacagttccttcgtggtcaaggtgcaactacgacataccttacacgaacgatattccgagtgcagtgaagtaccatctggatgtgaccaccaaaggctacaggagtctagtttacaacggtgaccatgatatggtcgtgccttttatcggcacgcaagcctggatcaggtctcttaatttctctaccgtggatgagtggaggccatggtttgtggacggccaagttgcaggatttacaaggtcatactcaaacaacctcacctttgcaaccgtcaagggtggtgggcatactgctccggagtacatgccaaggcaatgctttgctatgtttgtgaggtgggtttctggtgaccccctttgatggcgtacatagcagctccaagttccagtgatgcgttacattattacaagcgaaacgtattggttaggggctccggagaaggaaaagcagttgtggaagggcatcctgatatatacatgcaagttattcttaaatcttgtcagtttcaaacaaacgacctataagttggcttttaaaaaagctgtaaaattagcttcaacagaatggcccgctcgatttcctctatggtgactcacctagcaggatgtctgctcgaggttctctatagtgactcgcccagtaagattttattatggtgatgcggaagaatctggatgagtaatacatggatggaaaagagatgggaaattggaggttaatatacgatgtctacatataaaaagagtggtaagtaggggaggggaagacttatatgattcgtgcagaacaatgatcgaaactggtgctttatagaaatagagatttggctagaagttgccgacatgttcgtttggttttaatctatatcaactactgctacttctataatgttttgtctctatagattgtagctgcagcagtttgaataattgcctttaatgcgaagcgaaccatgtaatataagcgtaccggcttctatggatcgcttatctctgctgtttgcgataccatgtaatataagcatgcgtttggtgtggacgagttgtccacattttct

SEQ ID NO: 53420 - DNA, 2342 bp, Zea Mays
ggaagaattcagcaagcaagaaatacatgcgtatacatatagacaaacatacacgccagcgagaaagaaaataggagggacgagagagacgcacaactgtacaaaggacggaagtcaatatatatactagggcggagtgttccacgagctgagctcgtctcgttccaaaatggcaataacaccaaggctcgccgcaatcttcttctccttgctctgctgccgctcagcgtcctccttgcgccctccgaatctcatctccaacagcagcggcggcgtcatcacccatctccctggcttccaggggcccctccccttccacctccaaacagggtacgtggaagtggacgaggacaatggcgtccacctcttctactacttcgtccggtcggagcgggaggacagccccggcgacgaccccgtcgtgctctggctcacgggcggccctggatgctctgtcctcaccggcctcgcctacgagatcggccctctcagtttcgatcttaacggctacgttggtggcttacccaagttggtgtataaacaagattcatggaccaaggtgagcaatgtcatatttcttgattctccggttggcgctggattttcgtattctcacacggaggaaggctacaaatcgagtgataccagagctgtgaaccaaatcctcgtcttcctcaaaaagtggtttgataagtatccacagttcttttcaagtcctctctacatcgccggcgattcctactctggcatgatcgtgccaaccgttacatctgaaattgctagaggtaaagaagaggggagccaaccgaatctaaatctaaagggctacctcgttggtaatccagtcacagatttcaacttcgatggtccgtccagaatcccatttgctcacgggatgggtctcatatcggacgaaatatacgaggcatacgagaagagctgcagtgtgggtgacagtagacgccaaagcattgagtgcataaatagccttggcgccatagacgagtgcatcaaaggcataagcccgaaccacgttctggagcccctgtgcgctttcgcgagtcccaagccgaagctaataagttcaggtgcacgggagatgctccagctcccagtcccagtgcacactgaggaggaggaggaggagcttcgcttgtctgagatctcgctgcagtgcagaacggcaggatacatgatgtccagcatgtgggcgaacgatgcctcggtacgacaggctcttggtatccacaagggaacagttccttcgtggtcaaggtgcaactacgacataccttacacgaacgatattccgagtgcagtgaagtaccatctggatgtgaccaccaaaggctacaggagtctagtttacaacggtgaccatgatatggtcgtgccttttatcggcacgcaagcctggatcaggtctcttaatttctctaccgtggatgagtggaggccatggtttgtggacggccaagttgcaggttacattattcagccaggctatttatgcagatttacaaggtcatactcaaacaacctcacctttgcaaccgtcaagggtggtgggcatactgctccggagtacatgccaaggcaatgctttgctatgtttgtgaggtgggtttctggtgaccccctttgatggcgtacatagcagctccaagttccagtgatgcgttacattattacaagcgaaacgtattggttaggggctccggagaaggaaaagcagttgtggaagggcatcctgatatatacatgcaagttattcttaaatcttgtcagtttcaaacaaacgacctataagttggcttttaaaaaagctgtaaaattagcttcaacagaatggcccgctcgatttcctctatggtgactcacctagcaggatgtctgctcgaggttctctatagtgactcgcccagtaagattttattatggtgatgcggaagaatctggatgagtaatacatggatggaaaagagatgggaaattggaggttaatatacgatgtctacatataaaaagagtggtaagtaggggaggggaagacttatatgattcgtgcagaacaatgatcgaaactggtgctttatagaaatagagatttggctagaagttgccgacatgttcgtttggttttaatctatatcaactactgctacttctataatgttttgtctctatagattgtagctgcagcagtttgaataattgcctttaatgcgaagcgaaccatgtaatataagcgtaccggcttctatggatcgcttatctctgctgtttgcgataccatgtaatataagcatgcgtttggtgtggacgagttgtccacattttct

SEQ ID NO: 53421 - DNA, 2272 bp, Zea Mays
ctcaaatcctcaagggagcaacacgaggaagagcgaacttgtcaagagcagagaagatgagcaaacgaggatggaacagcggcggaagaattcagcaagcaagaaatacatgcgtatacatatagacaaacatacacgccagcgagaaagaaaataggagggacgagagagacgcacaactgtacaaaggacggaagtcaatatatatactagggcggagtgttccacgagctgagctcgtctcgttccaaaatggcaataacaccaaggctcgccgcaatcttcttctccttgctctgctgccgctcagcgtcctccttgcgccctccgaatctcatctccaacagcagcggcggcgtcatcacccatctccctggcttccaggggcccctccccttccacctccaaacagggtacgtggaagtggacgaggacaatggcgtccacctcttctactacttcgtccggtcggagcgggaggacagccccggcgacgaccccgtcgtgctctggctcacgggcggccctggatgctctgtcctcaccggcctcgcctacgagatcggccctctcagtttcgatcttaacggctacgttggtggcttacccaagttggtgtataaacaagattcatggaccaagtggtttgataagtatccacagttcttttcaagtcctctctacatcgccggcgattcctactctggcatgatcgtgccaaccgttacatctgaaattgctagaggtaaagaagaggggagccaaccgaatctaaatctaaagggctacctcgttggtaatccagtcacagatttcaacttcgatggtccgtccagaatcccatttgctcacgggatgggtctcatatcggacgaaatatacgaggcatacgagaagagctgcagtgtgggtgacagtagacgccaaagcattgagtgcataaatagccttggcgccatagacgagtgcatcaaaggcataagcccgaaccacgttctggagcccctgtgcgctttcgcgagtcccaagccgaagctaataagttcaggtgcacgggagatgctccagctcccagtcccagtgcacactgaggaggaggaggaggagcttcgcttgtctgagatctcgctgcagtgcagaacggcaggatacatgatgtccagcatgtgggcgaacgatgcctcggtacgacaggctcttggtatccacaagggaacagttccttcgtggtcaaggtgcaactacgacataccttacacgaacgatattccgagtgcagtgaagtaccatctggatgtgaccaccaaaggctacaggagtctagtttacaacggtgaccatgatatggtcgtgccttttatcggcacgcaagcctggatcaggtctcttaatttctctaccgtggatgagtggaggccatggtttgtggacggccaagttgcaggatttacaaggtcatactcaaacaacctcacctttgcaaccgtcaagggtggtgggcatactgctccggagtacatgccaaggcaatgctttgctatgtttgtgaggtgggtttctggtgaccccctttgatggcgtacatagcagctccaagttccagtgatgcgttacattattacaagcgaaacgtattggttaggggctccggagaaggaaaagcagttgtggaagggcatcctgatatatacatgcaagttattcttaaatcttgtcagtttcaaacaaacgacctataagttggcttttaaaaaagctgtaaaattagcttcaacagaatggcccgctcgatttcctctatggtgactcacctagcaggatgtctgctcgaggttctctatagtgactcgcccagtaagattttattatggtgatgcggaagaatctggatgagtaatacatggatggaaaagagatgggaaattggaggttaatatacgatgtctacatataaaaagagtggtaagtaggggaggggaagacttatatgattcgtgcagaacaatgatcgaaactggtgctttatagaaatagagatttggctagaagttgccgacatgttcgtttggttttaatctatatcaactactgctacttctataatgttttgtctctatagattgtagctgcagcagtttgaataattgcctttaatgcgaagcgaaccatgtaatataagcgtaccggcttctatggatcgcttatctctgctgtttgcgataccatgtaatataagcatgcgtttggtgtggacgagttgtccacattttct

SEQ ID NO: 53422 - DNA, 2388 bp, Zea Mays
ctcaaatcctcaagggagcaacacgaggaagagcgaacttgtcaagagcagagaagatgagcaaacgaggatggaacagcggcggaagaattcagcaagcaagaaatacatgcgtatacatatagacaaacatacacgccagcgagaaagaaaataggagggacgagagagacgcacaactgtacaaaggacggaagtcaatatatatactagggcggagtgttccacgagctgagctcgtctcgttccaaaatggcaataacaccaaggctcgccgcaatcttcttctccttgctctgctgccgctcagcgtcctccttgcgccctccgaatctcatctccaacagcagcggcggcgtcatcacccatctccctggcttccaggggcccctccccttccacctccaaacagggtacgtggaagtggacgaggacaatggcgtccacctcttctactacttcgtccggtcggagcgggaggacagccccggcgacgaccccgtcgtgctctggctcacgggcggccctggatgctctgtcctcaccggcctcgcctacgagatcggccctctcagtttcgatcttaacggctacgttggtggcttacccaagttggtgtataaacaagattcatggaccaaggtgagcaatgtcatatttcttgattctccggttggcgctggattttcgtattctcacacggaggaaggctacaaatcgagtgataccagagctgtgaaccaaatcctcgtcttcctcaaaaagtggtttgataagtatccacagttcttttcaagtcctctctacatcgccggcgattcctactctggcatgatcgtgccaaccgttacatctgaaattgctagaggtaaagaagaggggagccaaccgaatctaaatctaaagggctacctcgttggtaatccagtcacagatttcaacttcgatggtccgtccagaatcccatttgctcacgggatgggtctcatatcggacgaaatatacgaggcatacgagaagagctgcagtgtgggtgacagtagacgccaaagcattgagtgcataaatagccttggcgccatagacgagtgcatcaaaggcataagcccgaaccacgttctggagcccctgtgcgctttcgcgagtcccaagccgaagctaataagttcaggtgcacgggagatgctccagctcccagtcccagtgcacactgaggaggaggaggaggagcttcgcttgtctgagatctcgctgcagtgcagagatacatgatgtccagcatgtgggcgaacgatgcctcggtacgacaggctcttggtatccacaagggaacagttccttcgtggtcaaggtgcaactacgacataccttacacgaacgatattccgagtgcagtgaagtaccatctggatgtgaccaccaaaggctacaggagtctagtttacaacggtgaccatgatatggtcgtgccttttatcggcacgcaagcctggatcaggtctcttaatttctctaccgtggatgagtggaggccatggtttgtggacggccaagttgcaggatttacaaggtcatactcaaacaacctcacctttgcaaccgtcaagggtggtgggcatactgctccggagtacatgccaaggcaatgctttgctatgtttgtgaggtgggtttctggtgaccccctttgatggcgtacatagcagctccaagttccagtgatgcgttacattattacaagcgaaacgtattggttaggggctccggagaaggaaaagcagttgtggaagggcatcctgatatatacatgcaagttattcttaaatcttgtcagtttcaaacaaacgacctataagttggcttttaaaaaagctgtaaaattagcttcaacagaatggcccgctcgatttcctctatggtgactcacctagcaggatgtctgctcgaggttctctatagtgactcgcccagtaagattttattatggtgatgcggaagaatctggatgagtaatacatggatggaaaagagatgggaaattggaggttaatatacgatgtctacatataaaaagagtggtaagtaggggaggggaagacttatatgattcgtgcagaacaatgatcgaaactggtgctttatagaaatagagatttggctagaagttgccgacatgttcgtttggttttaatctatatcaactactgctacttctataatgttttgtctctatagattgtagctgcagcagtttgaataattgcctttaatgcgaagcgaaccatgtaatataagcgtaccggcttctatggatcgcttatctctgctgtttgcgataccatgtaatataagcatgcgtttggtgtggacgagttgtccacattttct

SEQ ID NO: 53423 - DNA, 2563 bp, Zea Mays
ctcatctatatccttagttgtgttttttctcagctatcgcactcgattatcagcggtaacaagtttaaataagttagtatcaattttagtatgatattcaattatggttgaatttaaactaatatgaaccaaacaacatccaaggaggagacgccttcgcctcttcctctcaaatcctcaagggagcaacacgaggaagagcgaacttgtcaagagcagagaagatgagcaaacgaggatggaacagcggcggaagaattcagcaagcaagaaatacatgcgtatacatatagacaaacatacacgccagcgagaaagaaaataggagggacgagagagacgcacaactgtacaaaggacggaagtcaatatatatactagggcggagtgttccacgagctgagctcgtctcgttccaaaatggcaataacaccaaggctcgccgcaatcttcttctccttgctctgctgccgctcagcgtcctccttgcgccctccgaatctcatctccaacagcagcggcggcgtcatcacccatctccctggcttccaggggcccctccccttccacctccaaacagggtacgtggaagtggacgaggacaatggcgtccacctcttctactacttcgtccggtcggagcgggaggacagccccggcgacgaccccgtcgtgctctggctcacgggcggccctggatgctctgtcctcaccggcctcgcctacgagatcggccctctcagtttcgatcttaacggctacgttggtggcttacccaagttggtgtataaacaagattcatggaccaaggtgagcaatgtcatatttcttgattctccggttggcgctggattttcgtattctcacacggaggaaggctacaaatcgagtgataccagagctgtgaaccaaatcctcgtcttcctcaaaaagtggtttgataagtatccacagttcttttcaagtcctctctacatcgccggcgattcctactctggcatgatcgtgccaaccgttacatctgaaattgctagaggtaaagaagaggggagccaaccgaatctaaatctaaagggctacctcgttggtaatccagtcacagatttcaacttcgatggtccgtccagaatcccatttgctcacgggatgggtctcatatcggacgaaatatacgaggcatacgagaagagctgcagtgtgggtgacagtagacgccaaagcattgagtgcataaatagccttggcgccatagacgagtgcatcaaaggcataagcccgaaccacgttctggagcccctgtgcgctttcgcgagtcccaagccgaagctaataagttcaggtgcacgggagatgctccagctcccagtcccagtgcacactgaggaggaggaggaggagcttcgcttgtctgagatctcgctgcagtgcagaacggcaggatacatgatgtccagcatgtgggcgaacgatgcctcggtacgacaggctcttggtatccacaagggaacagttccttcgtggtcaaggtgcaactacgacataccttacacgaacgatattccgagtgcagtgaagtaccatctggatgtgaccaccaaaggctacaggagtctagtttacaacggtgaccatgatatggtcgtgccttttatcggcacgcaagcctggatcaggtctcttaatttctctaccgtggatgagtggaggccatggtttgtggacggccaagttgcaggatttacaaggtcatactcaaacaacctcacctttgcaaccgtcaagggtggtgggcatactgctccggagtacatgccaaggcaatgctttgctatgtttgtgaggtgggtttctggtgaccccctttgatggcgtacatagcagctccaagttccagtgatgcgttacattattacaagcgaaacgtattggttaggggctccggagaaggaaaagcagttgtggaagggcatcctgatatatacatgcaagttattcttaaatcttgtcagtttcaaacaaacgacctataagttggcttttaaaaaagctgtaaaattagcttcaacagaatggcccgctcgatttcctctatggtgactcacctagcaggatgtctgctcgaggttctctatagtgactcgcccagtaagattttattatggtgatgcggaagaatctggatgagtaatacatggatggaaaagagatgggaaattggaggttaatatacgatgtctacatataaaaagagtggtaagtaggggaggggaagacttatatgattcgtgcagaacaatgatcgaaactggtgctttatagaaatagagatttggctagaagttgccgacatgttcgtttggttttaatctatatcaactactgctacttctataatgttttgtctctatagattgtagctgcagcagtttgaataattgcctttaatgcgaagcgaaccatgtaatataagcgtaccggcttctatggatcgcttatctctgctgtttgcgataccatgtaatataagcatgcgtttggtgtggacgagttgtccacattttct

SEQ ID NO: 53424 - DNA, 1105 bp, Zea Mays
aatgaacagtcatgctgaatttcttggctggtccattcggagcaatatgggcttctgattggtcgtactcatggcaatgttggtgcctgatcttagtttctcggcatcgatctctagtgtgaagctcccaaggtacggggcatcaaagagtgagacattctttgttaagaagcccccaacattccgtgcagaagctaggccagcggaatctggcaaatatggtactaataatggccgggcaacaaagatggtaccaacaactgagttcaggaggaccagtggtggtcttgtaagatcagggacagttaatggttctccaaatagcgctgtcaatggctcgaccaaggtgttgattaatggttctgcaaatgccattgacaatagctcaaccaaagcagtcattaacggtacgccgaaggtggctgtaaatggtactagtctggtgaaaagcagcaagacttctcttgttaagacgcagaagcaagtgagacccaaagatgacccctttcaagaggaattgaaggttttgccttctgatgagggattcagctgggcaaaagataattacaattctgtgcagaggagcatagatatatggtcttttgtgctttctcttcgagtccgcgtgctatttgacaatgcaaaatgggcatatcctggtggattctcggaagaaaagcagaaagttcgaaggcggaaaactgcttcatggctaagagagcaagtattacagcttggcccaacgtttattaagctcgggcagttatcctccactagatctgatttatttcccagagaatttgtggacgagcttgcgaaactgcaggacagagtacctgctttttctcctgagaaggcaaaagctttcatagagaaagaaatgggttgttccattgatgttgtgtacaaagaatttgaggaacgcccaatagctgctgccagtcttggtcagcgtttgaaggaattgtatgattctctctaattaaagtaaaataatatatccattgcacatcactcctgtatatgtctattgcttttcatatcatgtatcagttttcacttaatgcatctcagtttcatggcaaaaaaaaaactgatattacat

SEQ ID NO: 53425 - DNA, 1078 bp, Zea Mays
ctttactccgtattatttagaattaggggcttctgattggtcgtactcatggcaatgttggtgcctgatcttagtttctcggcatcgatctctagtgtgaagctcccaaggtacggggcatcaaagagtgagacattctttgttaagaagcccccaacattccgtgcagaagctaggccagcggaatctggcaaatatggtactaataatggccgggcaacaaagatggtaccaacaactgagttcaggaggaccagtggtggtcttgtaagatcagggacagttaatggttctccaaatagcgctgtcaatggctcgaccaaggtgttgattaatggttctgcaaatgccattgacaatagctcaaccaaagcagtcattaacggtacgccgaaggtggctgtaaatggtactagtctggtgaaaagcagcaagacttctcttgttaagacgcagaagcaagtgagacccaaagatgacccctttcaagaggaattgaaggttttgccttctgatgagggattcagctgggcaaaagataattacaattctgtgcagaggagcatagatatatggtcttttgtgctttctcttcgagtccgcgtgctatttgacaatgcaaaatgggcatatcctggtggattctcggaagaaaagcagaaagttcgaaggcggaaaactgcttcatggctaagagagcaagtattacagcttggcccaacgtttattaagctcgggcagttatcctccactagatctgatttatttcccagagaatttgtggacgagcttgcgaaactgcagagtacctgctttttctcctgagaaggcaaaagctttcatagagaaagaaatgggttgttccattgatgttgtgtacaaagaatttgaggaacgcccaatagctgctgccagtcttggtcagcgtttgaaggaattgtatgattctctctaattaaagtaaaataatatatccattgcacatcactcctgtatatgtctattgcttttcatatcatgtatcagttttcacttaatgcatctcagtttcatggcaaaaaaaaaactgatattacat

SEQ ID NO: 53426 - DNA, 1134 bp, Zea Mays
gtgagccttttcatggtttgataaattctcgggcactcgagttagacaagactttactccgtattatttagaattaggggcttctgattggtcgtactcatggcaatgttggtgcctgatcttagtttctcggcatcgatctctagtgtgaagctcccaaggtacggggcatcaaagagtgagacattctttgttaagaagcccccaacattccgtgcagaagctaggccagcggaatctggcaaatatggtactaataatggccgggcaacaaagatggtaccaacaactgagttcaggaggaccagtggtggtcttgtaagatcagggacagttaatggttctccaaatagcgctgtcaatggctcgaccaaggtgttgattaatggttctgcaaatgccattgacaatagctcaaccaaagcagtcattaacggtacgccgaaggtggctgtaaatggtactagtctggtgaaaagcagcaagacttctcttgttaagacgcagaagcaagtgagacccaaagatgacccctttcaagaggaattgaaggttttgccttctgatgagggattcagctgggcaaaagataattacaattctgtgcagaggagcatagatatatggtcttttgtgctttctcttcgagtccgcgtgctatttgacaatgcaaaatgggcatatcctggtggattctcggaagaaaagcagaaagttcgaaggcggaaaactgcttcatggctaagagagcaagtattacagcttggcccaacgtttattaagctcgggcagttatcctccactagatctgatttatttcccagagaatttgtggacgagcttgcgaaactgcaggacagagtacctgctttttctcctgagaaggcaaaagctttcatagagaaagaaatgggttgttccattgatgttgtgtacaaagaatttgaggaacgcccaatagctgctgccagtcttggtcagcgtttgaaggaattgtatgattctctctaattaaagtaaaataatatatccattgcacatcactcctgtatatgtctattgcttttcatatcatgtatcagttttcacttaatgcatctcagtttcatggcaaaaaaaaaactgatattacat

SEQ ID NO: 53427 - DNA, 1250 bp, Zea Mays
ccgttttttgttcggtattagttttacttccattcgaaatctgcgcctgtggaccggcgtcttgcatgaatttattggtgggggaagtgaaggattttgtggtggtttagggtcttgattggacagtgtattggacttctgtttttttggtgatgaggaccgtagccggaaccaacaagattgtttgcttcgtgggcttctgattggtcgtactcatggcaatgttggtgcctgatcttagtttctcggcatcgatctctagtgtgaagctcccaaggtacggggcatcaaagagtgagacattctttgttaagaagcccccaacattccgtgcagaagctaggccagcggaatctggcaaatatggtactaataatggccgggcaacaaagatggtaccaacaactgagttcaggaggaccagtggtggtcttgtaagatcagggacagttaatggttctccaaatagcgctgtcaatggctcgaccaaggtgttgattaatggttctgcaaatgccattgacaatagctcaaccaaagcagtcattaacggtacgccgaaggtggctgtaaatggtactagtctggtgaaaagcagcaagacttctcttgttaagacgcagaagcaagtgagacccaaagatgacccctttcaagaggaattgaaggttttgccttctgatgagggattcagctgggcaaaagataattacaattctgtgcagaggagcatagatatatggtcttttgtgctttctcttcgagtccgcgtgctatttgacaatgcaaaatgggcatatcctggtggattctcggaagaaaagcagaaagttcgaaggcggaaaactgcttcatggctaagagagcaagtattacagcttggcccaacgtttattaagctcgggcagttatcctccactagatctgatttatttcccagagaatttgtggacgagcttgcgaaactgcaggacagagtacctgctttttctcctgagaaggcaaaagctttcatagagaaagaaatgggttgttccattgatgttgtgtacaaagaatttgaggaacgcccaatagctgctgccagtcttggtcagcgtttgaaggaattgtatgattctctctaattaaagtaaaataatatatccattgcacatcactcctgtatatgtctattgcttttcatatcatgtatcagttttcacttaatgcatctcagtttcatggcaaaaaaaaaactgatattacat

SEQ ID NO: 53428 - DNA, 1738 bp, Zea Mays
aaagaattcggtgctgctagggtactgcgcccctgaactgaacgagccttgttccttccgaatccctccgagaaaaggcggctccaaaaaccagatctcctcagcaaaatctgtacaagatccgcccttgatttggataacacgagcgaacgtgtggtgggccgtcgagtgaaacaagattcgccatgcggcggaacaggaaggattccggctatccgacggcggctccaggggaggaggatgaggcggaggaactgactgaggagggcgacgaggaagaggaggaacagacggaggagggatgtggtgaggaggatgaagttgaagcggagacgccggcgcaggaagctgtggagccgccgaagctggctgagggctacttcgagatcgaggccatccgccgccgccgcctccgcaagggccagctccagtacctcgtcaagtgagagtgctaacacatgggaaccccttgaaaacctgaaggcctgttctgacattgttgatgctttcaataagcggtcaaggtcgcccagatcctgtggaaagcgaaagcgcaagactccaacaactccaacatccgatcctaacccttctcgtggcaaacgtggtcgaccacctcggtcggaggcccggagcatgcatagcatacatgcctcagaagtgaagaaactgccctgcaggacaagtagtaggagagcaaataataatagtaacaagacctcacctgggggccttggcgcagcagtgaatttgcttgggcaaagaatagtacaggagggtagttctggtgtggtctcagttgggtttccatctcaagaggctcccttatctgttagcttgactgatcaacaagatgcgcagcaccctgctaatggttcattgaagatggacaatgaaatacgagcaatcacacctcagggtggacaggtgacaggtgctaagaagcgcaagtctggatgtgtaagaaggtttaagcaggatgaagtaacacatgagcaaggagatatccgtgatcgaacaagtgacaagccaggcaacgagactgttgattccacagaaggagatcctggtgataagaacaaaggggaggactctggtaaccaaattcatatgcctaagatcattaagatcattaagccagtgcgctattttgccacagttatggatggtgtgcagcaagttgcaataacattcaaggctctcaggtctgacggggaaatggtattcgtggacgataagcagttgaaagctaaggagcccctggtgcttattgattactatgagcaacaccttcgctacaaccccacctcgtgataaggatgcattgacgctgctgggtttcagttgcatgtgctgcacctatgtttggaacaaatggaaatgtatttaaatgtagcattttttgtgctagatgcatttgtagtattatttgagtaagtagataattagtaagtagccaatgctgagtgcaagtgaaacatgatagcatggtttgtcaaactaactgctcgatattgttactgttttcaaattgtcttattaatcgtgataatcatgattaatcgttcaagtcgatttggaccaatagtgattaatcgtcaaagtcatccgattaatggtgattaatcatgattaatcgtacaaatcggttagctagaatgactagcaagttgtacgacttcaaaacattattgcgtgtattatatgctaagttagttgcttcattgtacatgtggtg

SEQ ID NO: 53429 - DNA, 1665 bp, Zea Mays
aaagaattcggtgctgctagggtactgcgcccctgaactgaacgagccttgttccttccgaatccctccgagaaaaggcggctccaaaaaccagatctcctcagcaaaatctgtacaagatccgcccttgatttggataacacgagcgaacgtgtggtgggccgtcgagtgaaacaagattcgccatgcggcggaacaggaaggattccggctatccgacggcggctccaggggaggaggatgaggcggaggaactgactgaggagggcgacgaggaagaggaggaacagacggaggagggatgtggtgaggaggatgaagttgaagcggagacgccggcgcaggaagctgtggagccgccgaagctggctgagggctacttcgagatcgaggccatccgccgccgccgcctccgcaagggccagctccagtacctcgtcaagtggtcaaggtcgcccagatcctgtggaaagcgaaagcgcaagactccaacaactccaacatccgatcctaacccttctcgtggcaaacgtggtcgaccacctcggtcggaggcccggagcatgcatagcatacatgcctcagaagtgaagaaactgccctgcaggacaagtagtaggagagcaaataataatagtaacaagacctcacctgggggccttggcgcagcagtgaatttgcttgggcaaagaatagtacaggagggtagttctggtgtggtctcagttgggtttccatctcaagaggctcccttatctgttagcttgactgatcaacaagatgcgcagcaccctgctaatggttcattgaagatggacaatgaaatacgagcaatcacacctcagggtggacaggtgacaggtgctaagaagcgcaagtctggatgtgtaagaaggtttaagcaggatgaagtaacacatgagcaaggagatatccgtgatcgaacaagtgacaagccaggcaacgagactgttgattccacagaaggagatcctggtgataagaacaaaggggaggactctggtaaccaaattcatatgcctaagatcattaagatcattaagccagtgcgctattttgccacagttatggatggtgtgcagcaagttgcaataacattcaaggctctcaggtctgacggggaaatggtattcgtggacgataagcagttgaaagctaaggagcccctggtgcttattgattactatgagcaacaccttcgctacaaccccacctcgtgataaggatgcattgacgctgctgggtttcagttgcatgtgctgcacctatgtttggaacaaatggaaatgtatttaaatgtagcattttttgtgctagatgcatttgtagtattatttgagtaagtagataattagtaagtagccaatgctgagtgcaagtgaaacatgatagcatggtttgtcaaactaactgctcgatattgttactgttttcaaattgtcttattaatcgtgataatcatgattaatcgttcaagtcgatttggaccaatagtgattaatcgtcaaagtcatccgattaatggtgattaatcatgattaatcgtacaaatcggttagctagaatgactagcaagttgtacgacttcaaaacattattgcgtgtattatatgctaagttagttgcttcattgtacatgtggtg

SEQ ID NO: 53430 - DNA, 1608 bp, Zea Mays
aaagaattcggtgctgctagggtactgcgcccctgaactgaacgagccttgttccttccgaatccctccgagaaaaggcggctccaaaaaccagatctcctcagcaaaatctgtacaagatccgcccttgatttggataacacgagcgaacgtgtggtgggccgtcgagtgaaacaagattcgccatgcggcggaacaggaaggattccggctatccgacgctggctgagggctacttcgagatcgaggccatccgccgccgccgcctccgcaagggccagctccagtacctcgtcaagtggcgtgggtggccagagagtgctaacacatgggaaccccttgaaaacctgaaggcctgttctgacattgttgatgctttcaataagcggtcaaggtcgcccagatcctgtggaaagcgaaagcgcaagactccaacaactccaacatccgatcctaacccttctcgtggcaaacgtggtcgaccacctcggtcggaggcccggagcatgcatagcatacatgcctcagaagtgaagaaactgccctgcaggacaagtagtaggagagcaaataataatagtaacaagacctcacctgggggccttggcgcagcagtgaatttgcttgggcaaagaatagtacaggagggtagttctggtgtggtctcagttgggtttccatctcaagaggctcccttatctgttagcttgactgatcaacaagatgcgcagcaccctgctaatggttcattgaagatggacaatgaaatacgagcaatcacacctcagggtggacaggtgacaggtgctaagaagcgcaagtctggatgtgtaagaaggtttaagcaggatgaagtaacacatgagcaaggagatatccgtgatcgaacaagtgacaagccaggcaacgagactgttgattccacagaaggagatcctggtgataagaacaaaggggaggactctggtaaccaaattcatatgcctaagatcattaagatcattaagccagtgcgctattttgccacagttatggatggtgtgcagcaagttgcaataacattcaaggctctcaggtctgacggggaaatggtattcgtggacgataagcagttgaaagctaaggagcccctggtgcttattgattactatgagcaacaccttcgctacaaccccacctcgtgataaggatgcattgacgctgctgggtttcagttgcatgtgctgcacctatgtttggaacaaatggaaatgtatttaaatgtagcattttttgtgctagatgcatttgtagtattatttgagtaagtagataattagtaagtagccaatgctgagtgcaagtgaaacatgatagcatggtttgtcaaactaactgctcgatattgttactgttttcaaattgtcttattaatcgtgataatcatgattaatcgttcaagtcgatttggaccaatagtgattaatcgtcaaagtcatccgattaatggtgattaatcatgattaatcgtacaaatcggttagctagaatgactagcaagttgtacgacttcaaaacattattgcgtgtattatatgctaagttagttgcttcattgtacatgtggtg

SEQ ID NO: 53431 - DNA, 1497 bp, Zea Mays
aaagatcgagcttttaatttgctttgttcacgaattgttgtttttgcatgcaccatggacgacgacctgaaacatctgaggtagtaaaaattgcaagaggcctttgtcgcttcatccggcttggtgttctgcctccaatcctccggtccatcttggtgctcaaattcataaccatatatatgtggcgtttgctttgctcttcgcatgcacagggtcagcttctctggggtgaggcagggcggcgagacagtaccactaccatcacagcgaaggacgagttcacgcagagcgagtgatgcggcagaggagtacgacgcggcgtacgcggccacggtggcagcagtcgcctacgccatcgccgcgcgagaggagaggctgtcagcgtctcaagagagcacgccgtatgctgccgcggacaggcttgcgcgtggaaacaagcagtccagcaagtcagcacgcacaaccaagagaggcgagagcctggagaagccaaatttcgaaggcagaaggtcctcttcctcgagatggttcactggcaaagagcccatagacgatgactaccaagatgaacaggtgaaacggccactaagaccggctcagaagaagccagcaccagcagagggtgcggcctcagacgaaaggctccctgctctcgctgatcctgcactacgcgtaaggaaggacttcagtttcacccggaaaccgtcagagaagagaggaagtaggcgattcgagcaagatcaggggaaccagacaacagcgccgccgccgccgccgccaacggcacggccatcggacaaggcgtcgagctcgtattcggcggccggtagtagggacagcggagctgccaccacgtccggtggaccaatggcgttctccagcgaaaacgaagccatggcagatgcgtgggagaaggagaagctggcgagaatcaagaggaagtacaacgagacgatgcagacgattgctgcatgggaggccgagaagaaggccaatgccaggcgccaaaagcagctgaaagatgagagtgagtcggagaggaagcgtgccaaggcgctggaggagtacaccgaggagatgtcgaggatcaacaaggtggccgctgcgtcgaggctgacggcggaggagaagaagaggagtgccgagaggaaggccagggacaaggcgcacacaataaggtccacggggaagcttcccggggcatgtgggtgtttctaatgaaaccgcacgcgcacccgtccatgatgagtcgacgtgcatgattgtgtgtgtgtgtataggcctcgatctcgatcaacacatggatccatttggtactaaatcgaaagggaacgacatgaatatttgagcatagacgtgagggcaagcatctttgtccagaatttcgggtggctggcgagcaacattcgaactttcagcctatcaccattgcatatacccatccgtggctctctttcggggcctggtctggcaaagctcctatcggcttcagctttc

SEQ ID NO: 53432 - DNA, 919 bp, Zea Mays
gcgccctcgttccctttttcctgctcgccctgcccatctcccatggcggctctctctgtccggccacggtcgcccctgctcggactgcgcccgctcgaatcttgcccgaccgcagcgcttgcactcctcaatgtcagcgtcgagtttgggatcctgctcactgtcgcggccgccgtcaaatcgtcggatttgctcaacttgccgatcgcatcttggccggtcgtcgatttcctattcgctatcatacaacatcgctgttagatccggtctccaacccgccatggcgtttgccggacttcaccggtgaagttcgtcatcgtcctatggtcccagcccaacccatccgtgctgctcgccccgtgtgcgctcgctccttatccatcaggtttcggcgtgttcgcgtttaccatcgagtcgtcgaacccgtcattccctgctcgactctcaagcaaaccccttgatccgcgtcctgctcgccatcgactctcggcaccacaagctcattttcccttgcgcacatctccacagaccctgcctcatcacgcgtgtgtgttatcgatctcgtcatcattctgtacatcgtcaagaaattccaagagtcgggtgaagacgaagctagcagcgtggtgtttacccagtgctcgacacaagggctgaaccagaaccattactgtgttcgtggataacgcgttagatttagtatggtacgataattgatcgcgcgatgcggaaggcgaaccaagttgaccccaagcgcgggctactccgcgtagtgatgctaatggacgaacctgcctgaacaagtgccaacacaaaaggctgatcgccaagtggacgtcgtctaacaaacactaacctagtgttattccagacaagccccggtgcatttaccccttccttgtgtttttaaaaagatttt

SEQ ID NO: 53433 - DNA, 5246 bp, Zea Mays
caataatccagtgaattactatggaaattaaactaagtttcacgctaatctatcccaccaagagcaagaggtgaggtggatacggcgtccaaagaggcacgggagctaaaagggtgcctgtcaggaaaaaaaaaactaaaataagccacttcgcacagcttggagcaatgaccaatcaccgaaaacagttgtcaaatacaaacagcgtatgagaaccctgatcttcgttctgatcacagtacaccactactatttacaatatggttggagcaatgtcctatgcttttggagataacctaattcaatatggttggagcaatgtcctatgctgaagccactgactgagcgtctttgaagctgccaaggcgtgatggtcgccgctgtcttaggacaggatccgcagcagctgtgctggggctcgccggcagcttcagaactggagtactggttatactgccggcagactcgtatgaagaacaccagcagagcgaagaggcatatcagggcacacacaaggaaaaggccccaaaagcttccgaggccaagcctggttgctcccacttcgctgtcatctgaggagcaactagaccgtgagaaccactcgtcgtggatcctctgaagttgcccactctctgaaagttgaaggattgccgtcgataaatccgcagcgaggggggagtctctctggaatgcctgcaaaggaaaagagtggagcagaataaatcatttccagtacagtgccaggcacggatttgtgcttccctgagatgcgatggcaggaatgcccaaatgaagtgaagtgaatgaaggcagagaacaagcacgatgaacttacaaagccccacccttcctttgtgaattcctcccccactattctgaagctgcagtagtttgacaggaagatatcaatgtatggcttctcatcaacaattgcagcaacaccgccattttttggtccgcggttaagggcatcagcatattcctggatcgaattcagtggtaccagtcgagagaggggaacattgaagttttcagtcaggtatcttttggtaaattttccagcctggtatccaataggtaaagaacttgaaaccaaactatcaatccctgtaattccagttgagagctgttggactgtgaggattgacgtcaagctagcagtgtaacttgaagtgatgatcagcacaacgaacaaccatattatcagcacgaaccgcccaagtgtgcttacagtgttctctcctgaagcgagtttctcgtcaagacgtttccatccgtataggcaaagaatcatggaagagtttataagttaaaatcatggacgcgtctagtggacttactgtgtgaaaagaacattgttgagaagctaaacctgaaagagaagcacatattatccatcaattcctcaagttagcgaataagcatttagaagggaaaaaacaccaacaaataacagtaaatcataagatgggcatggattgaataaagctagaaacatttttcgcccataatgggtattgccagccagaactttgactcaaacaaggtatggtaaattaggatagaaaaatatccacatagttgaaacatgcaacaaacgtaccataacattgttatgacttgtcgccttggagaccctcgaaattcctcattagtacgatgttcaagaagccacactactatgcccaccaaaataaaaagagcaactgtgacacaccacatctccaatgtgaaaggttcaaggaaagcccacgcacttgaagttacatgtttcaccggcgctactatcacaagccctgactcaatataaggctgtgtgtattctgcaagctgtgtgccatttctcactatagcaaagtcgcctacagctgcatcaagtgactaaatgaaaatgaaacaaatcagagggtctgacaagaaaattgtgaaatagatgaggacaagaatgagggcatacattggcagcaaccattctaattatgtcaatatagctagggttttttgtgccatcaccaatagttataaattggcaaggaactgggtaaggaagaagtttaattgctgcgttgaatatctcgatgcagtaaccactcatgttatctcctctgcctgacactaattccttaaagcttgctttaattggaaccccaactctcagaggaaggccagtgtttgggaatacccagcccttaggcttcgtagtggaatcgccaggccataccacatcatgcagctgctgggcacttgtagatgtatttcgtggcatctgatacaaagtttcaggagcagccacggaaagcccagaatagttagaccaatagccaatcaagcgggagccagaaccaacaacattaaggatatcatacgctgggcgtaccaaattgtgctctgaatcaaactggactggacctgttacacccgtaaagtttgtgaggagaagttgatgcagcatctgctcaccaccgtcaaatatcttgagacttgataggtgcaacgtgctgccatttgaatcttctaacctgggatctgttgagaagttgatctgttgcccattactgagaaatttatcgacagcacgagcaacagcccaaaccgagtcataagcataaaaaccatacgagttcaagccagaagtaatatttctgttatgagccacattattccatttagatatgaacttatccttggcttcagattcaggaatgtgctgacgcagaacaattagtccctgaatatgactcatatctttaagacctctatttgctgaggaatcaaggacagcagctagccaatcagttactatccagacatagccactggccatcatttgcaggttcttagctacagaaaaaatcctcatccctgtgtcaggattgacatgcacaatcatgacccttgattccatcatatttgctttaaatagtacatcgttgatcacgtctgtatttgaatttggaggaatagctgctttatatgaaatctttgccctctttaatgcaagcgcatcaccgagggcttctacaccacctcgcccataatcatcatcaacgaatatagcagtcacccttttccattgataataatcaacaatgctagcaatagcattcatttggaagtagtcacttatggttgtcctgatgaagtacggatactctgatgcagaaagagttggatctgtagccgcaaatgatagaagaggtacatgtagctcattaacaacatgggagatgacatggcctatcccagaggattgtgggccaatcagcgcaacaacatttttttccattagctgcaacgctgaaaccaaggtttctatgaatcagttcatgcaccgttgaagtacaagcccttcaagccaagaaaagatgacagcttattctactcgtgcccataaagatccaactaattttgtccttcaactttatgcatgccacacaaactttattttcagataaaaacgggaagagttaaatccatcagcgacgtctaaacttataaaagggtgtcacttgggtccttaaatttgttttatggtgcacgaaatatgtctaaactagtgaaatggtgcatagcaagtctatttttggagtataccgtccattgtggtgcaccacttaacaactttagtaatcttgaaatatattttcaaagttcatggaccaaagtggcaccgacttcagggctgcttatgcatttaactcaaacaggaaactagttgtgattcaaataaagaaacagtcccaataaacctatatattttactttattctggtgctcaaacttgagaaaagaaaaatcttgaatgaggaattagatgctccctaacagctgagacatgtttcctacatcctacgaatatcttaaccgatttcacaaggtcatttgtggtaccactccatcagtaacagctaatttcctgcatcctataaaataccttaacggatttcacaagctacgccaccacgccatcaataaggctgttgccatcagaggtatatgaatgtacaattttgcactatagtctacactgtttataaaatgaattttaaaataagagataagatgagtaaagttgttgcttgttggagatagcctaacagctgacacatgttccctgcatcgtacagaataccttaagggggcgttcgattgtgtgggaacggtgacccggaacaattccgagccacattgcttttctaatttatgtaagttttgatgaacctgaaaaattccagggccattctgggagaaacgaacagggcctaactgatttcacaaggtacgccatttgaccactccgtcagtaagacaaacagaaaagttaacattaacaaatcatctcatgaaacacgggccaagtaattattaaaaatataaaaatcagattagttggggcacctaacttagtttgactaaactacactgggactgagtgtttagtgtttagtggtagctaaaaaataactccaaaatataggcaatctatagcccagaagaggaatataataatagaaaggcaatgacaacgagctatagcgacaccagacacaagtaaaacaattaccattgaccacgaacaaaaaaataatgaagatcattctcgcatttgctaaaccgttgccaagggttatcgactcacggagcgcgaatgaagtgctccacggctctaccgcaacagtgccacctacgcccctcccttcgtctcctatgtttttttgtgacagtaaagttctctcttggatcaagtcagaattttgttcaggttttagacgaaaataatttttgtagcgtggatagtaagatagactttctccaccctcttttatgatttactgataatatacctcttttctttaatatttgtcgttaattaatatattttttaactaaaccacgatgaataaaaaagaatggaggaagtataaaagatgaaacaatagggattaagcctactgtaacagctgctgggtaaatatttcctcaaaactttgaaacatctctgtatgcaaagaggcctcaatatttcaattacccctgctacctctgcaggaattctaattcttaataaaactatccaaataatgggaaaacttatttttttgaaaggccaccccgcccaacttgttggcacatggacatgagctactgaagcttcggcaaaagaaaaaaaaggaaagagagtgaggggaaacgaaaaccgaaccttcgatggtcccaagaaatccgctgcagttggtatcctgggg

SEQ ID NO: 53434 - DNA, 613 bp, Zea Mays
aaaaatcagaatctttgcatggaaagtcataaacaatggattgcaacacgagctaacaaatgctttcgacacttacctacacagactaattgtgagtcatgtgatcatgacatggaggaccgcttccatgcatgtgattcctgcccatccaactgctcacagatttgaatgcacaacccttgctgcagaggatgacatcaatggacagtctcttgtctaactatacagaggagtggtgctgaaggagatgaggctgcatcctgtcttgaaggcatcagttctgcgccttgctgggctcattgctcatttatcctggagactgattgtgctgcaggggctagaaagctaaggtgtgatgtcattgatacaaccactgatccaagaagctcttcaagaaagtgactctgtttatcgcctagaagtcttgaagattaggtgtgaagcgtgaccagaataaagtgtttagctagtccacataattatttagggtctgttcgttttgctctgagtacatgtggattggataggattggatgattttcaatcctaaacaagtcaaaatctttcataatttttttccaatctcattcaattcacgcgggataggagtaac

SEQ ID NO: 53435 - DNA, 2282 bp, Zea Mays
cgacgccgtcggcggcagtagtcggaaccctatgtaggaagaggcaggcgtcaggtgattatttatatcctcttgctctgcgacagaagaaaacctagatttgtatgggcctctttgcgctgcttgggcttttgtgggctgtttgcactgcttgggcttcgccaggtagaatagatggaaccgcaatttttggccgcggtgactcctcgccgccggcgcgctgtgctcccgtcatcaaaacacgatgccgccgcccccagccgtgccacacgacgtgggtgctgtcctccgcctcctggagtcccgcgaccttcccgccgccgcgcgcctcgccgccggctctgcttcctcctcgccgctcccgctcgccgcggtcctcctacaccgcccgctgcccccgcgcctcggctacagcctccacgcccgcgcagcgcgtgcgggcctcctcgcggaccgctaccttgctaacgcgctgctcgcgttctacgtccgcctcccggaccacctgcctcacgcgctcagggcgttcgacgacctgccccgccgcgacgtcgtcgcgcactcctccgtcctcgctgcattcctccgtgcgggtctcccgcgccgcgcgctcctccagctcaggaccatggcctccggcggctacggcgctgacgacgacgtcgcccccagcgcgcacgcgctttccgcctccgccaaggcgtgcgccgtgctgcacgacctccgcgcgggagcctgcgtgcacgggaccaccgttgtgcgagggtacggcgacgatggcgtcgtgctgagcgcgctcgtggacatgtacggccactcgggtgcgccgggcgacgcgcggaaggcgttcgaggaaatgcgcgcaccggatgggatatgctacacgtcgttgatatcagcattcgtgcggaacgactggttcgacgaggccctgcggtggtttcaggctatgctcaggacagatggggtttggccggacggctgcacatttggctctatgatgtcggcgcttgggaacatgaagagagcgaggcagggtagggaggcacacgcgcaggttgtgacacgtggcctgtgtgggaacgtcatcgtggagagcagcacacttgacatgtatgccaagtgtggtatgatggtggatgcacgcaaggtattcgacaggatgaaggctccgaatgcagtttcatggtgtgccctgcttggggggtattgtcaaactgggaagcatgagaaggttctctcgttgtttcgacagatgcatatgcaggagcaggacgatgactggtatagcttagggactcttctgcgatcttgtgctggtctgtctgcagtgaagctaggaaaagaaatccactgccgttctatgaggatgagaggatgcggagatgtcattgttgaatccgcactcgtggacctgtacgcaaaatgtggtgcagtagactatgcctacagagtattcaaaatgagcagtgtccgcaacatgattacttggaatgccatgatttgtggttgtgctcagaatggccatggtgagcgagccatcagcctgttcaatgagatggttagaggaggggtcaagccagactacatcagtttcattggtgttctttttgcttgtagccatactgggatggttgaagagggaaggaactacttcaactcaatgagcaaggactatggtattccccctggtattgaacattacaattgcattgttgacctcctcagtagagtggagcttctagaagaggctgaagatcttgtaaacaagtcacaatttagagatgattcatcactgtgggcagcaatacttggtgcctgtgccacacatactaacccagatgtagcagtaagggttgcaaagaagatgatggaattggagcctcaataccacctgagctatgttcttcttgaaaatgtgtataggacgattgggcattgggaagacgctgtaaaggtaaggaagctgatgaaatcaagaaaggtaaagaaagaacctggaacaagctggattaatgcaaacagaagcaaactatacatgtgtaatgctaagggggcagcctcagagcctgtagcttctgaggacttcaggaagtgcagttcattgactgatttagcttgtgattttggtatctgaaataatgcttataagtcatttctcaactgtactgacaaattttagcagctcttgtttcaaatctgttgcacaagccctccgcatatgttattctctcagggtaacttacttgatactgttccagttctagcagctgatggatttc

SEQ ID NO: 53436 - DNA, 737 bp, Zea Mays
caaatgtatagctaatcatcacaggctcaactgtgaacacactactttataattttgaactgcaatgatttaagagttcatggaccaaaaaagcaagcatcaacaaaaaaaggtgccaacaaggctgatgaaacaaaatctgccagcaagtgcaattcaattaattctgaaatcaggagagggagctcttgacacatcattacaacacaacccagaaattgtacattaaagacaaaaagaattaaattgtaaatggctgaggacaacaagacaaatcgtatggctcggttcaaatggatagtcggcatacagatcaatctcttctatagagatagacatgtgatttggtctgttgagcttgaatatttccaagtcgtcacagccacatttatttatatatatacacaaacatttaaaaataattaatgattgggaatgttaatatctgaacaccaattgcggtaaagacccatatgtcaccaaatggcctcagaccgtcctagttcatgataaatatcaacagattagacaaaattttgcctcgtctgtaaccatcatgtcatcaaaggccaagatcaacgataatagtaaaacagctattttttctaccaactattgaaaataaaataaagaaatgtgtcagaaaaatgttctcagcaccctttttgaaggaatcagacagggataactgtattttaattgtgttgtcatcatccacatctctaaacagaggaaag

SEQ ID NO: 53437 - DNA, 2608 bp, Zea Mays
aatttaacaaattcctctcccgtcccctttcccttcggggatggtattcgtcgtcttggcttcatcctctcgcccgccgtctcgactgtagcaagcggggctgctgtccgccgcattcaggagccatgcgtgaggggatgagggagagggacagaggcgggagcccggatgcgtcaggtcctccgcccttccgcggcccggcgtacaagacgaagctgtgcgcgctttggaggggcaggggcggctgcccccgccccaactgcggtttcgcccacggcgaggctgagctccgaaggccgccccctcgcgcctccttccagcctcgcccacgacctggttatttggatggtttcccgagcaagagacaccagtgcgctcttcttcaaagagatgcatattcggcctgtttattcatcgagttattgggatgattggttgatgactggagacacagcccaatgtttgaatgctagtggtgcagcaaacactgacagatagcaatgtgatctgaatcatatgatctcaggaggagagttagcgaacagggaagatagttgcaactgcaagaattatataatgttaacaatttgcaagtgcatcctttgaggatgtacaaatggggttgcagatgttaatggctgacaattctgggaggttttatagtttctacccgttgctgagaagactctacccttcaattgcataacagtatgatggtttggcacctgaatcttttctcagtttgtgttatatcttctcatcttatggtgcatatacaccatgattcctgtgtagtggtacttgaactgagtgcttgctgccgcagaacacaaaaatcatcaacaagcctgatttcattgcagataatcttggcattgctggttattattttgattttacaatagatatctcatggacagatttgttgagattgactgcttccagaggatggcacatcttatttccatcctggcctttgtttcagttggcaatcggtcatttatgatacttgaatgcttaacctgcctcagaagaactgaacatggaagatattatacattttatcttctcgatgggattcatgctatgggagaagggattacagagatcatgagtttagactcaggcctgatagaagacactcaccccatgggaggtattcccctgaaagagatatcaggcgtcgttcatttcatgataagagaccaagttctgaagataggggatctagtcattcaagatcacctattaggaagagtgagagaaaacatagtaaaagtcctgatggtggagaaaccgattcatccgtaagtgttcgaagtcctgataacgaagacagaggaaaagatgaaaggtacttaagcagtgatgagaaaaatggtcatgaagatcaactgaaacaaatgcatctggacatggaagcattgcgtgaagacaaatcaaagctggagatgatattagagaagaagactgatgaagagcacaaactttgtagcagagtagaagatcttgaattgcaattgaacaaagagaaagaagattgccaaaggatgtcctccaaaaccaaaaagctaatcaaagcacatgggcgttatataaaagcacaggaggatttaaagaggtctcaggctcgctttgagaggctagcagatttgcttgcttcagatattttgaagccttgtaccaaggagcagggttccatagggattactgccaatgaagatccatataatgctaatgaaatgagcccaagtgaccaaagacaaaaccatgtttcagcatcgagaaaaagacttatttccctcccaacaagtgaagaagcaaaaactggaaagagacagagagagaatggtgatgatatgatcccaacatcagagaactatagacctgaagatgccctagaacatctccaagatagcaagggaactgatctaccagaatcatttacagtgaagaagttaagggagggtgacaacgatgatgtaggaaacattgtctcttcaagcaatatttttgcggataggtacacgggcgatgatgaggaagttgatgttgattagtgagcggatgctgtcggtggttgataatgatttgagctgtaggaagctatctcaacagacgacatggatgccagcttctaaaactacttttatgccttttgcattgggtaataggggctggtatatctggtagagctatttatgtgcttagacttgagttgtgatgctgtcaaacatatctatacttctttttcttttgtgtctcctggggctcgaagaggatactaatctgtgctcgcctcatgtattattcttagccagtatgagtattatttgagacttttggattggttgtgttattccgcctcagcctcaggttacaaaccatgcatccatatccatctacctatcaggaaatgcatgcgtgatccttaaacttaccgaaggtcttctaagtctgtattctgatactagaggttcatagagtttgtggacttatgttcaaagtgcacaaaaaatgtttacaagtttgacttgtcaacatggaatctcaacattgccatgctatgtacttcatgttagcgaccttagggcgttctgagtatttt

SEQ ID NO: 53438 - DNA, 2413 bp, Zea Mays
aatttaacaaattcctctcccgtcccctttcccttcggggatggtattcgtcgtcttggcttcatcctctcgcccgccgtctcgactgtagcaagcggggctgctgtccgccgcattcaggagccatgcgtgaggggatgagggagagggacagaggcgggagcccggatgcgtcaggtcctccgcccttccgcggcccggcgtacaagacgaagctgtgcgcgctttggaggggcaggggcggctgcccccgccccaactgcggtttcgcccacggcgaggctgagctccgaaggccgccccctcgcgcctccttccagcctcgcccacgacctgggctttgcatcaccttatcatcttcttctgggttttaccgtacccaaaatgttgtcgattccatgccaatttgtcggattaggttatttggatggtttcccgagcaagagacaccagtgcgctcttcttcaaagagatgcatattcggcctgtttattcatcgagttattgggatgattggttgatgactggagacacagcccaatgtttgaatgctagtggtgcagcaaacactgacagatagcaatgtgatctgaatcatatgatctcaggaggagagttagcgaacagggaagatagttgcaactgcaagaattatataatgttaacaatttgcaagtgcatcctttgaggatgtacaaatggggttgcagatgttaatggctgacaattctgggaggttttatagtttctacccgttgctgagaagactctacccttcaattgcataacattggcaatcggtcatttatgatacttgaatgcttaacctgcctcagaagaactgaacatggaagatattatacattttatcttctcgatgggattcatgctatgggagaagggattacagagatcatgagtttagactcaggcctgatagaagacactcaccccatgggaggtattcccctgaaagagatatcaggcgtcgttcatttcatgataagagaccaagttctgaagataggggatctagtcattcaagatcacctattaggaagagtgagagaaaacatagtaaaagtcctgatggtggagaaaccgattcatccgtaagtgttcgaagtcctgataacgaagacagaggaaaagatgaaaggtacttaagcagtgatgagaaaaatggtcatgaagatcaactgaaacaaatgcatctggacatggaagcattgcgtgaagacaaatcaaagctggagatgatattagagaagaagactgatgaagagcacaaactttgtagcagagtagaagatcttgaattgcaattgaacaaagagaaagaagattgccaaaggatgtcctccaaaaccaaaaagctaatcaaagcacatgggcgttatataaaagcacaggaggatttaaagaggtctcaggctcgctttgagaggctagcagatttgcttgcttcagatattttgaagccttgtaccaaggagcagggttccatagggattactgccaatgaagatccatataatgctaatgaaatgagcccaagtgaccaaagacaaaaccatgtttcagcatcgagaaaaagacttatttccctcccaacaagtgaagaagcaaaaactggaaagagacagagagagaatggtgatgatatgatcccaacatcagagaactatagacctgaagatgccctagaacatctccaagatagcaagggaactgatctaccagaatcatttacagtgaagaagttaagggagggtgacaacgatgatgtaggaaacattgtctcttcaagcaatatttttgcggataggtacacgggcgatgatgaggaagttgatgttgattagtgagcggatgctgtcggtggttgataatgatttgagctgtaggaagctatctcaacagacgacatggatgccagcttctaaaactacttttatgccttttgcattgggtaataggggctggtatatctggtagagctatttatgtgcttagacttgagttgtgatgctgtcaaacatatctatacttctttttcttttgtgtctcctggggctcgaagaggatactaatctgtgctcgcctcatgtattattcttagccagtatgagtattatttgagacttttggattggttgtgttattccgcctcagcctcaggttacaaaccatgcatccatatccatctacctatcaggaaatgcatgcgtgatccttaaacttaccgaaggtcttctaagtctgtattctgatactagaggttcatagagtttgtggacttatgttcaaagtgcacaaaaaatgtttacaagtttgacttgtcaacatggaatctcaacattgccatgctatgtacttcatgttagcgaccttagggcgttctgagtatttt

SEQ ID NO: 53439 - DNA, 3439 bp, Zea Mays
aatttaacaaattcctctcccgtcccctttcccttcggggatggtattcgtcgtcttggcttcatcctctcgcccgccgtctcgactgtagcaagcggggctgctgtccgccgcattcaggagccatgcgtgaggggatgagggagagggacagaggcgggagcccggatgcgtcaggtcctccgcccttccgcggcccggcgtacaagacgaagctgtgcgcgctttggaggggcaggggcggctgcccccgccccaactgcggtttcgcccacggcgaggctgagctccgaaggccgccccctcgcgcctccttccagcctcgcccacgacctgggctttgcatcaccttatcatcttcttctgggttttaccgtacccaaaatgttgtcgattccatgccaatttgtcggattaggttatttggatggtttcccgagcaagagacaccagtgcgctcttcttcaaagagatgcatattcggcctgtttattcatcgagttattgggatgattggttgatgactggagacacagcccaatgtttgaatgctagtggtgcagcaaacactgacagatagcaatgtgatctgaatcatatgatctcaggaggagagttagcgaacagggaagatagttgcaactgcaagaattatataatgttaacaatttgcaagtgcatcctttgaggatgtacaaatggggttgcagatgttaatggctgacaattctgggaggttttatagtttctacccgttgctgagaagactctacccttcaattgcataacaataatcttggcattgctggttattattttgattttacaatagatatctcatggacagatttgttgagattgactgcttccagaggatggcacatcttatttccatcctggcctttgtttcagttggcaatcggtcatttatgatacttgaatgcttaacctgcctcagaagaactgaacatggaagatattatacattttatcttctcgatgggattcatgctatggtcagtgagctttaacaatgctattagaagcttttgcaactaattgaaacatgccgtttgaatacactgcatcaagctatatctgtggctttattgttacctgcacttcaagtatcatcttggaacaagatttttggcagtcatatggataacatctgatcaaatgaaattaaatttatttggtgctattcgagttttggaagattttacgtcatggtgattggaacatgacatctaattaattttggtgattccatccaaatttacttcaggtgattcgtattagaagtactggatcaattctaagtggttaatcatgataatcatgtattggcatctactctttcattagttgtattggctcgtctgtgtttgtggtctatggtgtattggtgttattgtgggccctctaatttttgagctaattgaataaccatatggctcaaggttgtggtaaggttaatgggtttctgtgttgccttgtatctatgcagccccatctaactcttgttctttgatggcataatgtttttttgggtaaatcttccaccttcctgatttgtagggagaagggattacagagatcatgagtttagactcaggcctgatagaagacactcaccccatgggaggatctagtcattcaagatcacctattaggaagaggtatgtaggaacgaataacaattattagggattcaagatctagtcattagaagtacttaaatttgtttattacatcgggctagtttatcttcatgtaccatcatgacttaatccctgctaatttattggtttcctaattttttatatgtgcgagctgcaatgttaagtttgtggtttatgagaccttttattctattgttcaaccatgatctaccatggagtctcattaccatccatttataactttggggtggggttgtagccgtgtagggtcatgaatgttggtatcaccaaggagggttttgatcttatgttaggcatgtgatctgtatacatgctttttttgcaagtttatggcttgcttgtgaaattgcctatctttatgtttatgttctatggctgctcagtgagagaaaacatagtaaaagtcctgatggtggagaaaccgattcatccgtaagtgttcgaagtcctgataacgaagacagaggaaaagatgaaaggtacttaagcagtgatgagaaaaatggtcatgaagatcaactgaaacaaatgcatctggacatggaagcattgcgtgaagacaaatcaaagctggagatgatattagagaagaagactgatgaagagcacaaactttgtagcagagtagaagatcttgaattgcaattgaacaaagagaaagaagattgccaaaggatgtcctccaaaaccaaaaagctaatcaaagcacatgggcgttatataaaagcacaggaggatttaaagaggtctcaggctcgctttgagaggctagcagatttgcttgcttcagatattttgaagccttgtaccaaggagcagggttccatagggattactgccaatgaagatccatataatgctaatgaaatgagcccaagtgaccaaagacaaaaccatgtttcagcatcgagaaaaagacttatttccctcccaacaagtgaagaagcaaaaactggaaagagacagagagagaatggtgatgatatgatcccaacatcagagaactatagacctgaagatgccctagaacatctccaagatagcaagggaactgatctaccagaatcatttacagtgaagaagttaagggagggtgacaacgatgatgtaggaaacattgtctcttcaagcaatatttttgcggataggtacacgggcgatgatgaggaagttgatgttgattagtgagcggatgctgtcggtggttgataatgatttgagctgtaggaagctatctcaacagacgacatggatgccagcttctaaaactacttttatgccttttgcattgggtaataggggctggtatatctggtagagctatttatgtgcttagacttgagttgtgatgctgtcaaacatatctatacttctttttcttttgtgtctcctggggctcgaagaggatactaatctgtgctcgcctcatgtattattcttagccagtatgagtattatttgagacttttggattggttgtgttattccgcctcagcctcaggttacaaaccatgcatccatatccatctacctatcaggaaatgcatgcgtgatccttaaacttaccgaaggtcttctaagtctgtattctgatactagaggttcatagagtttgtggacttatgttcaaagtgcacaaaaaatgtttacaagtttgacttgtcaacatggaatctcaacattgccatgctatgtacttcatgttagcgaccttagggcgttctgagtatttt

SEQ ID NO: 53440 - DNA, 3097 bp, Zea Mays
aatttaacaaattcctctcccgtcccctttcccttcggggatggtattcgtcgtcttggcttcatcctctcgcccgccgtctcgactgtagcaagcggggctgctgtccgccgcattcaggagccatgcgtgaggggatgagggagagggacagaggcgggagcccggatgcgtcaggtcctccgcccttccgcggcccggcgtacaagacgaagctgtgcgcgctttggaggggcaggggcggctgcccccgccccaactgcggtttcgcccacggcgaggctgagctccgaaggccgccccctcgcgcctccttccagcctcgcccacgacctgggctttgcatcaccttatcatcttcttctgggttttaccgtacccaaaatgttgtcgattccatgccaatttgtcggattaggttatttggatggtttcccgagcaagagacaccagtgcgctcttcttcaaagagatgcatattcggcctgtttattcatcgagttattgggatgattggttgatgactggagacacagcccaatgtttgaatgctagtggtgcagcaaacactgacagatagcaatgtgatctgaatcatatgatctcaggaggagagttagcgaacagggaagatagttgcaactgcaagaattatataatgttaacaatttgcaagtgcatcctttgaggatgtacaaatggggttgcagatgttaatggctgacaattctgggaggttttatagtttctacccgttgctgagaagactctacccttcaattgcataacagtatgatggtttggcacctgaatcttttctcagtttgtgttatatcttctcatcttatggtgcatatacaccatgattcctgtgtagtggtacttgaactgagtgcttgctgccgcagaacacaaaaatcatcaacaagcctgatttcattgcagataatcttggcattgctggttattattttgattttacaatagatatctcatggacagatttgttgagattgactgcttccagaggatggcacatcttatttccatcctggcctttgtttcagttggcaatcggtcatttatgatacttgaatgcttaacctgcctcagaagaactgaacatggaagatattatacattttatcttctcgatgggattcatgctatgggagaagggattacagagatcatgagtttagactcaggcctgatagaagacactcaccccatgggaggtattcccctgaaagagatatcaggcgtcgttcatttcatgataagagaccaagttctgaagataggggatctagtcattcaagatcacctattaggaagaggtatgtaggaacgaataacaattattagggattcaagatctagtcattagaagtacttaaatttgtttattacatcgggctagtttatcttcatgtaccatcatgacttaatccctgctaatttattggtttcctaattttttatatgtgcgagctgcaatgttaagtttgtggtttatgagaccttttattctattgttcaaccatgatctaccatggagtctcattaccatccatttataactttggggtggggttgtagccgtgtagggtcatgaatgttggtatcaccaaggagggttttgatcttatgttaggcatgtgatctgtatacatgctttttttgcaagtttatggcttgcttgtgaaattgcctatctttatgtttatgttctatggctgctcagtgagagaaaacatagtaaaagtcctgatggtggagaaaccgattcatccgtaagtgttcgaagtcctgataacgaagacagaggaaaagatgaaaggtacttaagcagtgatgagaaaaatggtcatgaagatcaactgaaacaaatgcatctggacatggaagcattgcgtgaagacaaatcaaagctggagatgatattagagaagaagactgatgaagagcacaaactttgtagcagagtagaagatcttgaattgcaattgaacaaagagaaagaagattgccaaaggatgtcctccaaaaccaaaaagctaatcaaagcacatgggcgttatataaaagcacaggaggatttaaagaggtctcaggctcgctttgagaggctagcagatttgcttgcttcagatattttgaagccttgtaccaaggagcagggttccatagggattactgccaatgaagatccatataatgctaatgaaatgagcccaagtgaccaaagacaaaaccatgtttcagcatcgagaaaaagacttatttccctcccaacaagtgaagaagcaaaaactggaaagagacagagagagaatggtgatgatatgatcccaacatcagagaactatagacctgaagatgccctagaacatctccaagatagcaagggaactgatctaccagaatcatttacagtgaagaagttaagggagggtgacaacgatgatgtaggaaacattgtctcttcaagcaatatttttgcggataggtacacgggcgatgatgaggaagttgatgttgattagtgagcggatgctgtcggtggttgataatgatttgagctgtaggaagctatctcaacagacgacatggatgccagcttctaaaactacttttatgccttttgcattgggtaataggggctggtatatctggtagagctatttatgtgcttagacttgagttgtgatgctgtcaaacatatctatacttctttttcttttgtgtctcctggggctcgaagaggatactaatctgtgctcgcctcatgtattattcttagccagtatgagtattatttgagacttttggattggttgtgttattccgcctcagcctcaggttacaaaccatgcatccatatccatctacctatcaggaaatgcatgcgtgatccttaaacttaccgaaggtcttctaagtctgtattctgatactagaggttcatagagtttgtggacttatgttcaaagtgcacaaaaaatgtttacaagtttgacttgtcaacatggaatctcaacattgccatgctatgtacttcatgttagcgaccttagggcgttctgagtatttt

SEQ ID NO: 53441 - DNA, 2880 bp, Zea Mays
aatttaacaaattcctctcccgtcccctttcccttcggggatggtattcgtcgtcttggcttcatcctctcgcccgccgtctcgactgtagcaagcggggctgctgtccgccgcattcaggagccatgcgtgaggggatgagggagagggacagaggcgggagcccggatgcgtcaggtcctccgcccttccgcggcccggcgtacaagacgaagctgtgcgcgctttggaggggcaggggcggctgcccccgccccaactgcggtttcgcccacggcgaggctgagctccgaaggccgccccctcgcgcctccttccagcctcgcccacgacctggttatttggatggtttcccgagcaagagacaccagtgcgctcttcttcaaagagatgcatattcggcctgtttattcatcgagttattgggatgattggttgatgactggagacacagcccaatgtttgaatgctagtggtgcagcaaacactgacagatagcaatgtgatctgaatcatatgatctcaggaggagagttagcgaacagggaagatagttgcaactgcaagaattatataatgttaacaatttgcaagtgcatcctttgaggatgtacaaatggggttgcagatgttaatggctgacaattctgggaggttttatagtttctacccgttgctgagaagactctacccttcaattgcataacagtatgatggtttggcacctgaatcttttctcagtttgtgttatatcttctcatcttatggtgcatatacaccatgattcctgtgtagtggtacttgaactgagtgcttgctgccgcagaacacaaaaatcatcaacaagcctgatttcattgcagataatcttggcattgctggttattattttgattttacaatagatatctcatggacagatttgttgagattgactgcttccagaggatggcacatcttatttccatcctggcctttgtttcagttggcaatcggtcatttatgatacttgaatgcttaacctgcctcagaagaactgaacatggaagatattatacattttatcttctcgatgggattcatgctatggtcagtgagctttaacaatgctattagaagcttttgcaactaattgaaacatgccgtttgaatacactgcatcaagctatatctgtggctttattgttacctgcacttcaagtatcatcttggaacaagatttttggcagtcatatggataacatctgatcaaatgaaattaaatttatttggtgctattcgagttttggaagattttacgtcatggtgattggaacatgacatctaattaattttggtgattccatccaaatttacttcagggagaagggattacagagatcatgagtttagactcaggcctgatagaagacactcaccccatgggaggtattcccctgaaagagatatcaggcgtcgttcatttcatgataagagaccaagttctgaagataggggatctagtcattcaagatcacctattaggaagagtgagagaaaacatagtaaaagtcctgatggtggagaaaccgattcatccgtaagtgttcgaagtcctgataacgaagacagaggaaaagatgaaaggtacttaagcagtgatgagaaaaatggtcatgaagatcaactgaaacaaatgcatctggacatggaagcattgcgtgaagacaaatcaaagctggagatgatattagagaagaagactgatgaagagcacaaactttgtagcagagtagaagatcttgaattgcaattgaacaaagagaaagaagattgccaaaggatgtcctccaaaaccaaaaagctaatcaaagcacatgggcgttatataaaagcacaggaggatttaaagaggtctcaggctcgctttgagaggctagcagatttgcttgcttcagatattttgaagccttgtaccaaggagcagggttccatagggattactgccaatgaagatccatataatgctaatgaaatgagcccaagtgaccaaagacaaaaccatgtttcagcatcgagaaaaagacttatttccctcccaacaagtgaagaagcaaaaactggaaagagacagagagagaatggtgatgatatgatcccaacatcagagaactatagacctgaagatgccctagaacatctccaagatagcaagggaactgatctaccagaatcatttacagtgaagaagttaagggagggtgacaacgatgatgtaggaaacattgtctcttcaagcaatatttttgcggataggtacacgggcgatgatgaggaagttgatgttgattagtgagcggatgctgtcggtggttgataatgatttgagctgtaggaagctatctcaacagacgacatggatgccagcttctaaaactacttttatgccttttgcattgggtaataggggctggtatatctggtagagctatttatgtgcttagacttgagttgtgatgctgtcaaacatatctatacttctttttcttttgtgtctcctggggctcgaagaggatactaatctgtgctcgcctcatgtattattcttagccagtatgagtattatttgagacttttggattggttgtgttattccgcctcagcctcaggttacaaaccatgcatccatatccatctacctatcaggaaatgcatgcgtgatccttaaacttaccgaaggtcttctaagtctgtattctgatactagaggttcatagagtttgtggacttatgttcaaagtgcacaaaaaatgtttacaagtttgacttgtcaacatggaatctcaacattgccatgctatgtacttcatgttagcgaccttagggcgttctgagtatttt

SEQ ID NO: 53442 - DNA, 2962 bp, Zea Mays
aatttaacaaattcctctcccgtcccctttcccttcggggatggtattcgtcgtcttggcttcatcctctcgcccgccgtctcgactgtagcaagcggggctgctgtccgccgcattcaggagccatgcgtgaggggatgagggagagggacagaggcgggagcccggatgcgtcaggtcctccgcccttccgcggcccggcgtacaagacgaagctgtgcgcgctttggaggggcaggggcggctgcccccgccccaactgcggtttcgcccacggcgaggctgagctccgaaggccgccccctcgcgcctccttccagcctcgcccacgacctgggctttgcatcaccttatcatcttcttctgggttttaccgtacccaaaatgttgtcgattccatgccaatttgtcggattaggttatttggatggtttcccgagcaagagacaccagtgcgctcttcttcaaagagatgcatattcggcctgtttattcatcgagttattgggatgattggttgatgactggagacacagcccaatgtttgaatgctagtggtgcagcaaacactgacagatagcaatgtgatctgaatcatatgatctcaggaggagagttagcgaacagggaagatagttgcaactgcaagaattatataatgttaacaatttgcaagtgcatcctttgaggatgtacaaatggggttgcagatgttaatggctgacaattctgggaggttttatagtttctacccgttgctgagaagactctacccttcaattgcataacagtatgatggtttggcacctgaatcttttctcagtttgtgttatatcttctcatcttatggtgcatatacaccatgattcctgtgtagtggtacttgaactgagtgcttgctgccgcagaacacaaaaatcatcaacaagcctgatttcattgcagataatcttggcattgctggttattattttgattttacaatagatatctcatggacagatttgttgagattgactgcttccagaggatggcacatcttatttccatcctggcctttgtttcagttggcaatcggtcatttatgatacttgaatgcttaacctgcctcagaagaactgaacatggaagatattatacattttatcttctcgatgggattcatgctatggtcagtgagctttaacaatgctattagaagcttttgcaactaattgaaacatgccgtttgaatacactgcatcaagctatatctgtggctttattgttacctgcacttcaagtatcatcttggaacaagatttttggcagtcatatggataacatctgatcaaatgaaattaaatttatttggtgctattcgagttttggaagattttacgtcatggtgattggaacatgacatctaattaattttggtgattccatccaaatttacttcagggagaagggattacagagatcatgagtttagactcaggcctgatagaagacactcaccccatgggaggtattcccctgaaagagatatcaggcgtcgttcatttcatgataagagaccaagttctgaagataggggatctagtcattcaagatcacctattaggaagagtgagagaaaacatagtaaaagtcctgatggtggagaaaccgattcatccgtaagtgttcgaagtcctgataacgaagacagaggaaaagatgaaaggtacttaagcagtgatgagaaaaatggtcatgaagatcaactgaaacaaatgcatctggacatggaagcattgcgtgaagacaaatcaaagctggagatgatattagagaagaagactgatgaagagcacaaactttgtagcagagtagaagatcttgaattgcaattgaacaaagagaaagaagattgccaaaggatgtcctccaaaaccaaaaagctaatcaaagcacatgggcgttatataaaagcacaggaggatttaaagaggtctcaggctcgctttgagaggctagcagatttgcttgcttcagatattttgaagccttgtaccaaggagcagggttccatagggattactgccaatgaagatccatataatgctaatgaaatgagcccaagtgaccaaagacaaaaccatgtttcagcatcgagaaaaagacttatttccctcccaacaagtgaagaagcaaaaactggaaagagacagagagagaatggtgatgatatgatcccaacatcagagaactatagacctgaagatgccctagaacatctccaagatagcaagggaactgatctaccagaatcatttacagtgaagaagttaagggagggtgacaacgatgatgtaggaaacattgtctcttcaagcaatatttttgcggataggtacacgggcgatgatgaggaagttgatgttgattagtgagcggatgctgtcggtggttgataatgatttgagctgtaggaagctatctcaacagacgacatggatgccagcttctaaaactacttttatgccttttgcattgggtaataggggctggtatatctggtagagctatttatgtgcttagacttgagttgtgatgctgtcaaacatatctatacttctttttcttttgtgtctcctggggctcgaagaggatactaatctgtgctcgcctcatgtattattcttagccagtatgagtattatttgagacttttggattggttgtgttattccgcctcagcctcaggttacaaaccatgcatccatatccatctacctatcaggaaatgcatgcgtgatccttaaacttaccgaaggtcttctaagtctgtattctgatactagaggttcatagagtttgtggacttatgttcaaagtgcacaaaaaatgtttacaagtttgacttgtcaacatggaatctcaacattgccatgctatgtacttcatgttagcgaccttagggcgttctgagtatttt

SEQ ID NO: 53443 - DNA, 3143 bp, Zea Mays
aatttaacaaattcctctcccgtcccctttcccttcggggatggtattcgtcgtcttggcttcatcctctcgcccgccgtctcgactgtagcaagcggggctgctgtccgccgcattcaggagccatgcgtgaggggatgagggagagggacagaggcgggagcccggatgcgtcaggtcctccgcccttccgcggcccggcgtacaagacgaagctgtgcgcgctttggaggggcaggggcggctgcccccgccccaactgcggtttcgcccacggcgaggctgagctccgaaggccgccccctcgcgcctccttccagcctcgcccacgacctgggctttgcatcaccttatcatcttcttctgggttttaccgtacccaaaatgttgtcgattccatgccaatttgtcggattaggttatttggatggtttcccgagcaagagacaccagtgcgctcttcttcaaagagatgcatattcggcctgtttattcatcgagttattgggatgattggttgatgactggagacacagcccaatgtttgaatgctagtggtgcagcaaacactgacagatagcaatgtgatctgaatcatatgatctcaggaggagagttagcgaacagggaagatagttgcaactgcaagaattatataatgttaacaatttgcaagtgcatcctttgaggatgtacaaatggggttgcagatgttaatggctgacaattctgggaggttttatagtttctacccgttgctgagaagactctacccttcaattgcataacagtatgatggtttggcacctgaatcttttctcagtttgtgttatatcttctcatcttatggtgcatatacaccatgattcctgtgtagtggtacttgaactgagtgcttgctgccgcagaacacaaaaatcatcaacaagcctgatttcattgcagataatcttggcattgctggttattattttgattttacaatagatatctcatggacagatttgttgagattgactgcttccagaggatggcacatcttatttccatcctggcctttgtttcagttggcaatcggtcatttatgatacttgaatgcttaacctgcctcagaagaactgaacatggaagatattatacattttatcttctcgatgggattcatgctatggtcagtgagctttaacaatgctattagaagcttttgcaactaattgaaacatgccgtttgaatacactgcatcaagctatatctgtggctttattgttacctgcacttcaagtatcatcttggaacaagatttttggcagtcatatggataacatctgatcaaatgaaattaaatttatttggtgctattcgagttttggaagattttacgtcatggtgattggaacatgacatctaattaattttggtgattccatccaaatttacttcaggtgattcgtattagaagtactggatcaattctaagtggttaatcatgataatcatgtattggcatctactctttcattagttgtattggctcgtctgtgtttgtggtctatggtgtattggtgttattgtgggccctctaatttttgagctaattgaataaccatatggctcaaggttgtgggagaagggattacagagatcatgagtttagactcaggcctgatagaagacactcaccccatgggaggtattcccctgaaagagatatcaggcgtcgttcatttcatgataagagaccaagttctgaagataggggatctagtcattcaagatcacctattaggaagagtgagagaaaacatagtaaaagtcctgatggtggagaaaccgattcatccgtaagtgttcgaagtcctgataacgaagacagaggaaaagatgaaaggtacttaagcagtgatgagaaaaatggtcatgaagatcaactgaaacaaatgcatctggacatggaagcattgcgtgaagacaaatcaaagctggagatgatattagagaagaagactgatgaagagcacaaactttgtagcagagtagaagatcttgaattgcaattgaacaaagagaaagaagattgccaaaggatgtcctccaaaaccaaaaagctaatcaaagcacatgggcgttatataaaagcacaggaggatttaaagaggtctcaggctcgctttgagaggctagcagatttgcttgcttcagatattttgaagccttgtaccaaggagcagggttccatagggattactgccaatgaagatccatataatgctaatgaaatgagcccaagtgaccaaagacaaaaccatgtttcagcatcgagaaaaagacttatttccctcccaacaagtgaagaagcaaaaactggaaagagacagagagagaatggtgatgatatgatcccaacatcagagaactatagacctgaagatgccctagaacatctccaagatagcaagggaactgatctaccagaatcatttacagtgaagaagttaagggagggtgacaacgatgatgtaggaaacattgtctcttcaagcaatatttttgcggataggtacacgggcgatgatgaggaagttgatgttgattagtgagcggatgctgtcggtggttgataatgatttgagctgtaggaagctatctcaacagacgacatggatgccagcttctaaaactacttttatgccttttgcattgggtaataggggctggtatatctggtagagctatttatgtgcttagacttgagttgtgatgctgtcaaacatatctatacttctttttcttttgtgtctcctggggctcgaagaggatactaatctgtgctcgcctcatgtattattcttagccagtatgagtattatttgagacttttggattggttgtgttattccgcctcagcctcaggttacaaaccatgcatccatatccatctacctatcaggaaatgcatgcgtgatccttaaacttaccgaaggtcttctaagtctgtattctgatactagaggttcatagagtttgtggacttatgttcaaagtgcacaaaaaatgtttacaagtttgacttgtcaacatggaatctcaacattgccatgctatgtacttcatgttagcgaccttagggcgttctgagtatttt

SEQ ID NO: 53444 - DNA, 1783 bp, Zea Mays
aatttaacaaattcctctcccgtcccctttcccttcggggatggtattcgtcgtcttggcttcatcctctcgcccgccgtctcgactgtagcaagcggggctgctgtccgccgcattcaggagccatgcgtgaggggatgagggagagggacagaggcgggagcccggatgcgtcaggtcctccgcccttccgcggcccggcgtacaagacgaagctgtgcgcgctttggaggggcaggggcggctgcccccgccccaactgcggtttcgcccacggcgaggctgagctccgaaggccgccccctcgcgcctccttccagcctcgcccacgacctgggagaagggattacagagatcatgagtttagactcaggcctgatagaagacactcaccccatgggaggtattcccctgaaagagatatcaggcgtcgttcatttcatgataagagaccaagttctgaagataggggatctagtcattcaagatcacctattaggaagagtgagagaaaacatagtaaaagtcctgatggtggagaaaccgattcatccgtaagtgttcgaagtcctgataacgaagacagaggaaaagatgaaaggtacttaagcagtgatgagaaaaatggtcatgaagatcaactgaaacaaatgcatctggacatggaagcattgcgtgaagacaaatcaaagctggagatgatattagagaagaagactgatgaagagcacaaactttgtagcagagtagaagatcttgaattgcaattgaacaaagagaaagaagattgccaaaggtctcaggctcgctttgagaggctagcagatttgcttgcttcagatattttgaagccttgtaccaaggagcagggttccatagggattactgccaatgaagatccatataatgctaatgaaatgagcccaagtgaccaaagacaaaaccatgtttcagcatcgagaaaaagacttatttccctcccaacaagtgaagaagcaaaaactggaaagagacagagagagaatggtgatgatatgatcccaacatcagagaactatagacctgaagatgccctagaacatctccaagatagcaagggaactgatctaccagaatcatttacagtgaagaagttaagggagggtgacaacgatgatgtaggaaacattgtctcttcaagcaatatttttgcggataggtacacgggcgatgatgaggaagttgatgttgattagtgagcggatgctgtcggtggttgataatgatttgagctgtaggaagctatctcaacagacgacatggatgccagcttctaaaactacttttatgccttttgcattgggtaataggggctggtatatctggtagagctatttatgtgcttagacttgagttgtgatgctgtcaaacatatctatacttctttttcttttgtgtctcctggggctcgaagaggatactaatctgtgctcgcctcatgtattattcttagccagtatgagtattatttgagacttttggattggttgtgttattccgcctcagcctcaggttacaaaccatgcatccatatccatctacctatcaggaaatgcatgcgtgatccttaaacttaccgaaggtcttctaagtctgtattctgatactagaggttcatagagtttgtggacttatgttcaaagtgcacaaaaaatgtttacaagtttgacttgtcaacatggaatctcaacattgccatgctatgtacttcatgttagcgaccttagggcgttctgagtatttt

SEQ ID NO: 53445 - DNA, 2679 bp, Zea Mays
aatttaacaaattcctctcccgtcccctttcccttcggggatggtattcgtcgtcttggcttcatcctctcgcccgccgtctcgactgtagcaagcggggctgctgtccgccgcattcaggagccatgcgtgaggggatgagggagagggacagaggcgggagcccggatgcgtcaggtcctccgcccttccgcggcccggcgtacaagacgaagctgtgcgcgctttggaggggcaggggcggctgcccccgccccaactgcggtttcgcccacggcgaggctgagctccgaaggccgccccctcgcgcctccttccagcctcgcccacgacctgggctttgcatcaccttatcatcttcttctgggttttaccgtacccaaaatgttgtcgattccatgccaatttgtcggattaggttatttggatggtttcccgagcaagagacaccagtgcgctcttcttcaaagagatgcatattcggcctgtttattcatcgagttattgggatgattggttgatgactggagacacagcccaatgtttgaatgctagtggtgcagcaaacactgacagatagcaatgtgatctgaatcatatgatctcaggaggagagttagcgaacagggaagatagttgcaactgcaagaattatataatgttaacaatttgcaagtgcatcctttgaggatgtacaaatggggttgcagatgttaatggctgacaattctgggaggttttatagtttctacccgttgctgagaagactctacccttcaattgcataacagtatgatggtttggcacctgaatcttttctcagtttgtgttatatcttctcatcttatggtgcatatacaccatgattcctgtgtagtggtacttgaactgagtgcttgctgccgcagaacacaaaaatcatcaacaagcctgatttcattgcagataatcttggcattgctggttattattttgattttacaatagatatctcatggacagatttgttgagattgactgcttccagaggatggcacatcttatttccatcctggcctttgtttcagttggcaatcggtcatttatgatacttgaatgcttaacctgcctcagaagaactgaacatggaagatattatacattttatcttctcgatgggattcatgctatgggagaagggattacagagatcatgagtttagactcaggcctgatagaagacactcaccccatgggaggatctagtcattcaagatcacctattaggaagagtttatggcttgcttgtgaaattgcctatctttatgtttatgttctatggctgctcagtgagagaaaacatagtaaaagtcctgatggtggagaaaccgattcatccgtaagtgttcgaagtcctgataacgaagacagaggaaaagatgaaaggtacttaagcagtgatgagaaaaatggtcatgaagatcaactgaaacaaatgcatctggacatggaagcattgcgtgaagacaaatcaaagctggagatgatattagagaagaagactgatgaagagcacaaactttgtagcagagtagaagatcttgaattgcaattgaacaaagagaaagaagattgccaaaggatgtcctccaaaaccaaaaagctaatcaaagcacatgggcgttatataaaagcacaggaggatttaaagaggtctcaggctcgctttgagaggctagcagatttgcttgcttcagatattttgaagccttgtaccaaggagcagggttccatagggattactgccaatgaagatccatataatgctaatgaaatgagcccaagtgaccaaagacaaaaccatgtttcagcatcgagaaaaagacttatttccctcccaacaagtgaagaagcaaaaactggaaagagacagagagagaatggtgatgatatgatcccaacatcagagaactatagacctgaagatgccctagaacatctccaagatagcaagggaactgatctaccagaatcatttacagtgaagaagttaagggagggtgacaacgatgatgtaggaaacattgtctcttcaagcaatatttttgcggataggtacacgggcgatgatgaggaagttgatgttgattagtgagcggatgctgtcggtggttgataatgatttgagctgtaggaagctatctcaacagacgacatggatgccagcttctaaaactacttttatgccttttgcattgggtaataggggctggtatatctggtagagctatttatgtgcttagacttgagttgtgatgctgtcaaacatatctatacttctttttcttttgtgtctcctggggctcgaagaggatactaatctgtgctcgcctcatgtattattcttagccagtatgagtattatttgagacttttggattggttgtgttattccgcctcagcctcaggttacaaaccatgcatccatatccatctacctatcaggaaatgcatgcgtgatccttaaacttaccgaaggtcttctaagtctgtattctgatactagaggttcatagagtttgtggacttatgttcaaagtgcacaaaaaatgtttacaagtttgacttgtcaacatggaatctcaacattgccatgctatgtacttcatgttagcgaccttagggcgttctgagtatttt

SEQ ID NO: 53446 - DNA, 2004 bp, Zea Mays
aatttaacaaattcctctcccgtcccctttcccttcggggatggtattcgtcgtcttggcttcatcctctcgcccgccgtctcgactgtagcaagcggggctgctgtccgccgcattcaggagccatgcgtgaggggatgagggagagggacagaggcgggagcccggatgcgtcaggtcctccgcccttccgcggcccggcgtacaagacgaagctgtgcgcgctttggaggggcaggggcggctgcccccgccccaactgcggtttcgcccacggcgaggctgagctccgaaggccgccccctcgcgcctccttccagcctcgcccacgacctgggagaagggattacagagatcatgagtttagactcaggcctgatagaagacactcaccccatgggaggtattcccctgaaagagatatcaggcgtcgttcatttcatgataagagaccaagttctgaagataggggtaatcactttttctgtgcacatttgtgccaataaaaatatttgccactgtccattgtatcttctaactactccctgagatttgatttgcaggatctagtcattcaagatcacctattaggaagagtttatggcttgcttgtgaaattgcctatctttatgtttatgttctatggctgctcagtgagagaaaacatagtaaaagtcctgatggtggagaaaccgattcatccgtaagtgttcgaagtcctgataacgaagacagaggaaaagatgaaaggtacttaagcagtgatgagaaaaatggtcatgaagatcaactgaaacaaatgcatctggacatggaagcattgcgtgaagacaaatcaaagctggagatgatattagagaagaagactgatgaagagcacaaactttgtagcagagtagaagatcttgaattgcaattgaacaaagagaaagaagattgccaaaggatgtcctccaaaaccaaaaagctaatcaaagcacatgggcgttatataaaagcacaggaggatttaaagaggtctcaggctcgctttgagaggctagcagatttgcttgcttcagatattttgaagccttgtaccaaggagcagggttccatagggattactgccaatgaagatccatataatgctaatgaaatgagcccaagtgaccaaagacaaaaccatgtttcagcatcgagaaaaagacttatttccctcccaacaagtgaagaagcaaaaactggaaagagacagagagagaatggtgatgatatgatcccaacatcagagaactatagacctgaagatgccctagaacatctccaagatagcaagggaactgatctaccagaatcatttacagtgaagaagttaagggagggtgacaacgatgatgtaggaaacattgtctcttcaagcaatatttttgcggataggtacacgggcgatgatgaggaagttgatgttgattagtgagcggatgctgtcggtggttgataatgatttgagctgtaggaagctatctcaacagacgacatggatgccagcttctaaaactacttttatgccttttgcattgggtaataggggctggtatatctggtagagctatttatgtgcttagacttgagttgtgatgctgtcaaacatatctatacttctttttcttttgtgtctcctggggctcgaagaggatactaatctgtgctcgcctcatgtattattcttagccagtatgagtattatttgagacttttggattggttgtgttattccgcctcagcctcaggttacaaaccatgcatccatatccatctacctatcaggaaatgcatgcgtgatccttaaacttaccgaaggtcttctaagtctgtattctgatactagaggttcatagagtttgtggacttatgttcaaagtgcacaaaaaatgtttacaagtttgacttgtcaacatggaatctcaacattgccatgctatgtacttcatgttagcgaccttagggcgttctgagtatttt

SEQ ID NO: 53447 - DNA, 2816 bp, Zea Mays
aatttaacaaattcctctcccgtcccctttcccttcggggatggtattcgtcgtcttggcttcatcctctcgcccgccgtctcgactgtagcaagcggggctgctgtccgccgcattcaggagccatgcgtgaggggatgagggagagggacagaggcgggagcccggatgcgtcaggtcctccgcccttccgcggcccggcgtacaagacgaagctgtgcgcgctttggaggggcaggggcggctgcccccgccccaactgcggtttcgcccacggcgaggctgagctccgaaggccgccccctcgcgcctccttccagcctcgcccacgacctgatttgttgagattgactgcttccagaggatggcacatcttatttccatcctggcctttgtttcagttggcaatcggtcatttatgatacttgaatgcttaacctgcctcagaagaactgaacatggaagatattatacattttatcttctcgatgggattcatgctatggtcagtgagctttaacaatgctattagaagcttttgcaactaattgaaacatgccgtttgaatacactgcatcaagctatatctgtggctttattgttacctgcacttcaagtatcatcttggaacaagatttttggcagtcatatggataacatctgatcaaatgaaattaaatttatttggtgctattcgagttttggaagattttacgtcatggtgattggaacatgacatctaattaattttggtgattccatccaaatttacttcaggtgattcgtattagaagtactggatcaattctaagtggttaatcatgataatcatgtattggcatctactctttcattagttgtattggctcgtctgtgtttgtggtctatggtgtattggtgttattgtgggccctctaatttttgagctaattgaataaccatatggctcaaggttgtgggagaagggattacagagatcatgagtttagactcaggcctgatagaagacactcaccccatgggaggatctagtcattcaagatcacctattaggaagaggtatgtaggaacgaataacaattattagggattcaagatctagtcattagaagtacttaaatttgtttattacatcgggctagtttatcttcatgtaccatcatgacttaatccctgctaatttattggtttcctaattttttatatgtgcgagctgcaatgttaagtttgtggtttatgagaccttttattctattgttcaaccatgatctaccatggagtctcattaccatccatttataactttggggtggggttgtagccgtgtagggtcatgaatgttggtatcaccaaggagggttttgatcttatgttaggcatgtgatctgtatacatgctttttttgcaagtttatggcttgcttgtgaaattgcctatctttatgtttatgttctatggctgctcagtgagagaaaacatagtaaaagtcctgatggtggagaaaccgattcatccgtaagtgttcgaagtcctgataacgaagacagaggaaaagatgaaaggtacttaagcagtgatgagaaaaatggtcatgaagatcaactgaaacaaatgcatctggacatggaagcattgcgtgaagacaaatcaaagctggagatgatattagagaagaagactgatgaagagcacaaactttgtagcagagtagaagatcttgaattgcaattgaacaaagagaaagaagattgccaaaggatgtcctccaaaaccaaaaagctaatcaaagcacatgggcgttatataaaagcacaggaggatttaaagaggtctcaggctcgctttgagaggctagcagatttgcttgcttcagatattttgaagccttgtaccaaggagcagggttccatagggattactgccaatgaagatccatataatgctaatgaaatgagcccaagtgaccaaagacaaaaccatgtttcagcatcgagaaaaagacttatttccctcccaacaagtgaagaagcaaaaactggaaagagacagagagagaatggtgatgatatgatcccaacatcagagaactatagacctgaagatgccctagaacatctccaagatagcaagggaactgatctaccagaatcatttacagtgaagaagttaagggagggtgacaacgatgatgtaggaaacattgtctcttcaagcaatatttttgcggataggtacacgggcgatgatgaggaagttgatgttgattagtgagcggatgctgtcggtggttgataatgatttgagctgtaggaagctatctcaacagacgacatggatgccagcttctaaaactacttttatgccttttgcattgggtaataggggctggtatatctggtagagctatttatgtgcttagacttgagttgtgatgctgtcaaacatatctatacttctttttcttttgtgtctcctggggctcgaagaggatactaatctgtgctcgcctcatgtattattcttagccagtatgagtattatttgagacttttggattggttgtgttattccgcctcagcctcaggttacaaaccatgcatccatatccatctacctatcaggaaatgcatgcgtgatccttaaacttaccgaaggtcttctaagtctgtattctgatactagaggttcatagagtttgtggacttatgttcaaagtgcacaaaaaatgtttacaagtttgacttgtcaacatggaatctcaacattgccatgctatgtacttcatgttagcgaccttagggcgttctgagtatttt

SEQ ID NO: 53448 - DNA, 3023 bp, Zea Mays
aatttaacaaattcctctcccgtcccctttcccttcggggatggtattcgtcgtcttggcttcatcctctcgcccgccgtctcgactgtagcaagcggggctgctgtccgccgcattcaggagccatgcgtgaggggatgagggagagggacagaggcgggagcccggatgcgtcaggtcctccgcccttccgcggcccggcgtacaagacgaagctgtgcgcgctttggaggggcaggggcggctgcccccgccccaactgcggtttcgcccacggcgaggctgagctccgaaggccgccccctcgcgcctccttccagcctcgcccacgacctgttggcaatcggtcatttatgatacttgaatgcttaacctgcctcagaagaactgaacatggaagatattatacattttatcttctcgatgggattcatgctatggtcagtgagctttaacaatgctattagaagcttttgcaactaattgaaacatgccgtttgaatacactgcatcaagctatatctgtggctttattgttacctgcacttcaagtatcatcttggaacaagatttttggcagtcatatggataacatctgatcaaatgaaattaaatttatttggtgctattcgagttttggaagattttacgtcatggtgattggaacatgacatctaattaattttggtgattccatccaaatttacttcaggtgattcgtattagaagtactggatcaattctaagtggttaatcatgataatcatgtattggcatctactctttcattagttgtattggctcgtctgtgtttgtggtctatggtgtattggtgttattgtgggccctctaatttttgagctaattgaataaccatatggctcaaggttgtggtaaggttaatgggtttctgtgttgccttgtatctatgcagccccatctaactcttgttctttgatggcataatgtttttttgggtaaatcttccaccttcctgatttgtagggagaagggattacagagatcatgagtttagactcaggcctgatagaagacactcaccccatgggaggtattcccctgaaagagatatcaggcgtcgttcatttcatgataagagaccaagttctgaagataggggtaatcactttttctgtgcacatttgtgccaataaaaatatttgccactgtccattgtatcttctaactactccctgagatttgatttgcaggatctagtcattcaagatcacctattaggaagaggtatgtaggaacgaataacaattattagggattcaagatctagtcattagaagtacttaaatttgtttattacatcgggctagtttatcttcatgtaccatcatgacttaatccctgctaatttattggtttcctaattttttatatgtgcgagctgcaatgttaagtttgtggtttatgagaccttttattctattgttcaaccatgatctaccatggagtctcattaccatccatttataactttggggtggggttgtagccgtgtagggtcatgaatgttggtatcaccaaggagggttttgatcttatgttaggcatgtgatctgtatacatgctttttttgcaagtttatggcttgcttgtgaaattgcctatctttatgtttatgttctatggctgctcagtgagagaaaacatagtaaaagtcctgatggtggagaaaccgattcatccgtaagtgttcgaagtcctgataacgaagacagaggaaaagatgaaaggtacttaagcagtgatgagaaaaatggtcatgaagatcaactgaaacaaatgcatctggacatggaagcattgcgtgaagacaaatcaaagctggagatgatattagagaagaagactgatgaagagcacaaactttgtagcagagtagaagatcttgaattgcaattgaacaaagagaaagaagattgccaaaggatgtcctccaaaaccaaaaagctaatcaaagcacatgggcgttatataaaagcacaggaggatttaaagaggtctcaggctcgctttgagaggctagcagatttgcttgcttcagatattttgaagccttgtaccaaggagcagggttccatagggattactgccaatgaagatccatataatgctaatgaaatgagcccaagtgaccaaagacaaaaccatgtttcagcatcgagaaaaagacttatttccctcccaacaagtgaagaagcaaaaactggaaagagacagagagagaatggtgatgatatgatcccaacatcagagaactatagacctgaagatgccctagaacatctccaagatagcaagggaactgatctaccagaatcatttacagtgaagaagttaagggagggtgacaacgatgatgtaggaaacattgtctcttcaagcaatatttttgcggataggtacacgggcgatgatgaggaagttgatgttgattagtgagcggatgctgtcggtggttgataatgatttgagctgtaggaagctatctcaacagacgacatggatgccagcttctaaaactacttttatgccttttgcattgggtaataggggctggtatatctggtagagctatttatgtgcttagacttgagttgtgatgctgtcaaacatatctatacttctttttcttttgtgtctcctggggctcgaagaggatactaatctgtgctcgcctcatgtattattcttagccagtatgagtattatttgagacttttggattggttgtgttattccgcctcagcctcaggttacaaaccatgcatccatatccatctacctatcaggaaatgcatgcgtgatccttaaacttaccgaaggtcttctaagtctgtattctgatactagaggttcatagagtttgtggacttatgttcaaagtgcacaaaaaatgtttacaagtttgacttgtcaacatggaatctcaacattgccatgctatgtacttcatgttagcgaccttagggcgttctgagtatttt

SEQ ID NO: 53449 - DNA, 2718 bp, Zea Mays
attaaccacctgttttgaagagcgacataatttaacaaattcctctcccgtcccctttcccttcggggatggtattcgtcgtcttggcttcatcctctcgcccgccgtctcgactgtagcaagcggggctgctgtccgccgcattcaggagccatgcgtgaggggatgagggagagggacagaggcgggagcccggatgcgtcaggtcctccgcccttccgcggcccggcgtacaagacgaagctgtgcgcgctttggaggggcaggggcggctgcccccgccccaactgcggtttcgcccacggcgaggctgagctccgaaggccgccccctcgcgcctccttccagcctcgcccacgacctgggctttgcatcaccttatcatcttcttctgggttttaccgtacccaaaatgttgtcgattccatgccaatttgtcggattaggttatttggatggtttcccgagcaagagacaccagtgcgctcttcttcaaagagatgcatattcggcctgtttattcatcgagttattgggatgattggttgatgactggagacacagcccaatgtttgaatgctagtggtgcagcaaacactgacagatagcaatgtgatctgaatcatatgatctcaggaggagagttagcgaacagggaagatagttgcaactgcaagaattatataatgttaacaatttgcaagtgcatcctttgaggatgtacaaatggggttgcagatgttaatggctgacaattctgggaggttttatagtttctacccgttgctgagaagactctacccttcaattgcataacagtatgatggtttggcacctgaatcttttctcagtttgtgttatatcttctcatcttatggtgcatatacaccatgattcctgtgtagtggtacttgaactgagtgcttgctgccgcagaacacaaaaatcatcaacaagcctgatttcattgcagataatcttggcattgctggttattattttgattttacaatagatatctcatggacagatttgttgagattgactgcttccagaggatggcacatcttatttccatcctggcctttgtttcagttggcaatcggtcatttatgatacttgaatgcttaacctgcctcagaagaactgaacatggaagatattatacattttatcttctcgatgggattcatgctatgggagaagggattacagagatcatgagtttagactcaggcctgatagaagacactcaccccatgggaggtattcccctgaaagagatatcaggcgtcgttcatttcatgataagagaccaagttctgaagataggggatctagtcattcaagatcacctattaggaagagtgagagaaaacatagtaaaagtcctgatggtggagaaaccgattcatccgtaagtgttcgaagtcctgataacgaagacagaggaaaagatgaaaggtacttaagcagtgatgagaaaaatggtcatgaagatcaactgaaacaaatgcatctggacatggaagcattgcgtgaagacaaatcaaagctggagatgatattagagaagaagactgatgaagagcacaaactttgtagcagagtagaagatcttgaattgcaattgaacaaagagaaagaagattgccaaaggatgtcctccaaaaccaaaaagctaatcaaagcacatgggcgttatataaaagcacaggaggatttaaagaggtctcaggctcgctttgagaggctagcagatttgcttgcttcagatattttgaagccttgtaccaaggagcagggttccatagggattactgccaatgaagatccatataatgctaatgaaatgagcccaagtgaccaaagacaaaaccatgtttcagcatcgagaaaaagacttatttccctcccaacaagtgaagaagcaaaaactggaaagagacagagagagaatggtgatgatatgatcccaacatcagagaactatagacctgaagatgccctagaacatctccaagatagcaagggaactgatctaccagaatcatttacagtgaagaagttaagggagggtgacaacgatgatgtaggaaacattgtctcttcaagcaatatttttgcggataggtacacgggcgatgatgaggaagttgatgttgattagtgagcggatgctgtcggtggttgataatgatttgagctgtaggaagctatctcaacagacgacatggatgccagcttctaaaactacttttatgccttttgcattgggtaataggggctggtatatctggtagagctatttatgtgcttagacttgagttgtgatgctgtcaaacatatctatacttctttttcttttgtgtctcctggggctcgaagaggatactaatctgtgctcgcctcatgtattattcttagccagtatgagtattatttgagacttttggattggttgtgttattccgcctcagcctcaggttacaaaccatgcatccatatccatctacctatcaggaaatgcatgcgtgatccttaaacttaccgaaggtcttctaagtctgtattctgatactagaggttcatagagtttgtggacttatgttcaaagtgcacaaaaaatgtttacaagtttgacttgtcaacatggaatctcaacattgccatgctatgtacttcatgttagcgaccttagggcgttctgagtatttt

SEQ ID NO: 53450 - DNA, 2174 bp, Zea Mays
ctttattgttacctgcacttcaagtatcatcttggaacaagatttttggcagtcatatggataacatctgatcaaatgaaattaaatttatttggtgctattcgagttttggaagattttacgtcatggtgattggaacatgacatctaattaattttggtgattccatccaaatttacttcagggagaagggattacagagatcatgagtttagactcaggcctgatagaagacactcaccccatgggaggtattcccctgaaagagatatcaggcgtcgttcatttcatgataagagaccaagttctgaagataggggtaatcactttttctgtgcacatttgtgccaataaaaatatttgccactgtccattgtatcttctaactactccctgagatttgatttgcaggatctagtcattcaagatcacctattaggaagaggtatgtaggaacgaataacaattattagggattcaagatctagtcattagaagtacttaaatttgtttattacatcgggctagtttatcttcatgtaccatcatgacttaatccctgctaatttattggtttcctaattttttatatgtgcgagctgcaatgttaagtttgtggtttatgagaccttttattctattgttcaaccatgatctaccatggagtctcattaccatccatttataactttggggtggggttgtagccgtgtagggtcatgaatgttggtatcaccaaggagggttttgatcttatgttaggcatgtgatctgtatacatgctttttttgcaagtttatggcttgcttgtgaaattgcctatctttatgtttatgttctatggctgctcagtgagagaaaacatagtaaaagtcctgatggtggagaaaccgattcatccgtaagtgttcgaagtcctgataacgaagacagaggaaaagatgaaaggtacttaagcagtgatgagaaaaatggtcatgaagatcaactgaaacaaatgcatctggacatggaagcattgcgtgaagacaaatcaaagctggagatgatattagagaagaagactgatgaagagcacaaactttgtagcagagtagaagatcttgaattgcaattgaacaaagagaaagaagattgccaaaggatgtcctccaaaaccaaaaagctaatcaaagcacatgggcgttatataaaagcacaggaggatttaaagaggtctcaggctcgctttgagaggctagcagatttgcttgcttcagatattttgaagccttgtaccaaggagcagggttccatagggattactgccaatgaagatccatataatgctaatgaaatgagcccaagtgaccaaagacaaaaccatgtttcagcatcgagaaaaagacttatttccctcccaacaagtgaagaagcaaaaactggaaagagacagagagagaatggtgatgatatgatcccaacatcagagaactatagacctgaagatgccctagaacatctccaagatagcaagggaactgatctaccagaatcatttacagtgaagaagttaagggagggtgacaacgatgatgtaggaaacattgtctcttcaagcaatatttttgcggataggggcttggacgtgggggtggatgaggatgtggcagttgtcaacagtttcattagctcgcgcatgattgataagcggccaataccgagctcaaactccttgaaggagctgtcaaactccttgaaggagctgccgcctgctggccatgcaactccgaaacagcagctggcatccttaggcggcgcttcaggacgagtgatattcaaccgtgggccgacagtggcacaattccggagcacactcaggggggcggtcctgaggagggtgcggtgcaaaggaggaactgacggtggaggtcgaaccagcaggaatggcagcacacgagatgagacaaacaggagagccacacatctttgtgttggaccactcaccctcgagaggtgtttggttgcctgggcaagcctctaggctatgctatccattgatcaatcttactgaactattgaataactgtggaggaacatatgtctatttttgtacaaatagagtggactaaatcttcatgtagctatatagatggcaccagtaatggttacagtgattgacatttgaattgttc

SEQ ID NO: 53451 - DNA, 1827 bp, Zea Mays
aatttaacaaattcctctcccgtcccctttcccttcggggatggtattcgtcgtcttggcttcatcctctcgcccgccgtctcgactgtagcaagcggggctgctgtccgccgcattcaggagccatgcgtgaggggatgagggagagggacagaggcgggagcccggatgcgtcaggtcctccgcccttccgcggcccggcgtacaagacgaagctgtgcgcgctttggaggggcaggggcggctgcccccgccccaactgcggtttcgcccacggcgaggctgagctccgaaggccgccccctcgcgcctccttccagcctcgcccacgacctgggagaagggattacagagatcatgagtttagactcaggcctgatagaagacactcaccccatgggaggtattcccctgaaagagatatcaggcgtcgttcatttcatgataagagaccaagttctgaagataggggatctagtcattcaagatcacctattaggaagagtgagagaaaacatagtaaaagtcctgatggtggagaaaccgattcatccgtaagtgttcgaagtcctgataacgaagacagaggaaaagatgaaaggtacttaagcagtgatgagaaaaatggtcatgaagatcaactgaaacaaatgcatctggacatggaagcattgcgtgaagacaaatcaaagctggagatgatattagagaagaagactgatgaagagcacaaactttgtagcagagtagaagatcttgaattgcaattgaacaaagagaaagaagattgccaaaggatgtcctccaaaaccaaaaagctaatcaaagcacatgggcgttatataaaagcacaggaggatttaaagaggtctcaggctcgctttgagaggctagcagatttgcttgcttcagatattttgaagccttgtaccaaggagcagggttccatagggattactgccaatgaagatccatataatgctaatgaaatgagcccaagtgaccaaagacaaaaccatgtttcagcatcgagaaaaagacttatttccctcccaacaagtgaagaagcaaaaactggaaagagacagagagagaatggtgatgatatgatcccaacatcagagaactatagacctgaagatgccctagaacatctccaagatagcaagggaactgatctaccagaatcatttacagtgaagaagttaagggagggtgacaacgatgatgtaggaaacattgtctcttcaagcaatatttttgcggataggggcttggacgtgggggtggatgaggatgtggcagttgtcaacagtttcattagctcgcgcatgattgataagcggccaataccgagctcaaactccttgaaggagctgtcaaactccttgaaggagctgccgcctgctggccatgcaactccgaaacagcagctggcatccttaggcggcgcttcaggacgagtgatattcaaccgtgggccgacagtggcacaattccggagcacactcaggggggcggtcctgaggagggtgcggtgcaaaggaggaactgacggtggaggtcgaaccagcaggaatggcagcacacgagatgagacaaacaggagagccacacatctttgtgttggaccactcaccctcgagaggtgtttggttgcctgggcaagcctctaggctatgctatccattgatcaatcttactgaactattgaataactgtggaggaacatatgtctatttttgtacaaatagagtggactaaatcttcatgtagctatatagatggcaccagtaatggttacagtgattgacatttgaattgttc

SEQ ID NO: 53452 - DNA, 3497 bp, Zea Mays
atgaatggcgggagcaaggctgttgtggtggtgcacaagcacgctggtgtcttcatctccaagtccaaggaggatgcgctctgcaccaagaacatggtctcgagagagtctgtgtacggagagaagcatgcttccgttcaggttgaatacagggtgtggaaccccttccattcgaagctggctactattgtgcttggtggtgttgacaacatctggattgctcctggtactcgtgtgttgtatcttggtgctgcttctggcacaattgtgtctcatatgtctgatattcagaatcccttccctttcgtagcgaaggccgtggcggtcttagagtctgtgctgtgcttggagaagtgggcggcatacaagaaggcccttgcagacaggaagaaggcgcttgagagccataagatcatattcactcgctccaaacatggttttgaattcacctgggactacatagttcaaggacttgaaccgaatgctaatcttatgatgaccctctcccttgctgcattaggatccttgatgtggcttaggaagaacaagcctaggactttggttccaataatttatgcatatgctctactcttggcaataatgccatctatcaccagcctaaaccatcaaaatgtgttcctatgggctgtaaaatgttcactgaactttagtgttggttatggttttatagacttatgttctgtaggaaacttgagggctgtttggtttgtggctaaacgtgtcacactttgcctaagatatctcatggacagatttgttgagattgactgcttccagaggatggcacatcttatttccatcctggcctttgtttcagttggcaatcggtcatttatgatacttgaatgcttaacctgcctcagaagaactgaacatggaagatattatacattttatcttctcgatgggattcatgctatggtcagtgagctttaacaatgctattagaagcttttgcaactaattgaaacatgccgtttgaatacactgcatcaagctatatctgtggctttattgttacctgcacttcaagtatcatcttggaacaagatttttggcagtcatatggataacatctgatcaaatgaaattaaatttatttggtgctattcgagttttggaagattttacgtcatggtgattggaacatgacatctaattaattttggtgattccatccaaatttacttcaggtgattcgtattagaagtactggatcaattctaagtggttaatcatgataatcatgtattggcatctactctttcattagttgtattggctcgtctgtgtttgtggtctatggtgtattggtgttattgtgggccctctaatttttgagctaattgaataaccatatggctcaaggttgtggtaaggttaatgggtttctgtgttgccttgtatctatgcagccccatctaactcttgttctttgatggcataatgtttttttgggtaaatcttccaccttcctgatttgtagggagaagggattacagagatcatgagtttagactcaggcctgatagaagacactcaccccatgggaggtattcccctgaaagagatatcaggcgtcgttcatttcatgataagagaccaagttctgaagataggggtaatcactttttctgtgcacatttgtgccaataaaaatatttgccactgtccattgtatcttctaactactccctgagatttgatttgcaggatctagtcattcaagatcacctattaggaagaggtatgtaggaacgaataacaattattagggattcaagatctagtcattagaagtacttaaatttgtttattacatcgggctagtttatcttcatgtaccatcatgacttaatccctgctaatttattggtttcctaattttttatatgtgcgagctgcaatgttaagtttgtggtttatgagaccttttattctattgttcaaccatgatctaccatggagtctcattaccatccatttataactttggggtggggttgtagccgtgtagggtcatgaatgttggtatcaccaaggagggttttgatcttatgttaggcatgtgatctgtatacatgctttttttgcaagtttatggcttgcttgtgaaattgcctatctttatgtttatgttctatggctgctcagtgagagaaaacatagtaaaagtcctgatggtggagaaaccgattcatccgtaagtgttcgaagtcctgataacgaagacagaggaaaagatgaaaggtacttaagcagtgatgagaaaaatggtcatgaagatcaactgaaacaaatgcatctggacatggaagcattgcgtgaagacaaatcaaagctggagatgatattagagaagaagactgatgaagagcacaaactttgtagcagagtagaagatcttgaattgcaattgaacaaagagaaagaagattgccaaaggatgtcctccaaaaccaaaaagctaatcaaagcacatgggcgttatataaaagcacaggaggatttaaagaggtctcaggctcgctttgagaggctagcagatttgcttgcttcagatattttgaagccttgtaccaaggagcagggttccatagggattactgccaatgaagatccatataatgctaatgaaatgagcccaagtgaccaaagacaaaaccatgtttcagcatcgagaaaaagacttatttccctcccaacaagtgaagaagcaaaaactggaaagagacagagagagaatggtgatgatatgatcccaacatcagagaactatagacctgaagatgccctagaacatctccaagatagcaagggaactgatctaccagaatcatttacagtgaagaagttaagggagggtgacaacgatgatgtaggaaacattgtctcttcaagcaatatttttgcggataggggcttggacgtgggggtggatgaggatgtggcagttgtcaacagtttcattagctcgcgcatgattgataagcggccaataccgagctcaaactccttgaaggagctgtcaaactccttgaaggagctgccgcctgctggccatgcaactccgaaacagcagctggcatccttaggcggcgcttcaggacgagtgatattcaaccgtgggccgacagtggcacaattccggagcacactcaggggggcggtcctgaggagggtgcggtgcaaaggaggaactgacggtggaggtcgaaccagcaggaatggcagcacacgagatgagacaaacaggagagccacacatctttgtgttggaccactcaccctcgagaggtgtttggttgcctgggcaagcctctaggctatgctatccattgatcaatcttactgaactattgaataactgtggaggaacatatgtctatttttgtacaaatagagtggactaaatcttcatgtagctatatagatggcaccagtaatggttacagtgattgacatttgaattgttc

SEQ ID NO: 53453 - DNA, 614 bp, Zea Mays
atgtaatcatcactggtaacattgtgtcttgagaggcaacaaattagagtctttgatgggcttctttctgtagctcattcagcgctttacgttgccaatagcaagcttggaataagttatcatgcattcactgtcttctcgaacagtgtgtgcatccccatgtccaacattcctcactttgcttaaacgctttgcaaaatttcttctgttgatgtgtgtttggcttgtatgtgactataaataacaactgccttactgcaggtgacttttttctgggatggagctcatatttgcaggtgattgattcatcttggggctgagattgaaataggatatggcacatatgataatgatcagagtggtttctgaacatacgaagtagccgcccaagagctttcaacctgccaagtttcagagctagtgctgttacatcgttggcaatgccacaacattttttcacatacatttatttcccaatgcgttgtccttaatgccatgtccttatgtagcagttcatgaacaagattggaaggatataagcactcaacgaccttcgtcgacagagctgaatgcacggttcaccgggcaatgcatagttcgtttgagcacttgag

SEQ ID NO: 53454 - DNA, 721 bp, Zea Mays
ctgtattatttattggttaaaattgttggctaaattatttgtcaaaagtcaagactgttaaagtttgttgatctacatttgtgcgttgtaatctattctggattgggcaaaatccaaaatgcatgctatgtagcataataatgcatagaaaccccaagggtattaaataacttacatgtacaccccttaatttttttcttgtctaggattataagtacgttgtccagctgtggcaccaagtcgtagctcactgtcttgtcctggttctgctatattttctctttgttgcaggcggtatcataaactgattttttgtggttcagttagacgagagcgatgaagagcaacttttgtgaactagagtttcagatgctaccatggtgacttttttctgggatggagctcatatttgcagtattcggtggtttattaaattcagatatggcacatatgataatgatcagagtggtttctgaacatacgaagtagccgcccaagagctttcaacctgccaagtttcagagctagtgctgttacatcgttggcaatgccacaacattttttcacatacatttatttcccaatgcgttgtccttaatgccatgtccttatgtagcagttcatgaacaagattggaaggatataagcactcaacgaccttcgtcgacagagctgaatgcacggttcaccgggcaatgcatagttcgtttgagcacttgag

SEQ ID NO: 53455 - DNA, 823 bp, Zea Mays
ctcaattctcacacgttcactatttatttagtttaaattatattgtttatggttattataaacttgtgattactgaaggatacattaagtctgtattatttattggttaaaattgttggctaaattatttgtcaaaagtcaagactgttaaagtttgttgatctacatttgtgcgttgtaatctattctggattgggcaaaatccaaaatgcatgctatgtagcataataatgcatagaaaccccaagggtattaaataacttacatgtacaccccttaatttttttcttgtctaggattataagtacgttgtccagctgtggcaccaagtcgtagctcactgtcttgtcctggttctgctatattttctctttgttgcaggcggtatcataaactgattttttgtggttcagttagacgagagcgatgaagagcaacttttgtgaactagagtttcagatgctaccatggtgacttttttctgggatggagctcatatttgcaggtgattgattcatcttggggctgagattgaaataggatatggcacatatgataatgatcagagtggtttctgaacatacgaagtagccgcccaagagctttcaacctgccaagtttcagagctagtgctgttacatcgttggcaatgccacaacattttttcacatacatttatttcccaatgcgttgtccttaatgccatgtccttatgtagcagttcatgaacaagattggaaggatataagcactcaacgaccttcgtcgacagagctgaatgcacggttcaccgggcaatgcatagttcgtttgagcacttgag

SEQ ID NO: 53456 - DNA, 3407 bp, Zea Mays
aagccgccgccgccaccaccgcctcacccaagctttcatttgtcatgctggttgcccccgccttatcgtgtaatgccatgttgcccccgcatcatcatctaagatttcgtttgtcgtccgcgctgcagtctgcttcccgtttcactcttatatttttttgttggacggagttgttttgcatcgtttcgatctgtaccgtactgtttcccctcttgttcataacggcggcgacacaaattcttgcgtgctgcgccgctcacgcaaggagggataaatcgactcgtcaagaaatcgtttcagttgccatgactccagtaggcaatatgattgttgcttgactacagttttgtcttccactacttagcttatttgtttgttttattcttacctcgcccgtattttctttgttttattcttacctcgctcccgattttaagatctaatttggtatctgcacggtgcttaccccgggcttgtcggatgtacttgaagaaggaagccccaatgtctgtgctagatccactatgccattcagtgttgcaggccctgatgaattttgtgattggtctgtgtcaaagcaatggatacaaattttcgtaatagaccatttctttattatgtttggtttgatgattcgtttgattgattgatggcagtgatttgacattacccgcgcttctgatctaacccgtgaagcaaagggaaaattaatggttgaatttcttaatatgagccatctagtgatctttcagctgtctccttttattttgtgcgtgagctcatttcattcatgtggttgatttggcggtgatgatacaaccattcagcttacaacgccagttctgcttctgataagtcatgacagataaagctgattcatatctgagccttgatttgtgtcatgttctgacaaactcataattaggatcatgcattttttcttgctccaaaccttacatcccgttggccactgaagtcaacccaatgtttcgaggctacaatcggctccaactacatgcttgtcaggtagaacctacttggagctgctgccctcgcatgacgagtcttgacaatcctgtggccctctacgcagcgtcgaaatgcgttttagtttataataatgctgtgttttagttatttctctcctaataattatactgagtggatctgtgccgagttcaactatccttgcactagtgctctctgatttgtgttgaggctgaagaactcggatagtttgtgttgtcatcagcttcggctctgtactgtgagttgggagttaaataacagcacgagattgttaacatctgtgagtttaaaccacatttttttttgccttttttatgcaacataattatttttaaggctttagaacaaggagttcaaccagtagttttgtctccctttgcatgtagctgatgctcacgccctgtgttgactattgtgcttataacaggactggcaattttgctttgagtctttatagtaatcactggaattatttcctaggttggcctgactactgttaccttttgtagaatttataaggtgcagttacacttgccacctcaattctcacacgttcactatttatttagtttaaattatattgtttatggttattataaacttgtgattactgaaggatacattaagtctgtattatttattggttaaaattgttggctaaattatttgtcaaaagtcaagactgttaaagtttgttgatctacatttgtgcgttgtaatctattctggattgggcaaaatccaaaatgcatgctatgtagcataataatgcatagaaaccccaagggtattaaataacttacatgtacaccccttaatttttttcttgtctaggattataagtacgttgtccagctgtggcaccaagtcgtagctcactgtcttgtcctggttctgctatattttctctttgttgcaggcggtatcataaactgattttttgtggttcagttagacgagagcgatgaagagcaacttttgtgaactagagtttcagatgctaccatggtagtatttgacgatcaaaccctttttattagtagtttacttatgttgttttttacttcctgttctgagaagatgaattttgaatggtgatgaacaactgtgttttggactagagtttctgatactagtggtagttgaagaccaaaccgttaactgtctgaactcaaatctatcgagcgggcaatacctgacattttagatgatttttttttattaaatgcgtccattaccaattctgaaggaagactctgttcctctttgtataatggctcggacgccacatggtattctaaaatagttgtgtggttatatcctgattggttgcgttcttttatggcaatccaatcctggaaaggccgcatatattccatcgcatgcaaaactgataatttttccacgtttttttggtaataccttgaagtgatagtgcctgacctgcttgatcgtgtatcatgatatttcttttatatcggatacgatgatctgatagattccttatcttttttctcgtatgagttgtctaaaaagaggtgggtgacgataacaaagtaaaatacagccaatgttgcagaacaggccaacttttgcctattatattttggtatctcttaactagtggtgcgaggccaattgttcacttgttaatttaactaactaattttaaatgttggttggtttggtatcttggtaatattttggtatctctgaactaattttaaatgttgttagggtatattttgtttacccttgtaattgatgtgttaatgttgtttgtttcgaggtttctcttgaatgtaatcatcactggtaacattgtgtcttgagaggcaacaaattagagtctttgatgggcttctttctgtagctcattcagcgctttacgttgccaatagcaagcttggaataagttatcatgcattcactgtcttctcgaacagtgtgtgcatccccatgtccaacattcctcactttgcttaaacgctttgcaaaatttcttctgttgatgtgtgtttggcttgtatgtgactataaataacaactgccttactgcaggtgacttttttctgggatggagctcatatttgcagatatggcacatatgataatgatcagagtggtttctgaacatacgaagtagccgcccaagagctttcaacctgccaagtttcagagctagtgctgttacatcgttggcaatgccacaacattttttcacatacatttatttcccaatgcgttgtccttaatgccatgtccttatgtagcagttcatgaacaagattggaaggatataagcactcaacgaccttcgtcgacagagctgaatgcacggttcaccgggcaatgcatagttcgtttgagcacttgag

SEQ ID NO: 53457 - DNA, 1379 bp, Zea Mays
aagccgccgccgccaccaccgcctcacccaagctttcatttgtcatgctggttgcccccgccttatcgtgtaatgccatgttgcccccgcatcatcatctaagatttcgtttgtcgtccgcgctgcagtctgcttcccgtttcactcttatatttttttgttggacggagttgttttgcatcgtttcgatctgtaccgtactgtttcccctcttgttcataacggcggcgacacaaattcttgcgtgctgcgccgctcacgcaaggagggataaatcgactcgtcaagaaatcgtttcagttgccatgactccagtaggcaatatgattgttgcttgactacagttttgtcttccactacttagcttatttgtttgttttattcttacctcgcccgtattttctttgttttattcttacctcgctcccgattttaagatctaatttggtatctgcacggtgcttaccccgggcttgtcggatgtacttgaagaaggaagccccaatgtctgtgctagatccactatgccattcagtgttgcaggccctgatgaattttgtgattggtctgtgtcaaagcaatggatacaaattttcgtaatagaccatttctttattatgtttggtttgatgattcgtttgattgattgatggcagtgatttgacattacccgcgcttctgatctaacccgtgaagcaaagggaaaattaatggttgaatttcttaatatgagccatctagtgatctttcagctgtctccttttattttgtgcgtgagctcatttcattcatgtggttgatttggcggtgatgatacaaccattcagcttacaacgccagttctgcttctgataagtcatgacagataaagctgattcatatctgagccttgatttgtgtcatgttctgacaaactcataattaggatcatgcattttttcttgctccaaaccttacatcccgttggccactgaagtcaacccaatgtttcgaggctacaatcggctccaactacatgcttgtcaggtgacttttttctgggatggagctcatatttgcaggtgattgattcatcttggggctgagattgaaataggatatggcacatatgataatgatcagagtggtttctgaacatacgaagtagccgcccaagagctttcaacctgccaagtttcagagctagtgctgttacatcgttggcaatgccacaacattttttcacatacatttatttcccaatgcgttgtccttaatgccatgtccttatgtagcagttcatgaacaagattggaaggatataagcactcaacgaccttcgtcgacagagctgaatgcacggttcaccgggcaatgcatagttcgtttgagcacttgag

SEQ ID NO: 53458 - DNA, 673 bp, Zea Mays
aagccgccgccgccaccaccgcctcacccaagctttcatttgtcatgctggttgcccccgccttatcgtgatcatgcattttttcttgctccaaaccttacatcccgttggccactgaagtcaacccaatgtttcgaggctacaatcggctccaactacatgcttgtcagttagacgagagcgatgaagagcaacttttgtgaactagagtttcagatgctaccatggtgacttttttctgggatggagctcatatttgcaggtgattgattcatcttggggctgagattgaaatagggtatttcagtgattcaaaataattcttggtgtacatcatcattagttttgtattgttttatttacacagtattcggtggtttattaaattcagatatggcacatatgataatgatcagagtggtttctgaacatacgaagtagccgcccaagagctttcaacctgccaagtttcagagctagtgctgttacatcgttggcaatgccacaacattttttcacatacatttatttcccaatgcgttgtccttaatgccatgtccttatgtagcagttcatgaacaagattggaaggatataagcactcaacgaccttcgtcgacagagctgaatgcacggttcaccgggcaatgcatagttcgtttgagcacttgag

SEQ ID NO: 53459 - DNA, 1436 bp, Zea Mays
aagccgccgccgccaccaccgcctcacccaagctttcatttgtcatgctggttgcccccgccttatcgtgtaatgccatgttgcccccgcatcatcatctaagatttcgtttgtcgtccgcgctgcagtctgcttcccgtttcactcttatatttttttgttggacggagttgttttgcatcgtttcgatctgtaccgtactgtttcccctcttgttcataacggcggcgacacaaattcttgcgtgctgcgccgctcacgcaaggagggataaatcgactcgtcaagaaatcgtttcagttgccatgactccagtaggcaatatgattgttgcttgactacagttttgtcttccactacttagcttatttgtttgttttattcttacctcgcccgtattttctttgttttattcttacctcgctcccgattttaagatctaatttggtatctgcacggtgcttaccccgggcttgtcggatgtacttgaagaaggaagccccaatgtctgtgctagatccactatgccattcagtgttgcaggccctgatgaattttgtgattggtctgtgtcaaagcaatggatacaaattttcgtaatagaccatttctttattatgtttggtttgatgattcgtttgattgattgatggcagtgatttgacattacccgcgcttctgatctaacccgtgaagcaaagggaaaattaatggttgaatttcttaatatgagccatctagtgatctttcagctgtctccttttattttgtgcgtgagctcatttcattcatgtggttgatttggcggtgatgatacaaccattcagcttacaacgccagttctgcttctgataagtcatgacagataaagctgattcatatctgagccttgatttgtgtcatgttctgacaaactcataattaggatcatgcattttttcttgctccaaaccttacatcccgttggccactgaagtcaacccaatgtttcgaggctacaatcggctccaactacatgcttgtcagttagacgagagcgatgaagagcaacttttgtgaactagagtttcagatgctaccatggtgacttttttctgggatggagctcatatttgcaggtgattgattcatcttggggctgagattgaaataggatatggcacatatgataatgatcagagtggtttctgaacatacgaagtagccgcccaagagctttcaacctgccaagtttcagagctagtgctgttacatcgttggcaatgccacaacattttttcacatacatttatttcccaatgcgttgtccttaatgccatgtccttatgtagcagttcatgaacaagattggaaggatataagcactcaacgaccttcgtcgacagagctgaatgcacggttcaccgggcaatgcatagttcgtttgagcacttgag

SEQ ID NO: 53460 - DNA, 1432 bp, Zea Mays
aagccgccgccgccaccaccgcctcacccaagctttcatttgtcatgctggttgcccccgccttatcgtgtaatgccatgttgcccccgcatcatcatctaagatttcgtttgtcgtccgcgctgcagtctgcttcccgtttcactcttatatttttttgttggacggagttgttttgcatcgtttcgatctgtaccgtactgtttcccctcttgttcataacggcggcgacacaaattcttgcgtgctgcgccgctcacgcaaggagggataaatcgactcgtcaagaaatcgtttcagttgccatgactccagtaggcaatatgattgttgcttgactacagttttgtcttccactacttagcttatttgtttgttttattcttacctcgcccgtattttctttgttttattcttacctcgctcccgattttaagatctaatttggtatctgcacggtgcttaccccgggcttgtcggatgtacttgaagaaggaagccccaatgtctgtgctagatccactatgccattcagtgttgcaggccctgatgaattttgtgattggtctgtgtcaaagcaatggatacaaattttcgtaatagaccatttctttattatgtttggtttgatgattcgtttgattgattgatggcagtgatttgacattacccgcgcttctgatctaacccgtgaagcaaagggaaaattaatggttgaatttcttaatatgagccatctagtgatctttcagctgtctccttttattttgtgcgtgagctcatttcattcatgtggttgatttggcggtgatgatacaaccattcagcttacaacgccagttctgcttctgataagtcatgacagataaagctgattcatatctgagccttgatttgtgtcatgttctgacaaactcataattaggatcatgcattttttcttgctccaaaccttacatcccgttggccactgaagtcaacccaatgtttcgaggctacaatcggctccaactacatgcttgtcaggcggtatcataaactgattttttgtggttcagttagacgagagcgatgaagagcaacttttgtgaactagagtttcagatgctaccatggtgacttttttctgggatggagctcatatttgcagatatggcacatatgataatgatcagagtggtttctgaacatacgaagtagccgcccaagagctttcaacctgccaagtttcagagctagtgctgttacatcgttggcaatgccacaacattttttcacatacatttatttcccaatgcgttgtccttaatgccatgtccttatgtagcagttcatgaacaagattggaaggatataagcactcaacgaccttcgtcgacagagctgaatgcacggttcaccgggcaatgcatagttcgtttgagcacttgag

SEQ ID NO: 53461 - DNA, 654 bp, Zea Mays
ggaggctataaaacagccgacctgtgctccattttgctatctagggtttcaagccgccgccgccaccaccgcctcacccaagctttcatttgtcatgctggttgcccccgccttatcgtgcggtatcataaactgattttttgtggttcagttagacgagagcgatgaagagcaacttttgtgaactagagtttcagatgctaccatggtgacttttttctgggatggagctcatatttgcaggtgattgattcatcttggggctgagattgaaatagggtatttcagtgattcaaaataattcttggtgtacatcatcattagttttgtattgttttatttacacagtattcggtggtttattaaattcagatatggcacatatgataatgatcagagtggtttctgaacatacgaagtagccgcccaagagctttcaacctgccaagtttcagagctagtgctgttacatcgttggcaatgccacaacattttttcacatacatttatttcccaatgcgttgtccttaatgccatgtccttatgtagcagttcatgaacaagattggaaggatataagcactcaacgaccttcgtcgacagagctgaatgcacggttcaccgggcaatgcatagttcgtttgagcacttgag

SEQ ID NO: 53462 - DNA, 1599 bp, Zea Mays
cctagaccacttcgccgccacggaggctataaaacagccgacctgtgctccattttgctatctagggtttcaagccgccgccgccaccaccgcctcacccaagctttcatttgtcatgctggttgcccccgccttatcgtgcggtatcataaactgattttttgtggttcagttagacgagagcgatgaagagcaacttttgtgaactagagtttcagatgctaccatggtagtatttgacgatcaaaccctttttattagtagtttacttatgttgttttttacttcctgttctgagaagatgaattttgaatggtgatgaacaactgtgttttggactagagtttctgatactagtggtagttgaagaccaaaccgttaactgtctgaactcaaatctatcgagcgggcaatacctgacattttagatgatttttttttattaaatgcgtccattaccaattctgaaggaagactctgttcctctttgtataatggctcggacgccacatggtattctaaaatagttgtgtggttatatcctgattggttgcgttcttttatggcaatccaatcctggaaaggccgcatatattccatcgcatgcaaaactgataatttttccacgtttttttggtaataccttgaagtgatagtgcctgacctgcttgatcgtgtatcatgatatttcttttatatcggatacgatgatctgatagattccttatcttttttctcgtatgagttgtctaaaaagaggtgggtgacgataacaaagtaaaatacagccaatgttgcagaacaggccaacttttgcctattatattttggtatctcttaactagtggtgcgaggccaattgttcacttgttaatttaactaactaattttaaatgttggttggtttggtatcttggtaatattttggtatctctgaactaattttaaatgttgttagggtatattttgtttacccttgtaattgatgtgttaatgttgtttgtttcgaggtttctcttgaatgtaatcatcactggtaacattgtgtcttgagaggcaacaaattagagtctttgatgggcttctttctgtagctcattcagcgctttacgttgccaatagcaagcttggaataagttatcatgcattcactgtcttctcgaacagtgtgtgcatccccatgtccaacattcctcactttgcttaaacgctttgcaaaatttcttctgttgatgtgtgtttggcttgtatgtgactataaataacaactgccttactgcaggtgacttttttctgggatggagctcatatttgcagatatggcacatatgataatgatcagagtggtttctgaacatacgaagtagccgcccaagagctttcaacctgccaagtttcagagctagtgctgttacatcgttggcaatgccacaacattttttcacatacatttatttcccaatgcgttgtccttaatgccatgtccttatgtagcagttcatgaacaagattggaaggatataagcactcaacgaccttcgtcgacagagctgaatgcacggttcaccgggcaatgcatagttcgtttgagcacttgag

SEQ ID NO: 53463 - DNA, 589 bp, Zea Mays
tgccctagaccacttcgccgccacggaggctataaaacagccgacctgtgctccattttgctatctagggtttcaagccgccgccgccaccaccgcctcacccaagctttcatttgtcatgctggttgcccccgccttatcgtgtgacttttttctgggatggagctcatatttgcaggtgattgattcatcttggggctgagattgaaatagggtatttcagtgattcaaaataattcttggtgtacatcatcattagttttgtattgttttatttacacagtattcggtggtttattaaattcagatatggcacatatgataatgatcagagtggtttctgaacatacgaagtagccgcccaagagctttcaacctgccaagtttcagagctagtgctgttacatcgttggcaatgccacaacattttttcacatacatttatttcccaatgcgttgtccttaatgccatgtccttatgtagcagttcatgaacaagattggaaggatataagcactcaacgaccttcgtcgacagagctgaatgcacggttcaccgggcaatgcatagttcgtttgagcacttgag

SEQ ID NO: 53464 - DNA, 1664 bp, Zea Mays
aagccgccgccgccaccaccgcctcacccaagctttcatttgtcatgctggttgcccccgccttatcgtgtaatgccatgttgcccccgcatcatcatctaagatttcgtttgtcgtccgcgctgcagtctgcttcccgtttcactcttatatttttttgttggacggagttgttttgcatcgtttcgatctgtaccgtactgtttcccctcttgttcataacggcggcgacacaaattcttgcgtgctgcgccgctcacgcaaggagggataaatcgactcgtcaagaaatcgtttcagttgccatgactccagtaggcaatatgattgttgcttgactacagttttgtcttccactacttagcttatttgtttgttttattcttacctcgcccgtattttctttgttttattcttacctcgctcccgattttaagatctaatttggtatctgcacggtgcttaccccgggcttgtcggatgtacttgaagaaggaagccccaatgtctgtgctagatccactatgccattcagtgttgcaggccctgatgaattttgtgattggtctgtgtcaaagcaatggatacaaattttcgtaatagaccatttctttattatgtttggtttgatgattcgtttgattgattgatggcagtgatttgacattacccgcgcttctgatctaacccgtgaagcaaagggaaaattaatggttgaatttcttaatatgagccatctagtgatctttcagctgtctccttttattttgtgcgtgagctcatttcattcatgtggttgatttggcggtgatgatacaaccattcagcttacaacgccagttctgcttctgataagtcatgacagataaagctgattcatatctgagccttgatttgtgtcatgttctgacaaactcataattaggatcatgcattttttcttgctccaaaccttacatcccgttggccactgaagtcaacccaatgtttcgaggctacaatcggctccaactacatgcttgtcaggcggtatcataaactgattttttgtggttcagttagacgagagcgatgaagagcaacttttgtgaactagagtttcagatgctaccatggtagtatttgacgatcaaaccctttttattagtagtttacttatgttgttttttacttcctgttctgagaagatgaattttgaatggtgatgaacaactgtgttttggactagagtttctgatactagtggtagttgaagaccaaaccgttaactgtctgaactcaaatctatcgagcgggcaatacctgacattttagatgatttttttttattaaatgcgtccattaccaattctgaaggaagactctgttcctctttgtataatggctcggacgccacatggtattctaaaatagttgtgtggttatatcctgattggttgcgttcttttatggcaatccaatcctggaaaggccgcatatattccatcgcatgcaaaactgataatttttccacgtttttttggtaataccttgaagtgatagtgcctgacctgcttgatcgtgtatcatgatatttcttttatatcggatacgatgatctgatagattccttatcttttttctcgtatgagttgtctaaaaagaggtgggtgacgataacaaag

SEQ ID NO: 53465 - DNA, 400 bp, Zea Mays
gatacaagcttctcatcatttcggaaagtttcagtggtgcaaacttttaatggcctagccagttggatatttcaggaggcagaaggagatgaagacgagtgagattgagaggatcaaggaaatgctgctgtctaggaaatgctgccttttttagagaaaactagatgagtgtcagtttatacgaatcaccaagttggctttgttgttgagtgtccttaataaagatttttgcctctgtttctaagacagcgacattcttagatataaaacacactttgtcactgcacacttttatttcactgtagcacagggtagattcagtacttaactatttcatgttgtcatgatcaaatgtgtcaatgacatttgatatttattctaaggtggtcttcagcgtttt

SEQ ID NO: 53466 - DNA, 900 bp, Zea Mays
atttggtctcacccacttgagactgtatgaactattatggtggcgtggactgtggatcttaactggtaatttacgtatccgtactggttggttgaccttatattgagatgttcaccagcttgaccttaatttacagaaaactactctgaggacctgaacacagcctggaacacatcaggccactgatatttcctgctaagaggcgcaaggttgtcactatgaagaagaggaaggaaagggtgtcctgaatcaacccttccttcagtgatgggtatcactgcagaagaaagcactgcactgatacctgctgcttcagaaagtaaagcacaaaaggatcttactcctgttggaagagatgctttgtcacgaattagaggtcgagattttgactcagcatgtggtcttactgaggatactggggccttggttgtatgaaatggattcctgttaaggagaaattggttgtcctcaagaaaaatgcggaaccttatgtacagaaggtatcgacaagatcagtgaagttttatgaacggagggaggattttctatctccgctgtttagcctggagtcaaaggaggcagaaggagatgaagacgagtgagattgagaggatcaaggaaatgctgctgtctaggaaatgctgccttttttagagaaaactagatgagtgtcagtttatacgaatcaccaagttggctttgttgttgagtgtccttaataaagatttttgcctctgtttctaagacagcgacattcttagatataaaacacactttgtcactgcacacttttatttcactgtagcacagggtagattcagtacttaactatttcatgttgtcatgatcaaatgtgtcaatgacatttgatatttattctaaggtggtcttcagcgtttt

SEQ ID NO: 53467 - DNA, 1625 bp, Zea Mays
gtccatttcaaggttttccttagtttccattgagatttatctattaccatggttatctgttaaacaaactatgaagttcagcatataatggtcagaggctatggtatttatcttatagtacaggaaatagacatcggagcagctcctatgttccattgaaggacgaaggcaattcaattctgaatgataagaaaaataccaagattcagcttgggataaaaaagatttggtctcacccacttgagactgtatgaactattatggtggcgtggactgtggatcttaactggtaatttacgtatccgtactggttggttgaccttatattgagatgttcaccagcttgaccttaatttacagaaaactactctgagggtaagtacttaagttttttatctattttccttctattcatagttgtagtgttgttgcttcagtttcgcaattggtacttcggtctcttttgcatcattatgcttcatgccattacaagaaagaataattatgcttcatgccccagtcagctagcttcgagacctcgctggttgataggtggtggtagctacttagcgtttgatgggtttctgtagcagtcaaactaaactggcttaattacattttctctacctattaactttatctgaagtgctgtgtgtaaaatagatgactattgtttgtgatgtgcatcatgaggattcatgatatactgatgacaatattttgttctcatgagcctgtggcagtagccaacgatctacttgtccacttgaactatttttccaactagatgattaacatatagcactcagcttgaaattcctttcaacttttcatggtaaaagcacaaccttacatgtggctcttaataattgatagacctgaacacagcctggaacacatcaggccactgatatttcctgctaagaggcgcaaggttgtcactatgaagaagaggaaggaaagggtgtcctgaatcaacccttccttcagtgatgggtatcactgcagaagaaagcactgcactgatacctgctgcttcagaaagtaaagcacaaaaggatcttactcctgttggaagagatgctttgtcacgaattagaggtcgagattttgactcagcatgtggtcttactgaggatactggggccttggttgtatgaaatggattcctgttaaggagaaattggttgtcctcaagaaaaatgcggaaccttatgtacagaaggtatcgacaagatcagtgaagttttatgaacggagggaggattttctatctccgctgtttagcctggagtcaaaggaggcagaaggagatgaagacgagtgagattgagaggatcaaggaaatgctgctgtctaggaaatgctgccttttttagagaaaactagatgagtgtcagtttatacgaatcaccaagttggctttgttgttgagtgtccttaataaagatttttgcctctgtttctaagacagcgacattcttagatataaaacacactttgtcactgcacacttttatttcactgtagcacagggtagattcagtacttaactatttcatgttgtcatgatcaaatgtgtcaatgacatttgatatttattctaaggtggtcttcagcgtttt

SEQ ID NO: 53468 - DNA, 1894 bp, Zea Mays
ggacgacaggacgaggacggcggggtcaaggctctctttctctctccctccctctctgcgtgtctcctcgcacgctacgcgaggccacgcgagattgcttgggagatgcgtgcccgcctccagattccccgttccagcgccgaggcgcgcaagctacgcgacggttgctgagcttcgctgcttgtgctgaagctctaaggagagcagacttccctcaaggtttcgtctttggcactgcttcttcagcttaccaggtgctgtcaacgagggtcaacgtggacctacaatatgggatactctcacaagacgacccggacgggtgatagatttcagcaatgcagatgttgccgttgatcactaccatcgttataaggaagatgtggacttgattaaggacattggcatggatgcataccggttctctatctcgtggtcacgtatctttccaaatggaactggtgaacctaatgaagaaggattgaattactataacagcctcataaatactctattagacaaaggtatacaaccatatgtaacactctttcactgggaccttccgcaagcactagaagacagatatggtggatggttaaactcccaaatcgtggatgattttgttcactatgcctctacttgcttcaaggaatttggagatagagtgaaacactggatcactttcaatgagccccataattttgcgattgaaggctatgaccttggcatccaggcacctgggaggtgttctattctgtctcatatattctgcagggagggcaaatcatcgactgagccttatgtcgtagctcacaacatactcttagcgcatgctggtgcctttcatacttataagcagcatttcaagaaagaacaaggaggtatcattggcattgcactcgattctaagtggtatgagccactgtcagatgttgatgaggacacagaggcagcagcacgagcaatggactttgagcttggatgaaacttgtgggcgacaggctgcctcagttttcagctcgggcttcgatgttagtgtcaggctcactagattttgtgggcataaaccattacaccacactgtatgttaggaacgacagaatgcggatcaggaaacttgtaatgaatgatgcttcaactgatgctgcggtcatacctactgcttatagacatggaaagaaaataggagaaacggcagcgtcaggatggctgcacatagtgccctggggcatgttcaagctgatgaagcacatcaaagaaaagtacgggaatccgcccgtgatcattactgaaaacggcatggatgatgcgaacaaccggttttcgaaattagaggatgatctgcaggatgataaacggatacagtaccacaaggactacatgtctaacctcctagacgcaattaggaaggaaggctgcaacgtccatggctacttcgtctggtcgctgctcgacaactgggagtggaactccgggtacacggtgcggtttgggctctactacatcgactacaacaacaatttgacacggatacccaaggcgtccgtggagtggttcaggcaggtcttggcccagaagacggctggtttggagtacagtggttctacagtggccagtagttgagtgtatataacatacacggcacggctaccatcgatctgtacatgcgtacgtagctttagattagattgtgattattctcgatgtatatagactcaccatttggacgaccttcaaccgcacagttgaatgtgtcgttatgcttgctacaaattggttgattggtgctaaagaaatcagtgaggggtgctcggttctactactaaatgtcatatcggaaattaaataccaattataaatattaaatatattttaattacaaattaattatacaaaa

SEQ ID NO: 53469 - DNA, 2137 bp, Zea Mays
ggacgacaggacgaggacggcggggtcaaggctctctttctctctccctccctctctgcgtgtctcctcgcacgctacgcgaggccacgcgagattgcttgggagatgcgtgcccgcctccagattccccgttccagcgccgaggcgcgcaagctacgcgacggttgctgaggtttcggagctagacatgtcaagtagtttccttcggttgttgattaatttgcccactgtgatagagattttgcaccttgtggcctccacaagagttacttagtagagacgcacgttggaagggcttccaagacaagtgaagctcactagctcagcgttcagttgcttcccacgcttcaccaactgaacaagcttcgctgcttgtgctgaagctctaaggagagcagacttccctcaaggtttcgtctttggcactgcttcttcagcttaccagtatgaaggtgctgtcaacgagggtcaacgtggacctacaatatgggatactctcacaagacgacccggacgggtgatagatttcagcaatgcagatgttgccgttgatcactaccatcgttataaggaagatgtggacttgattaaggacattggcatggatgcataccggttctctatctcgtggtcacgtatctttccaaatggaactggtgaacctaatgaagaaggattgaattactataacagcctcataaatactctattagacaaaggtatacaaccatatgtaacactctttcactgggaccttccgcaagcactagaagacagatatggtggatggttaaactcccaaatcgggatgattttgttcactatgcctctacttgcttcaaggaatttggagatagagtgaaacactggatcactttcaatgagccccataattttgcgattgaaggctatgaccttggcatccaggcacctgggaggtgttctattctgtctcatatattctgcagggagggcaaatcatcgactgagccttatgtcgtagctcacaacatactcttagcgcatgctggtgcctttcatacttataagcagcatttcaagaaagaacaaggaggtatcattggcattgcactcgattctaagtggtatgagccactgtcagatgttgatgaggacacagaggcagcagcacgagcaatggactttgagcttggatggttcctggatcccttaatgtttggccactatcctccttctatgcagaaacttgtgggcgacaggctgcctcagttttcagctcgggcttcgatgttagtgtcaggctcactagattttgtgggcataaaccattacaccacactgtatgttaggaacgacagaatgcggatcaggaaacttgtaatgaatgatgcttcaactgatgctgcggtcatacctactgcttatagacatggaaagaaaataggagaaacggcagcgtcaggatggctgcacatagtgccctggggcatgttcaagctgatgaagcacatcaaagaaaagtacgggaatccgcccgtgatcattactgaaaacggcatggatgatgcgaacaaccggttttcgaaattagaggatgatctgcaggatgataaacggatacagtaccacaaggactacatgtctaacctcctagacgcaattaggaaggaaggctgcaacgtccatggctacttcgtctggtcgctgctcgacaactgggagtggaactccgggtacacggtgcggtttgggctctactacatcgactacaacaacaatttgacacggatacccaaggcgtccgtggagtggttcaggcaggtcttggcccagaagacggctggtttggagtacagtggttctacagtggccagtagttgagtgtatataacatacacggcacggctaccatcgatctgtacatgcgtacgtagctttagattagattgtgattattctcgatgtatatagactcaccatttggacgaccttcaaccgcacagttgaatgtgtcgttatgcttgctacaaattggttgattggtgctaaagaaatcagtgaggggtgctcggttctactactaaatgtcatatcggaaattaaataccaattataaatattaaatatattttaattacaaattaattatacaaaa

SEQ ID NO: 53470 - DNA, 2088 bp, Zea Mays
ggacgacaggacgaggacggcggggtcaaggctctctttctctctccctccctctctgcgtgtctcctcgcacgctacgcgaggccacgcgagattgcttgggagatgcgtgcccgcctccagattccccgttccagcgccgaggcgcgcaagctacgcgacggttgctgaggtttcggagctagacatgtcaagtagtttccttcggttgttgattaatttgcccactgtgatagagattttgcaccttgtggcctccacaagagttacttagtagagacgcacgttggaagggcttccaagacaagtgaagctcactagctcagcgttcagttgcttcccacgcttcaccaactgaacaagcttcgctgcttgtgctgaagctctaaggagagcagacttccctcaaggtttcgtctttggcactgcttcttcagcttaccagtatgaaggtgctgtcaacgagggtcaacgtggacctacaatatgggatactctcacaagacgacccggacgggtgatagatttcagcaatgcagatgttgccgttgatcactaccatcgttataagatgtggacttgattaaggacattggcatggatgcataccggttctctatctcgtggtcacgtatctttccaaatggaactggtgaacctaatgaagaaggattgaattactataacagcctcataaatactctattagacaaaggtatacaaccatatgtaacactctttcactgggaccttccgcaagcactagaagacagatatggtggatggttaaactcccaaatcgtggatgattttgttcactatgcctctacttgcttcaaggaatttggagatagagtgaaacactggatcactttcaatgagccccataattttgcgattgaaggctatgaccttggcatccaggcacctgggaggtgttctattctgtctcatatattctgcagggagggcaaatcatcgactgagccttatgtcgtagctcacaacatactcttagcgcatgctggtgcctttcatacttataagcagcatttcaagaaagaacaaggaggtatcattggcattgcactcgattctaagtggtatgagccactgtcagatgttgatgaggacacagaggcagcagcacgagcaatggactttgagcttggatgaaacttgtgggcgacaggctgcctcagttttcagctcgggcttcgatgttagtgtcaggctcactagattttgtgggcataaaccattacaccacactgtatgttaggaacgacagaatgcggatcaggaaacttgtaatgaatgatgcttcaactgatgctgcggtcatacctactgcttatagacatggaaagaaaataggagaaacggcagcgtcaggatggctgcacatagtgccctggggcatgttcaagctgatgaagcacatcaaagaaaagtacgggaatccgcccgtgatcattactgaaaacggcatggatgatgcgaacaaccggttttcgaaattagaggatgatctgcaggatgataaacggatacagtaccacaaggactacatgtctaacctcctagacgcaattaggaaggaaggctgcaacgtccatggctacttcgtctggtcgctgctcgacaactgggagtggaactccgggtacacggtgcggtttgggctctactacatcgactacaacaacaatttgacacggatacccaaggcgtccgtggagtggttcaggcaggtcttggcccagaagacggctggtttggagtacagtggttctacagtggccagtagttgagtgtatataacatacacggcacggctaccatcgatctgtacatgcgtacgtagctttagattagattgtgattattctcgatgtatatagactcaccatttggacgaccttcaaccgcacagttgaatgtgtcgttatgcttgctacaaattggttgattggtgctaaagaaatcagtgaggggtgctcggttctactactaaatgtcatatcggaaattaaataccaattataaatattaaatatattttaattacaaattaattatacaaaa

SEQ ID NO: 53471 - DNA, 2024 bp, Zea Mays
ggacgacaggacgaggacggcggggtcaaggctctctttctctctccctccctctctgcgtgtctcctcgcacgctacgcgaggccacgcgagattgcttgggagatgcgtgcccgcctccagattccccgttccagcgccgaggcgcgcaagctacgcgacggttgctgagagattttgcaccttgtggcctccacaagagttacttagtagagacgcacgttggaagggcttccaagacaagtgaagctcactagctcagcgttcagttgcttcccacgcttcaccaactgaacaagcttcgctgcttgtgctgaagctctaaggagagcagacttccctcaaggtttcgtctttggcactgcttcttcagcttaccagtatgaaggtgctgtcaacgagggtcaacgtggacctacaatatgggatactctcacaagacgacccggacgggtgatagatttcagcaatgcagatgttgccgttgatcactaccatcgttataagatgtggacttgattaaggacattggcatggatgcataccggttctctatctcgtggtcacgtatctttccaaatggaactggtgaacctaatgaagaaggattgaattactataacagcctcataaatactctattagacaaaggtatacaaccatatgtaacactctttcactgggaccttccgcaagcactagaagacagatatggtggatggttaaactcccaaatcgtggatgattttgttcactatgcctctacttgcttcaaggaatttggagatagagtgaaacactggatcactttcaatgagccccataattttgcgattgaaggctatgaccttggcatccaggcacctgggaggtgttctattctgtctcatatattctgcagggagggcaaatcatcgactgagccttatgtcgtagctcacaacatactcttagcgcatgctggtgcctttcatacttataagcagcatttcaagaaagaacaaggaggtatcattggcattgcactcgattctaagtggtatgagccactgtcagatgttgatgaggacacagaggcagcagcacgagcaatggactttgagcttggatgaaacttgtgggcgacaggctgcctcagttttcagctcgggcttcgatgttagtgtcaggctcactagattttgtgggcataaaccattacaccacactgtatgttaggaacgacagaatgcggatcaggaaacttgtaatgaatgatgcttcaactgatgctgcggtcatacctactgcttatagacatggaaagaaaataggagaaacggcagcgtcaggatggctgcacatagtgccctggggcatgttcaagctgatgaagcacatcaaagaaaagtacgggaatccgcccgtgatcattactgaaaacggcatggatgatgcgaacaaccggttttcgaaattagaggatgatctgcaggatgataaacggatacagtaccacaaggactacatgtctaacctcctagacgcaattaggaaggaaggctgcaacgtccatggctacttcgtctggtcgctgctcgacaactgggagtggaactccgggtacacggtgcggtttgggctctactacatcgactacaacaacaatttgacacggatacccaaggcgtccgtggagtggttcaggcaggtcttggcccagaagacggctggtttggagtacagtggttctacagtggccagtagttgagtgtatataacatacacggcacggctaccatcgatctgtacatgcgtacgtagctttagattagattgtgattattctcgatgtatatagactcaccatttggacgaccttcaaccgcacagttgaatgtgtcgttatgcttgctacaaattggttgattggtgctaaagaaatcagtgaggggtgctcggttctactactaaatgtcatatcggaaattaaataccaattataaatattaaatatattttaattacaaattaattatacaaaa

SEQ ID NO: 53472 - DNA, 1822 bp, Zea Mays
ggacgacaggacgaggacggcggggtcaaggctctctttctctctccctccctctctgcgtgtctcctcgcacgctacgcgaggccacgcgagattgcttgggagatgcgtgcccgcctccagattccccgttccagcgccgaggcgcgcaagctacgcgacggttgctgagcttcgctgcttgtgctgaagctctaaggagagcagacttccctcaaggtttcgtctttggcactgcttcttcagcttaccaggtgctgtcaacgagggtcaacgtggacctacaatatgggatactctcacaagacgacccggacgggtgatagatttcagcaatgcagatgttgccgttgatcactaccatcgttataaggaagatgtggacttgattaaggacattggcatggatgcataccggttctctatctcgtggtcacgtatctttccaagtatacaaccatatgtaacactctttcactgggaccttccgcaagcactagaagacagatatggtggatggttaaactcccaaatcgtggatgattttgttcactatgcctctacttgcttcaaggaatttggagatagagtgaaacactggatcactttcaatgagccccataattttgcgattgaaggctatgaccttggcatccaggcacctgggaggtgttctattctgtctcatatattctgcagggagggcaaatcatcgactgagccttatgtcgtagctcacaacatactcttagcgcatgctggtgcctttcatacttataagcagcatttcaagaaagaacaaggaggtatcattggcattgcactcgattctaagtggtatgagccactgtcagatgttgatgaggacacagaggcagcagcacgagcaatggactttgagcttggatgaaacttgtgggcgacaggctgcctcagttttcagctcgggcttcgatgttagtgtcaggctcactagattttgtgggcataaaccattacaccacactgtatgttaggaacgacagaatgcggatcaggaaacttgtaatgaatgatgcttcaactgatgctgcggtcatacctactgcttatagacatggaaagaaaataggagaaacggcagcgtcaggatggctgcacatagtgccctggggcatgttcaagctgatgaagcacatcaaagaaaagtacgggaatccgcccgtgatcattactgaaaacggcatggatgatgcgaacaaccggttttcgaaattagaggatgatctgcaggatgataaacggatacagtaccacaaggactacatgtctaacctcctagacgcaattaggaaggaaggctgcaacgtccatggctacttcgtctggtcgctgctcgacaactgggagtggaactccgggtacacggtgcggtttgggctctactacatcgactacaacaacaatttgacacggatacccaaggcgtccgtggagtggttcaggcaggtcttggcccagaagacggctggtttggagtacagtggttctacagtggccagtagttgagtgtatataacatacacggcacggctaccatcgatctgtacatgcgtacgtagctttagattagattgtgattattctcgatgtatatagactcaccatttggacgaccttcaaccgcacagttgaatgtgtcgttatgcttgctacaaattggttgattggtgctaaagaaatcagtgaggggtgctcggttctactactaaatgtcatatcggaaattaaataccaattataaatattaaatatattttaattacaaattaattatacaaaa

SEQ ID NO: 53473 - DNA, 2092 bp, Zea Mays
ggacgacaggacgaggacggcggggtcaaggctctctttctctctccctccctctctgcgtgtctcctcgcacgctacgcgaggccacgcgagattgcttgggagatgcgtgcccgcctccagattccccgttccagcgccgaggcgcgcaagctacgcgacggttgctgaggtttcggagctagacatgtcaagtagtttccttcggttgttgattaatttgcccactgtgatagagattttgcaccttgtggcctccacaagagttacttagtagagacgcacgttggaagggcttccaagacaagtgaagctcactagctcagcgttcagttgcttcccacgcttcaccaactgaacaagcttcgctgcttgtgctgaagctctaaggagagcagacttccctcaaggtttcgtctttggcactgcttcttcagcttaccagtatgaaggtgctgtcaacgagggtcaacgtggacctacaatatgggatactctcacaagacgacccggacgggtgatagatttcagcaatgcagatgttgccgttgatcactaccatcgttataaggaagatgtggacttgattaaggacattggcatggatgcataccggttctctatctcgtggtcacgtatctttccaaatggaactggtgaacctaatgaagaaggattgaattactataacagcctcataaatactctattagacaaaggtatacaaccatatgtaacactctttcactgggaccttccgcaagcactagaagacagatatggtggatggttaaactcccaaatcgtggatgattttgttcactatgcctctacttgcttcaaggaatttggagatagagtgaaacactggatcactttcaatgagccccataattttgcgattgaaggctatgaccttggcatccaggcacctgggaggtgttctattctgtctcatatattctgcagggagggcaaatcatcgactgagccttatgtcgtagctcacaacatactcttagcgcatgctggtgcctttcatacttataagcagcatttcaagaaagaacaaggaggtatcattggcattgcactcgattctaagtggtatgagccactgtcagatgttgatgaggacacagaggcagcagcacgagcaatggactttgagcttggatgaaacttgtgggcgacaggctgcctcagttttcagctcgggcttcgatgttagtgtcaggctcactagattttgtgggcataaaccattacaccacactgtatgttaggaacgacagaatgcggatcaggaaacttgtaatgaatgatgcttcaactgatgctgcggtcatacctactgcttatagacatggaaagaaaataggagaaacggcagcgtcaggatggctgcacatagtgccctggggcatgttcaagctgatgaagcacatcaaagaaaagtacgggaatccgcccgtgatcattactgaaaacggcatggatgatgcgaacaaccggttttcgaaattagaggatgatctgcaggatgataaacggatacagtaccacaaggactacatgtctaacctcctagacgcaattaggaaggaaggctgcaacgtccatggctacttcgtctggtcgctgctcgacaactgggagtggaactccgggtacacggtgcggtttgggctctactacatcgactacaacaacaatttgacacggatacccaaggcgtccgtggagtggttcaggcaggtcttggcccagaagacggctggtttggagtacagtggttctacagtggccagtagttgagtgtatataacatacacggcacggctaccatcgatctgtacatgcgtacgtagctttagattagattgtgattattctcgatgtatatagactcaccatttggacgaccttcaaccgcacagttgaatgtgtcgttatgcttgctacaaattggttgattggtgctaaagaaatcagtgaggggtgctcggttctactactaaatgtcatatcggaaattaaataccaattataaatattaaatatattttaattacaaattaattatacaaaa

SEQ ID NO: 53474 - DNA, 1901 bp, Zea Mays
ggacgacaggacgaggacggcggggtcaaggctctctttctctctccctccctctctgcgtgtctcctcgcacgctacgcgaggccacgcgagattgcttgggagatgcgtgcccgcctccagattccccgttccagcgccgaggcgcgcaagctacgcgacggttgctgagcttcgctgcttgtgctgaagctctaaggagagcagacttccctcaaggtttcgtctttggcactgcttcttcagcttaccagtatgaaggtgctgtcaacgagggtcaacgtggacctacaatatgggatactctcacaagacgacccggacgggtgatagatttcagcaatgcagatgttgccgttgatcactaccatcgttataaggaagatgtggacttgattaaggacattggcatggatgcataccggttctctatctcgtggtcacgtatctttccaaatggaactggtgaacctaatgaagaaggattgaattactataacagcctcataaatactctattagacaaaggtatacaaccatatgtaacactctttcactgggaccttccgcaagcactagaagacagatatggtggatggttaaactcccaaatcgtggatgattttgttcactatgcctctacttgcttcaaggaatttggagatagagtgaaacactggatcactttcaatgagccccataattttgcgattgaaggctatgaccttggcatccaggcacctgggaggtgttctattctgtctcatatattctgcagggagggcaaatcatcgactgagccttatgtcgtagctcacaacatactcttagcgcatgctggtgcctttcatacttataagcagcatttcaagaaagaacaaggaggtatcattggcattgcactcgattctaagtggtatgagccactgtcagatgttgatgaggacacagaggcagcagcacgagcaatggactttgagcttggatgaaacttgtgggcgacaggctgcctcagttttcagctcgggcttcgatgttagtgtcaggctcactagattttgtgggcataaaccattacaccacactgtatgttaggaacgacagaatgcggatcaggaaacttgtaatgaatgatgcttcaactgatgctgcggtcatacctactgcttatagacatggaaagaaaataggagaaacggcagcgtcaggatggctgcacatagtgccctggggcatgttcaagctgatgaagcacatcaaagaaaagtacgggaatccgcccgtgatcattactgaaaacggcatggatgatgcgaacaaccggttttcgaaattagaggatgatctgcaggatgataaacggatacagtaccacaaggactacatgtctaacctcctagacgcaattaggaaggaaggctgcaacgtccatggctacttcgtctggtcgctgctcgacaactgggagtggaactccgggtacacggtgcggtttgggctctactacatcgactacaacaacaatttgacacggatacccaaggcgtccgtggagtggttcaggcaggtcttggcccagaagacggctggtttggagtacagtggttctacagtggccagtagttgagtgtatataacatacacggcacggctaccatcgatctgtacatgcgtacgtagctttagattagattgtgattattctcgatgtatatagactcaccatttggacgaccttcaaccgcacagttgaatgtgtcgttatgcttgctacaaattggttgattggtgctaaagaaatcagtgaggggtgctcggttctactactaaatgtcatatcggaaattaaataccaattataaatattaaatatattttaattacaaattaattatacaaaa

SEQ ID NO: 53475 - DNA, 2215 bp, Zea Mays
gttgggcctcgtcactaaatgagacaggcctcaggtgaggcacagatgggcctggaagacgcttaggtgatccagtgaggcccatgggtgctcgttctaccgccgtgagaggctacaggctagggcctcggctccacgagcgagctccgcacgcatcagctgatcagcatcactgcatcagctatcaggacgacaggacgaggacggcggggtcaaggctctctttctctctccctccctctctgcgtgtctcctcgcacgctacgcgaggccacgcgagattgcttgggagatgcgtgcccgcctccagattccccgttccagcgccgaggcgcgcaagctacgcgacggttgctgagagattttgcaccttgtggcctccacaagagttacttagtagagacgcacgttggaagggcttccaagacaagtgaagctcactagctcagcgttcagttgcttcccacgcttcaccaactgaacaagcttcgctgcttgtgctgaagctctaaggagagcagacttccctcaaggtttcgtctttggcactgcttcttcagcttaccagtatgaaggtgctgtcaacgagggtcaacgtggacctacaatatgggatactctcacaagacgacccggacgggtgatagatttcagcaatgcagatgttgccgttgatcactaccatcgttataaggaagatgtggacttgattaaggacattggcatggatgcataccggttctctatctcgtggtcacgtatctttccaaatggaactggtgaacctaatgaagaaggattgaattactataacagcctcataaatactctattagacaaaggtatacaaccatatgtaacactctttcactgggaccttccgcaagcactagaagacagatatggtggatggttaaactcccaaatcgtggatgattttgttcactatgcctctacttgcttcaaggaatttggagatagagtgaaacactggatcactttcaatgagccccataattttgcgattgaaggctatgaccttggcatccaggcacctgggaggtgttctattctgtctcatatattctgcagggagggcaaatcatcgactgagccttatgtcgtagctcacaacatactcttagcgcatgctggtgcctttcatacttataagcagcatttcaagaaagaacaaggaggtatcattggcattgcactcgattctaagtggtatgagccactgtcagatgttgatgaggacacagaggcagcagcacgagcaatggactttgagcttggatgaaacttgtgggcgacaggctgcctcagttttcagctcgggcttcgatgttagtgtcaggctcactagattttgtgggcataaaccattacaccacactgtatgttaggaacgacagaatgcggatcaggaaacttgtaatgaatgatgcttcaactgatgctgcggtcatacctactgcttatagacatggaaagaaaataggagaaacggcagcgtcaggatggctgcacatagtgccctggggcatgttcaagctgatgaagcacatcaaagaaaagtacgggaatccgcccgtgatcattactgaaaacggcatggatgatgcgaacaaccggttttcgaaattagaggatgatctgcaggatgataaacggatacagtaccacaaggactacatgtctaacctcctagacgcaattaggaaggaaggctgcaacgtccatggctacttcgtctggtcgctgctcgacaactgggagtggaactccgggtacacggtgcggtttgggctctactacatcgactacaacaacaatttgacacggatacccaaggcgtccgtggagtggttcaggcaggtcttggcccagaagacggctggtttggagtacagtggttctacagtggccagtagttgagtgtatataacatacacggcacggctaccatcgatctgtacatgcgtacgtagctttagattagattgtgattattctcgatgtatatagactcaccatttggacgaccttcaaccgcacagttgaatgtgtcgttatgcttgctacaaattggttgattggtgctaaagaaatcagtgaggggtgctcggttctactactaaatgtcatatcggaaattaaataccaattataaatattaaatatattttaattacaaattaattatacaaaa

SEQ ID NO: 53476 - DNA, 2003 bp, Zea Mays
ctacaggatccagggctcctctttatgtttgaaaaggtttatcctcatccgattcttatcagttgggaattttccaggcacaagtacatacaggtttcggagctagacatgtcaagtagtttccttcggttgttgattaatttgcccactgtgatagagattttgcaccttgtggcctccacaagagttacttagtagagacgcacgttggaagggcttccaagacaagtgaagctcactagctcagcgttcagttgcttcccacgcttcaccaactgaacaagcttcgctgcttgtgctgaagctctaaggagagcagacttccctcaaggtttcgtctttggcactgcttcttcagcttaccagtatgaaggtgctgtcaacgagggtcaacgtggacctacaatatgggatactctcacaagacgacccggacgggtgatagatttcagcaatgcagatgttgccgttgatcactaccatcgttataaggaagatgtggacttgattaaggacattggcatggatgcataccggttctctatctcgtggtcacgtatctttccaaatggaactggtgaacctaatgaagaaggattgaattactataacagcctcataaatactctattagacaaaggtatacaaccatatgtaacactctttcactgggaccttccgcaagcactatgcctctacttgcttcaaggaatttggagatagagtgaaacactggatcactttcaatgagccccataattttgcgattgaaggctatgaccttggcatccaggcacctgggaggtgttctattctgtctcatatattctgcagggagggcaaatcatcgactgagccttatgtcgtagctcacaacatactcttagcgcatgctggtgcctttcatacttataagcagcatttcaagaaagaacaaggaggtatcattggcattgcactcgattctaagtggtatgagccactgtcagatgttgatgaggacacagaggcagcagcacgagcaatggactttgagcttggatggttcctggatcccttaatgtttggccactatcctccttctatgcagaaacttgtgggcgacaggctgcctcagttttcagctcgggcttcgatgttagtgtcaggctcactagattttgtgggcataaaccattacaccacactgtatgttaggaacgacagaatgcggatcaggaaacttgtaatgaatgatgcttcaactgatgctgcggtcatacctactgcttatagacatggaaagaaaataggagaaacggcagcgtcaggatggctgcacatagtgccctggggcatgttcaagctgatgaagcacatcaaagaaaagtacgggaatccgcccgtgatcattactgaaaacggcatggatgatgcgaacaaccggttttcgaaattagaggatgatctgcaggatgataaacggatacagtaccacaaggactacatgtctaacctcctagacgcaattaggaaggaaggctgcaacgtccatggctacttcgtctggtcgctgctcgacaactgggagtggaactccgggtacacggtgcggtttgggctctactacatcgactacaacaacaatttgacacggatacccaaggcgtccgtggagtggttcaggcaggtcttggcccagaagacggctggtttggagtacagtggttctacagtggccagtagttgagtgtatataacatacacggcacggctaccatcgatctgtacatgcgtacgtagctttagattagattgtgattattctcgatgtatatagactcaccatttggacgaccttcaaccgcacagttgaatgtgtcgttatgcttgctacaaattggttgattggtgctaaagaaatcagtgaggggtgctcggttctactactaaatgtcatatcggaaattaaataccaattataaatattaaatatattttaattacaaattaattatacaaaa

SEQ ID NO: 53477 - DNA, 443 bp, Zea Mays
cgtcaacgcaaacagaccaagatccagaagcaagaaagtgtttatagcctagccggtgcgcgcgcgagagggatagccgattatcatcaagctctgagctagcagagaagatgagcgcatcgtcgtccatgaccaagaaggcgtcgtcgttcgtggtggcggcgagcatgagcgcggtggaggcccaggcgatcggaggaggagaagatgcacaaggcgtaccacctcgtctgctggggccctaactaattgttaggggcattctcttattaattactcctttatacacgctgtccgattcctccacttcttgttcgtacacatacagagatgtatctgcaaattttgtatgtgtaatccgtcctctggtggtttatgccacgagaattgcttattattgttgggtgataaacaaatggaaatgagaaattttgtgatgtgat

SEQ ID NO: 53478 - DNA, 2523 bp, Zea Mays
attagccttactccattacaccctggcacaactaacagaccaaattgcacgaataagtgttgagataaaaaacttaaaagcggaaaggaatgccatggagtctcagttagctcgagaggaagaaagcttgaggagatgttctgataggttgaaggaaatggaaagcaagaatagtaagctactccaagcattacgaagtgctggtgctgataaaattattgaagcataccactgggtgcaagctaacaaaaagaatctcaggcaagaagtttacgggcctgttctccttgaggtaaatgttcaggataagcttcatgccacttacttggaagaccatgttccaaactatttatggaagtcattcatcactctggatgcttcggaccgtgactacattgctagagaaatgaagcagtatggcattcctgttctgaactacttagtgcgcgaaggcacaaggagacggccattaaacatcactccagagatggagcaacttgggatctactcccgacttgatcaagtatttcaagcccctgacactgtgaaagatgttttgattagtcaggcgggtttggatgattcgtacataggtacagatgaaactcatcgcagagcagatgaggtgtcaaagctaggcatctatgacttttggactccggataatcattatcgatggtccaaatcaagatatagtggttatatgtcagcatttgtagatgcaatccatccttctcgtctcttcaagagcaatctggatgtaagcggcattgaagatcttcgacttcagaaagaagaccatgtaacaaatattgaaggaatgcgtgaagctataaagacgcttcatagaaaacagagacagttagaagacgaagaggcaaatatacacaggcagaaggaagaaattattaatgcgatgagataccacaagaagacacgagaagagatacaaagacgtgttgatatcaaaaagcgaatactgaaggacatatccagagaagacgatgtagaatccagcacgagaaagcttgttaatcaggttgctaagataaatgatgagaggtttcatgcaatgataaaacttaaggatttgcttactgaagctgttgctctcaaatggagtcacacagaaaagaatatgactttaattgagctcgatacaaagatatgggagatggaaaagggtgtgaaaaaacttgaaaaggatgctaatcaggcggctagaaactacgaagattgtagaagaatcactcaggagcataggcggaggctgtctattgcaaaacagaatgcagagtcgatagccatgattactaaagaccttgaaaaagagttttgtgcgatgcccactaccttagaagagctcgaaactgcaatacaagatactgaatcagaggcaaattctatgctatttcttaaccaaaatgttttgcaggagtatcaaaaccggcaacatgagatagaatcaatctcaaataaacttaaggatgataagggtgaacatgagatctgctgttctgaaatcgaaacagtaaagggtaaatggcttccgactctgcggattcttgtttcaaaaataaacgacacattcagtcgtaactttcaagaaatggcagtcgctggagaagtttcactggatgagcacggtattgattttgatcactatggtattcttataaaggtgaaatttaggcaaactagtcagctgcaggtgctaagctctcatcaccaatctggaggggagcgatctgtatcgaccatcttgtatcttgtgtcacttcaagatcttaccaactgcccttttcgggttgttgatgagataaatcaaggaatggaccccataaacgagaggaaaatgtttcagcagcttgtcagagctgccagccaaattaacacgccgcagtgcttccttctgacgcccaagctcctacctgatctggagtacagcgatgcctgcagcattctcaacattatgaacggcccatggattgaggagccagcaaaagcttggagctccggtgattgttggaggacagtggtcagcgcagctggacactgagcgccgagtattttgccttggaccgtaggaggcttgtaaagtttagcgtgtagagctggatgcagcttttgggtggttaatttaagtttgtagttgtactacatgtaagtttaggaaagttaaggtagctggtggcattatcaatgtggaaccagatgttgagctgctcaaatcacttggcagcccttttgacacgggagggtaaggtactgtggaatgatccctaccctgtaccggccagtattcctggaagtgaccagtttacttaagtaattgttttgcagcggaaaagcagcaggcatgcaatgtctgtctacttgctgtgacaagtctgactcctttagggctttagtacttttgttaggagtagagatggaaggggattaaattaattggtagtaaaaaatgaataggaacggatttaatctcaatctccttcgattcaatgcaagggtgctgtttgg

SEQ ID NO: 53479 - DNA, 3698 bp, Zea Mays
aaacccgcccaatacccaaacccctccgctctacaatagccgaaaccctagcggccttgcgccggccatggcggcaccgcgcgccaccaagcgccccaagtttgcctccggcgcggcgccgccccagcgaggggaggacgactacgtgccggggaacatagtagagattgagctcttcaacttcatgacctacgaccgcctcgtctgctgccccggcccgcgcctcaacctcgtcgtcgggcccaacgggtctgggaagagctcgctcgtctgcgccatcgccctcggtctcgccggagaccccagcattctcgggagggcgtccagcgtgggtgcatttgtcaagagaggggaggttgccgggcacgtcaagatatctctccgcggggatacagctgacgacaagatctgcgttactaggaaaattgatacgaagaacaagtccgagtggctcctcaacggtgcaactgtcacaaaaaaggaagttattgacgtgattaagaaattcaatattcaagttaacaacttaactcagttcttgccacaagaccgggtatctgaatttgcaaagctaagtcccattcaacttctagaagagactgaaaaggctgttggtgaccctgatttacctattcagcatcgccaacttgtagagagaagtaaggaactgaaagcgtttgaagtggctataaggcaaaacgaacagactttgaataatttgaaggccctcaatgctgaacaagaaagagatgttgagcgtgttcgactaagagataatctccttagaaaggctgaatcaatgaagaagaaggtgccatggctgaaatacgacatgatgaagaaggaattcatagaagtgatacaagagaaggagaaaattgcaaagcaagaaatggaagaagcagctagagtctgggaagattcaaaaggccctattgacaaactcaagaaacacaaggcaactcatacttcaaatataaagaagataagcggccaagtaaatcaaaacatggacaaccgtcataaagttatggaccacgatttaaagctgaactgaaagctacatttgatgaaatggatgacctgaaaaagcaagaaaaatctcgccagcgaaggatcctgaaaactaaggaagatcttgctgctgctgaaaaggaacttgaagatctacagccttatgaacttcctaaagctgaaatggcacaactaacagaccaaattgcacgaataagtgttgagataaaaaacttaaaagcggaaaggaatgccatggagtctcagttagctcgagaggaagaaagcttgaggagatgttctgataggttgaaggaaatggaaagcaagaatagtaagctactccaagcattacgaagtgctggtgctgataaaattattgaagcataccactgggtgcaagctaacaaaaagaatctcaggcaagaagtttacgggcctgttctccttgaggtaaatgttcaggataagcttcatgccacttacttggaagaccatgttccaaactatttatggaagtcattcatcactctggatgcttcggaccgtgactacattgctagagaaatgaagcagtatggcattcctgttctgaactacttagtgcgcgaaggcacaaggagacggccattaaacatcactccagagatggagcaacttgggatctactcccgacttgatcaagtatttcaagcccctgacactgtgaaagatgttttgattagtcaggcgggtttggatgattcgtacataggtacagatgaaactcatcgcagagcagatgaggtgtcaaagctaggcatctatgacttttggactccggataatcattatcgatggtccaaatcaagatatagtggttatatgtcagcatttgtagatgcaatccatccttctcgtctcttcaagagcaatctggatgtaagcggcattgaagatcttcgacttcagaaagaagaccatgtaacaaatattgaaggaatgcgtgaagctataaagacgcttcatagaaaacagagacagttagaagacgaagaggcaaatatacacaggcagaaggaagaaattattaatgcgatgagataccacaagaagacacgagaagagatacaaagacgtgttgatatcaaaaagcgaatactgaaggacatatccagagaagacgatgtagaatccagcacgagaaagcttgttaatcaggttgctaagataaatgatgagaggtttcatgcaatgataaaacttaaggatttgcttactgaagctgttgctctcaaatggagtcacacagaaaagaatatgactttaattgagctcgatacaaagatatgggagatggaaaagggtgtgaaaaaacttgaaaaggatgctaatcaggcggctagaaactacgaagattgtagaagaatcactcaggagcataggcggaggctgtctattgcaaaacagaatgcagagtcgatagccatgattactaaagaccttgaaaaagagttttgtgcgatgcccactaccttagaagagctcgaaactgcaatacaagatactgaatcagaggcaaattctatgctatttcttaaccaaaatgttttgcaggagtatcaaaaccggcaacatgagatagaatcaatctcaaataaacttaaggatgataagggtgaacatgagatctgctgttctgaaatcgaaacagtaaagggtaaatggcttccgactctgcggattcttgtttcaaaaataaacgacacattcagtcgtaactttcaagaaatggcagtcgctggagaagtttcactggatgagcacggtattgattttgatcactatggtattcttataaaggtgaaatttaggcaaactagtcagctgcaggtgctaagctctcatcaccaatctggaggggagcgatctgtatcgaccatcttgtatcttgtgtcacttcaagatcttaccaactgcccttttcgggttgttgatgagataaatcaaggaatggaccccataaacgagaggaaaatgtttcagcagcttgtcagagctgccagccaaattaacacgccgcagtgcttccttctgacgcccaagctcctacctgatctggagtacagcgatgcctgcagcattctcaacattatgaacggcccatggattgaggagccagcaaaagcttggagctccggtgattgttggaggacagtggtcagcgcagctggacactgagcgccgagtattttgccttggaccgtaggaggcttgtaaagtttagcgtgtagagctggatgcagcttttgggtggttaatttaagtttgtagttgtactacatgtaagtttaggaaagttaaggtagctggtggcattatcaatgtggaaccagatgttgagctgctcaaatcacttggcagcccttttgacacgggagggtaaggtactgtggaatgatccctaccctgtaccggccagtattcctggaagtgaccagtttacttaagtaattgttttgcagcggaaaagcagcaggcatgcaatgtctgtctacttgctgtgacaagtctgactcctttagggctttagtacttttgttaggagtagagatggaaggggattaaattaattggtagtaaaaaatgaataggaacggatttaatctcaatctccttcgattcaatgcaagggtgctgtttgg

SEQ ID NO: 53480 - DNA, 3740 bp, Zea Mays
cttttttctgttgcctcccattttggctaccttctccccaaacccgcccaatacccaaacccctccgctctacaatagccgaaaccctagcggccttgcgccggccatggcggcaccgcgcgccaccaagcgccccaagtttgcctccggcgcggcgccgccccagcgaggggaggacgactacgtgccggggaacatagtagagattgagctcttcaacttcatgacctacgaccgcctcgtctgctgccccggcccgcgcctcaacctcgtcgtcgggcccaacgggtctgggaagagctcgctcgtctgcgccatcgccctcggtctcgccggagaccccagcattctcgggagggcgtccagcgtgggtgcatttgtcaagagaggggaggttgccgggcacgtcaagatatctctccgcggggatacagctgacgacaagatctgcgttactaggaaaattgatacgaagaacaagtccgagtggctcctcaacggtgcaactgtcacaaaaaaggaagttattgacgtgattaagaaattcaatattcaagttaacaacttaactcagttcttgccacaagaccgggtatctgaatttgcaaagctaagtcccattcaacttctagaagagactgaaaaggctgttggtgaccctgatttacctattcagcatcgccaacttgtagagagaagtaaggaactgaaagcgtttgaagtggctataaggcaaaacgaacagactttgaataatttgaaggccctcaatgctgaacaagaaagagatgttgagcgtgttcgactaagagataatctccttagaaaggctgaatcaatgaagaagaaggtgccatggctgaaatacgacatgatgaagaaggaattcatagaagtgatacaagagaaggagaaaattgcaaagcaagaaatggaagaagcagctagagtctgggaagattcaaaaggccctattgacaaactcaagaaacacaaggcaactcatacttcaaatataaagaagataagcggccaagtaaatcaaaacatggacaaccgtcataaagttatggaccacgatttaaagctgaatgcagaactgaaagctacatttgatgaaatggatgacctgaaaaagcaagaaaaatctcgccagcgaaggatcctgaaaactaaggaagatcttgctgctgctgaaaaggaacttgaagatctacagccttatgaacttcctaaagctgaaatggcacaactaacagaccaaattgcacgaataagtgttgagataaaaaacttaaaagcggaaaggaatgccatggagtctcagttagctcgagaggaagaaagcttgaggagatgttctgataggttgaaggaaatggaaagcaagaatagtaagctactccaagcattacgaagtgctggtgctgataaaattattgaagcataccactgggtgcaagctaacaaaaagaatctcaggcaagaagtttacgggcctgttctccttgaggtaaatgttcaggataagcttcatgccacttacttggaagaccatgttccaaactatttatggaagtcattcatcactctggatgcttcggaccgtgactacattgctagagaaatgaagcagtatggcattcctgttctgaactacttagtgcgcgaaggcacaaggagacggccattaaacatcactccagagatggagcaacttgggatctactcccgacttgatcaagtatttcaagcccctgacactgtgaaagatgttttgattagtcaggcgggtttggatgattcgtacataggtacagatgaaactcatcgcagagcagatgaggtgtcaaagctaggcatctatgacttttggactccggataatcattatcgatggtccaaatcaagatatagtggttatatgtcagcatttgtagatgcaatccatccttctcgtctcttcaagagcaatctggatgtaagcggcattgaagatcttcgacttcagaaagaagaccatgtaacaaatattgaaggaatgcgtgaagctataaagacgcttcatagaaaacagagacagttagaagacgaagaggcaaatatacacaggcagaagaaattattaatgcgatgagataccacaagaagacacgagaagagatacaaagacgtgttgatatcaaaaagcgaatactgaaggacatatccagagaagacgatgtagaatccagcacgagaaagcttgttaatcaggttgctaagataaatgatgagaggtttcatgcaatgataaaacttaaggatttgcttactgaagctgttgctctcaaatggagtcacacagaaaagaatatgactttaattgagctcgatacaaagatatgggagatggaaaagggtgtgaaaaaacttgaaaaggatgctaatcaggcggctagaaactacgaagattgtagaagaatcactcaggagcataggcggaggctgtctattgcaaaacagaatgcagagtcgatagccatgattactaaagaccttgaaaaagagttttgtgcgatgcccactaccttagaagagctcgaaactgcaatacaagatactgaatcagaggcaaattctatgctatttcttaaccaaaatgttttgcaggagtatcaaaaccggcaacatgagatagaatcaatctcaaataaacttaaggatgataagggtgaacatgagatctgctgttctgaaatcgaaacagtaaagggtaaatggcttccgactctgcggattcttgtttcaaaaataaacgacacattcagtcgtaactttcaagaaatggcagtcgctggagaagtttcactggatgagcacggtattgattttgatcactatggtattcttataaaggtgaaatttaggcaaactagtcagctgcaggtgctaagctctcatcaccaatctggaggggagcgatctgtatcgaccatcttgtatcttgtgtcacttcaagatcttaccaactgcccttttcgggttgttgatgagataaatcaaggaatggaccccataaacgagaggaaaatgtttcagcagcttgtcagagctgccagccaaattaacacgccgcagtgcttccttctgacgcccaagctcctacctgatctggagtacagcgatgcctgcagcattctcaacattatgaacggcccatggattgaggagccagcaaaagcttggagctccggtgattgttggaggacagtggtcagcgcagctggacactgagcgccgagtattttgccttggaccgtaggaggcttgtaaagtttagcgtgtagagctggatgcagcttttgggtggttaatttaagtttgtagttgtactacatgtaagtttaggaaagttaaggtagctggtggcattatcaatgtggaaccagatgttgagctgctcaaatcacttggcagcccttttgacacgggagggtaaggtactgtggaatgatccctaccctgtaccggccagtattcctggaagtgaccagtttacttaagtaattgttttgcagcggaaaagcagcaggcatgcaatgtctgtctacttgctgtgacaagtctgactcctttagggctttagtacttttgttaggagtagagatggaaggggattaaattaattggtagtaaaaaatgaataggaacggatttaatctcaatctccttcgattcaatgcaagggtgctgtttgg

SEQ ID NO: 53481 - DNA, 2813 bp, Zea Mays
cttttttctgttgcctcccattttggctaccttctccccaaacccgcccaatacccaaacccctccgctctacaatagccgaaaccctagcggccttgcgccggccatggcggcaccgcgcgccaccaagcgccccaagtttgcctccggcgcggcgccgccccagcgaggggaggacgactacgtgccggggaacatagtagagattgagctcttcaacttcatgacctacgaccgcctcgtctgctgccccggcccgcgcctcaacctcgtcgtcgggcccaacgggtctgggaagagctcgctcgtctgcgccatcgccctcggtctcgccggagaccccagcattctcgggagggcgtccagcgtgggtgcatttgtcaagagaggggaggttgccgggcacgtcaagatatctctccgcggggatacagctgacgacaagatctgcgttactaggaaaattgatacgaagaacaagtccgagtggctcctcaacggtgcaactgtcacaaaaaaggaagttattgacgtgattaagaaattcaatattcaagttaacaacttaactcagttcttgccacaagaccgggtatctgaatttgcaaagctaagtcccattcaacttctagaagagactgaaaaggctgttggtgaccctgatttacctattcagcatcgccaacttgtagagagaagtaaggaactgaaagcgtttgaagtggctataaggcaaaacgaacagactttgaataatttgaaggccctcaatgctgaacaagaaagagatgttgagcgtgttcgactaagagataatctccttagaaaggctgaatcaatgaagaagaaggtgccatggctgaaatacgacatgatgaagaaggaattcatagaagtgatacaagagaaggagaaaattgcaaagcaagaaatggaagaagcagctagagtctgggaagattcaaaaggccctattgacaaactcaagaaacacaaggcaactcatacttcaaatataaagaagataagcggccaagtaaatcaaaacatggacaaccgtcataaagttatggaccacgatttaaagctgaatgcagaactgaaagctacatttgatgaaatggatgacctgaaaaagcaagaaaaatctcgccagcgaaggatcctgaaaactaaggaagatcttgctgctgctgaaaaggaacttgaagatctacagccttatgaacttcctaaagctgaaatggttgaaggaaatggaaagcaagaatagtaagctactccaagcattacgaagtgctggtgctgataaaattattgaagcataccactgggtgcaagctaacaaaaagaatctcaggcaagaagtttacgggcctgttctccttgaggtaaatgttcaggataagcttcatgccacttacttggaagaccatgttccaaactatttatggaagtcattcatcactctggatgcttcggaccgtgactacattgctagagaaatgaagcagtatggcattcctgttctgaactacttagtgcgcgaaggcacaaggagacggccattaaacatcactccagagatggagcaacttgggatctactcccgacttgatcaagtatttcaagcccctgacactgtgaaagatgttttgattagtcaggcgggtttggatgattcgtacataggtacagatgaaactcatcgcagagcagatgaggtgtcaaagctaggcatctatgacttttggactccggataatcattatcgatggtccaaatcaagatatagtggttatatgtcagcatttgtagatgcaatccatccttctcgtctcttcaagagcaatctggatgtaagcggcattgaagatcttcgacttcagaaagaagaccatgtaacaaatattgaaggaatgcgtgaagctataaagacgcttcatagaaaacagagacagttagaagacgaagaggcaaatatacacaggcagaaggaagaaattattaatgcgatgagataccacaagaagacacgagaagagatacaaagacgtgttgatatcaaaaagcgaatactgaaggacatatccagagaagacgatgtagaatccagcacgagaaagcttgttaatcaggttgctaagataaatgatgagaggtttcatgcaatgataaaacttaaggatttgcttactgaagctgttgctctcaaatggagtcacacagaaaagaatatgactttaattgagctcgatacaaagatatgggagatggaaaagggtgtgaaaaaacttgaaaaggatgctaatcaggcggctagaaactacgaagattgtaaaagaatcactcaggagcataggcggaggctgtctattgcaaaacagaatgcagagtcgatagccatgattactaaagaccttgaaaaagagttttgtgcgatgcccactaccttagaagagctcgaaactgcaatacaagatactgaatcagaggcaaattctatgctatttcttaaccaaaatgttttgcaggagtatcaaaaccggcaacatgagatagaatcaatctcaaataaacttaaggatgataagggtgaacatgagatctgctgttctgaaatcgaaacagtaaagggtaaatggcttccgactctgcggattcttgtttcaaaaataaacgacacattcagtcgtaactttcaagaaatggcagtcgctggagaagtttcactggatgagcacggtattgattttgatcactatggtattcttataaaggtgaaatttagcaagggttttgatatattctat

SEQ ID NO: 53482 - DNA, 1065 bp, Zea Mays
gagcaacaggagttccgtccggcgctggagctaagcctggagggtccaaagataaagatattatcagcatccctagagaaggatcctgtcattaaacctctacgagatttagattctgaaaccctgcaggcaacaataccacatattccattatgggtgaagagcccagactacgagcgggtgagtacgtacttcttagttcttattacgctactaatcattccattgatttattcttgttacttgatggaatgtccatagtatatcggtccctttttaattaatgagtgaatgcaggtgtaagtcaactgctttgtttactcaaaccttgaggaacatctctttatagaatgtaagtcctatggacaaaatgggaccttgttcgtgttttacccaaaataaatttatgatttctttatgtttgaaactaatagaattttatctatagaataacattgtttctttgaaatttcatcttaatattagcattatgtaagccctagctccaggttgtcgccggcccgaagctcctcaacagtcgcacccacagccccatgaccaaagtggcgaggtggagggcacacacgccaccaccgcccatatccaggtcacagggaagaagggccccgcagtcgccttcgttggggtccacatgtcctccggcggctccctccggcgatggccaggtgggagaagggggagggagaggtgctagtggctaggattcagatagataagaaggaaaaatctcaaacccaagagaccttaaaaagattcttaagacaggctcaaaatgagttcggattgagaatcaaaaagattagaagcgacaatggcacagagttcaagaactctcaaattgaaggatttcttgaggaggagggcatcaagcatgagttctcttctccctgcacacctcaacaaaatgatgtagtagagaggaagaatagaactcttttggatatggcaagaaccatgcttgatgagtacaagacaccggactggttttgggcagaggcaattaacaccgcttgctactccatcaatcggctctaccttcactga

SEQ ID NO: 53483 - DNA, 1119 bp, Zea Mays
gaggggacttctccttccgagcgcaggtggagcagcccccttctcctccacgtcggccatccatgacgcccaagctctctgcgccctcttccccatggcgtgttgcagcaggcgatcaggactccctcctcccctccactcggttagagcggctactatacgagtgcgcgcacacccacgcaggtacatggaccgtccggccacacggatccatgtattcagcgtagtatgcgtcacagcttttccttctcgtggcggtacagacagacagactacagacaagacaatcaagctagcctgaggtagcacacgcatgaagaggacaggatgacattagctatgcgacatgtactaggctagccattttattttatgtgacacgaaagtaaactttagtcagtgaaccaaatacatcccaatattgtatatagccatgaagcctgtcccttcaatttgacaattgcatgttctatttttttccctttttttgagagagagtcaataatatatagggtatctatcttaaacagctggtcagctgctgtgtgtgtctggtactggtagacggtagtactgctgctactttctgtcttgacgggtctggccgattgtgtaattctgcacgcagtaaaatattctccctgcaattaattctgcgcgcgcccccagcaccagcagcgagatcttctgggggatccgagccttgatttcgtaaagcctgcgcgcatgacagagcgaggactaggagtaccctggtactactgtacgtaggactgggtatccatcgggcagccgtgtcctagactgccaatatacgcctgttgcctgctactctggaattatacggcctgacaaaataccaagcagtcgtagtgtcgtacgcgaatgcatgacaaggtcatcatcaagcccagccggctatgtgacagcactatttcgaggtacaaaaccgtagataccacttgcacataaaagctatagtggctgtcccacacctatttgcactagcattttcagtgatgtcagtgctatgagacaatggaaatcggtatttttattgttggttgttttggaaccaaaccgccagtgaaaacatcatatccactagtggttggtcaa

SEQ ID NO: 53484 - DNA, 729 bp, Zea Mays
aatacatatcagcgtaactcaaatgtttaccttcactgttatgagatacattcactattatgactgcatcgatggatctgtcaaggcatacatacaaccagacaacacgagggatctacggtctcttgcactgtattacatcacattccatcgcaagaacaaaaccatcctgctccttgcagacatcttttcacggatgtagtctagtttagatatgttaggtattatgtctacaatatttcataaactttatcaggagttatgtgcatatattatggtaatgacggtagaacaatcatgctaattatccacacccaccagcaggtatggtggcatgttatgttggcattgcatatgtttttttaattacgatctagtaatgtttttctaagtttatttgtttgtgtagagggaggtattatctagtggatggtggttattcaatttgcgaagcttacttgccaccatatcggagtcaaagatatcacttagaagattttcattgaagacgagcagaaactgtggaagaaaagttcaatttccaccactcaagtctgtgaaatatagttactatggaagtgtaaactgtggaagagacttttggacttctcaaattaaggtggcatgtgctacgaggactcctaatgtacgaaataagcagacatgtgaagattgtaattgcttgttttgctttgcacaactatatgttggaccgaggccacataggag

SEQ ID NO: 53485 - DNA, 3903 bp, Zea Mays
gtcaagtttctaaaaagcttcacacaaatatacatatttctaaaaaaattcacacgttcgacatgacgtcctctagatgccacctctctcaacactttcctgaaaccagtagacattcgtaaggaataaatcaaaatttaaatagcacattggttattaacaatagaaatctcagtgcagggcagcaatgtcttcaaaaataagaatacaagctcaaatgagaagataaaatggagtcaagtcaacacattcatatttatcaattttcacggacgatggaattgaaagtgtgaatagaagttaacttactaacattttagtgatctccacaatatgggatatagagatcaatagagaacaacataatgcatgatgcagacctaatgctcaaaggaccaacaaatgtcaaaaaagcacaacaacagagctccatcaaaatcacaaggtaagtagaatgcaactgtgtagcatttttgttaacagaaagtgtatccaaaataggaggacagtgcataaactctctagcctatgaataggtgcaaaaactccaattagaccaagaaagatcatcaatatcgtagtcaaacttttaccaactctatgtgtttgaatatttgataatgatagtgttttctttgtcatggcatgaaaaaataaaaacaaacaaacgtaaacagtaaggagccatggctagacaaaccttttgtagtaattgaaggcacatagataaataaatcacatgattgaagcaaaggttcagagaaacgtaactgaaggttacaaagctgagagagttttgaggtgttgattgtgcatccaaaattttgctagaaattcttcttaaaacaggctttgcagttccatacaaaatcctatcaagatatgtatatgcataagcagttaagcacacatgataaaattatgagggattgcaattcaaactaacagtaaaatgaatgcttaagtgatggtggaattcaacaaacatatttatgttaacaccccttcaagaaattgttatatcttcacacttagcacaattgtggctgccatgtgaggggtatcacaagaatgttttctccataatgagcagtaggtattctattgtgggtgtctatagataaacagtgtgattctatgaacaaagttcttattcagctcctgataaaggctcaaaattcatatgcagtaggtattctttggcacttatccaatttgcaaggtcacccagatggctcaacaaagaaggatgatgacctccacgaaaatgggtcgattggtctgggctctttagtccaacaaagttagtggatacctacaacacatagtgaattagtgatactcttttcctgatgctctgacaaaacacaggtgtgttgatagttggtagaacccctgcaaaaatttatttatttaacatacaacatgcaggtgcacaatgaatttgcttgatgctctgtcattttagtttgattaccagggtactaaggacttgatttgcaatgtgaaaatattgtggctagccagaaatcataaagaggtaaaccctaaacagcacatatgtttctaccttctatcaattacttactgagcacaaaggagtatattacttaccctaaactacacatacccctaatataatgttacatgttgaaaacaaaggaaaaaaccaatgtgtgccactaatagttttacctttcaatgatatgaagagagggctactcttaaataccggccagaatgtcaaagacataccataattgtaaaccttaccaaaacttgtaaacagattgtcttatatcatactgatgaatttgaatgtagaaaccataccaaaatcagggttcctacagatgcacgcgtcgtggatccacctacacgtcccagcttcgcttcacaggtgtgttgattgttggtagaacccctgccattttatacatgcacgcgggtggaggagcacttgttgcagtaggtccaatggtggacagcctgcaacagatgcattgcaattagaattggtcatgttcttgcttggtgagtggtgaggatggatatgtagatatgcaagcaaggaattaattaacgacgtaacagtacctaaagtgtatttggtggccatgttcttggcgaccttgtgttccctggtggtcatatccttcgagagctacttgaagacgaagccctctcctttgcagcggccacagaggctagtcccaccgcagtccgggcactcctctccctctacctgctcttctcgttcatcatgccgccgccgcagctgccgtgaggcggcgccggacgaggaggaatttgaaaatacaggtcttcaagctaactggatataaaagacaaactaaagaaatttgaaaagaaacacaagaagtacatgaaactattgaaggcatcatgtttttcttgaactttcaaatagcaaaacatatttcaaatggtcacacaatgagaattaatgtaaacaaattgtcttatatcatactgatgaatttgagtgtagaaaccataccaaaatcagggttcctacaaatgcacacgtcgtggatcaacctacacgtcccagcttcacttcacaggtgtgttgattgttggtagaacccctgccattttatacatgcacgcgagtggaggagcacttgttgcagtagatccaattggtggacaacctgtagcaaatgcattccaattgccacgaaagttataaattagtacaaaacatagatacgaaacgacaaacatcaatatgatatgcaaaatccatggtaaaatatcaccataacactaataccatcgcagcaagatcttgtttttagctctataaattgtgtgtttatttattccttaacttgtagctattattgtcatatggtgatgtgggcacaaagggttcctagagcaacggagaaaaatatagagcactttgttgtcaaagcgcgctataagattgagctgatggttatgcatgaccttcctgtagattaaaggaacagattatcccacaactgatggaacctgcataagagattatattgatgtcacagatttacttgatgctcatgtgaaagcactcaacaagcagagcctagaaaagtcggcatttacaatgttggaacaggaagaggttgtaataaatactttgcttaacttacatggtcgctcggttaatgagtttgttgatgcctgcaagaaggcaattggggtctacatcaaaattgagtacctcaacagaaggccaggagattatgcagaagtatacagcgacccaacaaagatcagcaaggagctcaactggacaactcaatataccgatctcaaagagagcctatcagtcgcatggagatccggcggcggcctcagatctgagaattcgaaaggggaagtcccacctgaggaggccaatggtggcgcatggcacggcgagggctgcgcgtggtcccgaatgggcggtgctggcgccagcagaggggtgcctaatccacgcacgggattgccttccatggagactgcggacgccacaacgcggacacggacgctgatgccgggcggaggcgacgatctggggcagaggggtacccaatccacacgcgagatcgggctgtcgcggacgcggatcgagggccggcgcggtgatccggggcagaggacccacgttccatggatagcggagagccggggcggggtttagggacgagcgcggagagccgagcgcagaggacgcgctttccatggagagagccggggcggggtttagggacgacatgtgggcgaggatggagaaccggagcgaggccgcggggattgcaggagagagaatggggcgaggagggcctggcgggggcattggctgtgagcacgacgcgattgcgcgagggagaggatggcagaatacgg

SEQ ID NO: 53486 - DNA, 2824 bp, Zea Mays
ataaatgggagtcaagtttctaaaaagcttcacacaaatatacatatttctaaaaaaattcacacgttcgacatgacgtcctctagatgccacctctctcaacactttcctgaaaccagtagacattcgtaaggaataaatcaaaatttaaatagcacattggttattaacaatagaaatctcagtgcagggcagcaatgtcttcaaaaataagaatacaagctcaaatgagaagataaaatggagtcaagtcaacacattcatatttatcaattttcacggacgatggaattgaaagtgtgaatagaagttaacttactaacattttagtgatctccacaatatgggatatagagatcaatagagaacaacataatgcatgatgcagacctaatgctcaaaggaccaacaaatgtcaaaaaagcacaacaacagagctccatcaaaatcacaaggtaagtagaatgcaactgtgtagcatttttgttaacagaaagtgtatccaaaataggaggacagtgcataaactctctagcctatgaataggtgcaaaaactccaattagaccaagaaagatcatcaatatcgtagtcaaacttttaccaactctatgtgtttgaatatttgataatgatagtgttttctttgtcatggcatgaaaaaataaaaacaaacaaacgtaaacagtaaggagccatggctagacaaaccttttgtagtaattgaaggcacatagataaataaatcacatgattgaagcaaaggttcagagaaacgtaactgaaggttacaaagctgagagagttttgaggtgttgattgtgcatccaaaattttgctagaaattcttcttaaaacaggctttgcagttccatacaaaatcctatcaagatatgtatatgcataagcagttaagcacacatgataaaattatgagggattgcaattcaaactaacagtaaaatgaatgcttaagtgatggtggaattcaacaaacatatttatgttaacaccccttcaagaaattgttatatcttcacacttagcacaattgtggctgccatgtgaggggtatcacaagaatgttttctccataatgagcagtaggtattctattgtgggtgtctatagataaacagtgtgattctatgaacaaagttcttattcagctcctgataaaggctcaaaattcatatgcagtaggtattctttggcacttatccaatttgcaaggtcacccagatggctcaacaaagaaggatgatgacctccacgaaaatgggtcgattggtctgggctctttagtccaacaaagttagtggatacctacaacacatagtgaattagtgatactcttttcctgatgctctgacaaaacacaggtgtgttgatagttggtagaacccctgcaaaaatttatttatttaacatacaacatgcaggtgcacaatgaatttgcttgatgctctgtcattttagtttgattaccagggtactaaggacttgatttgcaatgtgaaaatattgtggctagccagaaatcataaagaggtaaaccctaaacagcacatatgtttctaccttctatcaattacttactgagcacaaaggagtatattacttaccctaaactacacatacccctaatataatgttacatgttgaaaacaaaggaaaaaaccaatgtgtgccactaatagttttacctttcaatgatatgaagagagggctactcttaaataccggccagaatgtcaaagacataccataattgtaaaccttaccaaaacttgtaaacagattgtcttatatcatactgatgaatttgaatgtagaaaccataccaaaatcagggttcctacagatgcacgcgtcgtggatccacctacacgtcccagcttcgcttcacagattaaaggaacagattatcccacaactgatggaacctgcataagagattatattgatgtcacagatttacttgatgctcatgtgaaagcactcaacaagcagagcctagaaaagtcggcatttacaatgttggaacaggaagaggttgtaataaatactttgcttaacttacatggtcgctcggttaatgagtttgttgatgcctgcaagaaggcaattggggtctacatcaaaattgagtacctcaacagaaggccaggagattatgcagaagtatacagcgacccaacaaagatcagcaaggagctcaactggacaactcaatataccgatctcaaagagagcctatcagtcgcatggagatccggcggcggcctcagatctgagaattcgaaaggggaagtcccacctgaggaggccaatggtggcgcatggcacggcgagggctgcgcgtggtcccgaatgggcggtgctggcgccagcagaggggtgcctaatccacgcacgggattgccttccatggagactgcggacgccacaacgcggacacggacgctgatgccgggcggaggcgacgatctggggcagaggggtacccaatccacacgcgagatcgggctgtcgcggacgcggatcgagggccggcgcggtgatccggggcagaggacccacgttccatggatagcggagagccggggcggggtttagggacgagcgcggagagccgagcgcagaggacgcgctttccatggagagagccggggcggggtttagggacgacatgtgggcgaggatggagaaccggagcgaggccgcggggattgcaggagagagaatggggcgaggagggcctggcgggggcattggctgtgagcacgacgcgattgcgcgagggagaggatggcagaatacgg

SEQ ID NO: 53487 - DNA, 1695 bp, Zea Mays
gttcaatctctcaaactctatgctttgcatgtttgtgtcactacataacatgttttctttcaggttgtgaacacacatctgcagagataaaaaggagtgccatcaatggcagccacagattgggcatgaagtgtatccactatgagatcaatgtgttgctttttcgtgtttaataatttgagttataatatatggtttgcttctaatgttttttatttattttttattttggcaatgcaggggacataactcctccaacagggattaggcaggctatggagatgcaggctgaagtagaaaggagaatatgtgcccaagtccttgaatcagaagggaagaaacaagcccaagtccttgaattagaagggaagaaaactgcccagatcctttaatccgaagtttgatcatctgctttactgcagtcgagcagcggaggaacccggcgctcaggggatagccaaccgtcgtggtgcagtacaatggctggaaaggcggcggcttgattgccgtcagctacgaggctcgtggatttggtccatgcgcggagatgaggccaagagggtctgtcctggtattaatcttgttcaggtcccagtggcgcgtggcaaggctaaccttaatctttacagaagtgctggtgctgaggttgttgcaatccttgcaagcaaagggaagtgcgagcgggcatccatcgacgaagtttatcttgaccttactgatgcagcaaaggaaatgctcttacaagctcccccagattcaccagaggggatttttatggaggcggcaaagtcaaatatcttgggccttccggctgatgccagcgagaaggaaaagaatgtgagggcatggctttgtcaatcagaagctgattaccaggacaagttactggcatgtggagctataattgttgcacagttacgagtcagagttctggaggaaacccaattcacatgctctgctgggattgctcacaataagatgttagctaaacttgtcagtggaatgtacaagcctgctcagcaaacagttgtcccttcttcatcagttcaagacttactagcatcactacctgtgaaaaagatgatgatcttggggttgagacaattggtgatctcctaagttttacagaggaaaaattacaagagcagtatggagtaaatactgggtttgaccatataatatatatccctactactatataagcatggtgtgtaatgggtttggaaaaggttctagacgaacacatggtcaaagtctgcaatgatcagtacagtttgactgacaaatatactgatggttggctgtcttcagattgtagaacagctctttttaaataaacacctcaaggagtaaagctgacacccatccacgatcatcacgctgcttgtgacgatcgtcgttctctttcgtcgctaaaacgtagtgagttctctgcttcgtcgagtcacgccctcatgggctgctcgtgtttattattgtttgatctgtcagaaaaatcccacgtgtatttgtttatagatagattacactaattattaaaacgggtgaaattcattcacgctgcaaagttgtacatagtgcgttggaatttatttgaaagtaaagttgtacatagtttttgacttggtcaattatttggtccttatgggcgatgtctctggacaagtctataaattctctcgaggtggatgctag

SEQ ID NO: 53488 - DNA, 2478 bp, Zea Mays
atgggcggaggagggccgcacagtgcagaactatcagctcaatcacgtcgtcagggagcttcggaagtacagtcgcttgaaacacaccatggagatagatcggtcacacatcgttttctgctttacagctatcactttctaagattatcggattggattgctacactgggagcaatatatgatggtccaggaatccaggattactccaatgccaatgatatgcagcttgcacttgcacaaattatttcttggattagttgctcttttttgtatggtaaagattttgttgattttggaagcattgattggggaagactattgagaaatcatggcatttctgattctgaaaaggtgctcattttctttgatgaccaccaaagtgagttgaaaaggttaaagcaagcgctaaaggctggattcaggcatctcatatttgaggacaactatgatactggtacatgtgaccattatttcttgaggcatatctatgatccgtcatatatcagaggcgtccacattgcctacggttctgccgttctgcatcccgcccgccgcgctcgtcttccccacgcgctgcgcccgcctgccatcaacgcgcacgcccacttccatccatggccttccattcgtaaaacgtgcctccctcagggtttcggtggaggttgccggcgtgaagcattggccaccgagtgctgcacgccaacagccaacagggggtaccgtgcaggtgggcagaagcagccagcgacaacagtagggcacagggatttatatggaccttccaaatacactagacatttgcaagcaaccaaagatactctcagagaagaaggttgtgaacacacatctgcagagataaaaaggagtgccatcaatggcagccacagattgggcatgaagtgtatccactatgagatcaatgtgttgctttttcgtgtttaataatttgagttataatatatggtttgcttctaatgttttttatttattttttattttggcaatgcaggggacataactcctccaacagggattaggcaggctatggagatgcaggctgaagtagaaaggagaatatgtgcccaagtccttgaatcagaagggaagaaacaagcccaagtccttgaattagaagggaagaaaactgcccagatcctttaatccgaagtcgagcagcggaggaacccggcgctcaggggatagccaaccgtcgtggtgcagtacaatggctggaaaggcggcggcttgattgccgtcagctacgaggctcgtggatttggtccatgcgcggagatgaggccaagagggtctgtcctggtattaatcttgttcaggtcccagtggcgcgtggcaaggctaaccttaatctttacagaagtgctggtgctgaggttgttgcaatccttgcaagcaaagggaagtgcgagcgggcatccatcgacgaagtttatcttgaccttactgatgcagcaaaggaaatgctcttacaagctcccccagattcaccagaggggatttttatggaggcggcaaagtcaaatatcttgggccttccggctgatgccagcgagaaggaaaagaatgtgagggcatggctttgtcaatcagaagctgattaccaggacaagttactggcatgtggagctataattgttgcacagttacgagtcagagttctggaggaaacccaattcacatgctctgctgggattgctcacaataagatgttagctaaacttgtcagtggaatgtacaagcctgctcagcaaacagttgtcccttcttcatcagttcaagacttactagcatcactacctgtgaaaaagatgaaacaacttggtggtaagcttggaagttccttgcaggatgatcttggggttgagacaattggtgatctcctaagttttacagaggaaaaattacaagagcagtatggagtaaatactgggtttgaccatataatatatatccctactactatataagcatggtgtgtaatgggtttggaaaaggttctagacgaacacatggtcaaagtctgcaatgatcagtacagtttgactgacaaatatactgatggttggctgtcttcagattgtagaacagctctttttaaataaacacctcaaggagtaaagctgacacccatccacgatcatcacgctgcttgtgacgatcgtcgttctctttcgtcgctaaaacgtagtgagttctctgcttcgtcgagtcacgccctcatgggctgctcgtgtttattattgtttgatctgtcagaaaaatcccacgtgtatttgtttatagatagattacactaattattaaaacgggtgaaattcattcacgctgcaaagttgtacatagtgcgttggaatttatttgaaagtaaagttgtacatagtttttgacttggtcaattatttggtccttatgggcgatgtctctggacaagtctataaattctctcgaggtggatgctag

SEQ ID NO: 53489 - DNA, 1246 bp, Zea Mays
aaaccccaccccccctttatcaccttccccactgcaattagttgcttcactcattcattcattcatccatcacccacccctcccggcctcccctgacctctctcgatcactcgtcatctccaccacacacacacacgcgcgagcgaatccaaggaagaagaagaggaggaggatccatggagaagtgcaggtcggtgccgcacgagcactcgtcggcgtactacggctgcggaggcgggtacgactacgaggacgtcggcggcgggcccgggcaggccggcaagtcgtacagcttcaacgggccgagcggccgggacgacccggaggcgaagcggcggcgccgcgtggcggcgtacaacgtgttcgccacgcagggccggatcaagaccaccgtccgcagcagcgtcaagtggctcaagtccaagttctccgacgtccgctacggtggcctctgaactgatctgatgagcgtgagcctactgcatgcaacgcatcctactcctacgaccgcacacatatatgtgtatgcacgaaccatggtgctcatatatatgcaattatatatgcacgcgcaagctatacgcgtgccaagctaaatagctgctgcgtatatatactactactactgtgtacatgtgcgtgtatgaactgtgtgtgtatggtctcaagtcactgcatgtgttcgtggctgctttccagatcggtcagtgtgttttctcggtttgcttttggatctgcacatcaagttgttgtatcaccagccaccagagggaccatgccctttgctttgatctggttcgccttttcagttccccacagctgtgcctgtgttgtgtcttgtgtttcggaagtggagggtttcattccagtggttggaatttcgaccttgctgatctggattcgggtggtttgattatttctgtcggaaaggcgaaaaaaagggtgctcttgagcacaaaccacgcatgcaggctgttggcagcaaagatggatcggatcgatcaagaactgggtgaatatataataaaacaaataaaacaatgattcatcttttttctgaagagatgattattggtgcgtgcaatgatatgaggcatcagtctcaagctcattggaagaacagccggagaagaacaaattcagaggaatgctcaagctcagccggagaagaacagccgatccacaagaacctactgcttaattggaagaagggagttcctccgacgcgcgtagcgccgcggcggcc

SEQ ID NO: 53490 - DNA, 2605 bp, Zea Mays
cctcctcttcctcagtaagcacgccttcaaatgcatccggacgcggatggctctgataaggcggaagaagcacgccatgatccggttcctgaagaaggacgtcgccgacctcctcgccaatggcctcgacacccacgccttccgaaggatagatggcctcttagttgagctgaaccatgcttcttgctatgatatgatcgaaggattctgtcattacattgggaagcaactgggaagccttcagaagcagagggattgccccccagaattcagggaagctgtctcaaccctgatatttgctgctgctcgctatcctgatttacctgaactttgtgacctaaggcacatattcacagaaagatatggaaattttgttgagcattttgttagccaggagttcattcggaaacttgacagtacagagttcactaatgaggaaaggttccaagtcatgcaaagtgttgctgaagaattatccgtcagttttgatgccaaggaattggaactcaagttatgggcctcactacaaacagaacatgatatgcttgagaagggttcaaggaagccagcagaactagcaatgccttcatcgagcaagcagatatgtgtcgagaatgcttcatgtgaagaacaagaggatatccttgagaagagtttgacaaggccaacagaaccagcaatgtctttatttgacaagacaaagtacaatggggatgctccatgtgaaagaaaaaataaggatatgcttgagaattactcaaccaagcccatagaactagcaactgcttcatccaacaagcagaaggttactgagaatgttccaggtaaaagaaactatgatgctgaacctgcacaccataccgagaaagtggagatacagttggtccaaaaagatattcagtctgttgctgatgcacatcatacaattgatgagaattcgaggaagcagcaaccttatgtgtctgatgagaaggaacatttgcagaaaccagtgtctcctgtggacactaacaggacccaaaaagatgttcagaagcttaacagaagagctgtccgccatttggaaaaggagctgatggaggcagtggaacttgatctcaacggcctaccaaaatttggatttggcgcagtcagatttcccgaagcagaaggcaacaaaacagttcaactaaatgtcaagccaaatgaggccgtgagagatttccatattgaaaaagagaatgatgaagtccttcattgttcacgtttgcctggtggttctgaacacaatgggggacatgcagattcagggctaagagctcagggcctagagaatcaaggacatccagtgagtcctcttagtggtaacactagaaaaaaggctccttacactaagctgaatgctgtaaacataaagaatcctactgagaaacaagcaaacaatggtttcttgcatgataaaccgcaacatttagctgatctgggatacccggtgcagaaaggacaaggagacccagagagggcacttactatgctgcctccttatgttgaaccaaagtctaacatgcaacctgtgaatgatgatcctgaaaagcaaactccaagtggttacagaaagcccaacatccctggacaaactgatcacttggaaaacaaaaatgtgcttcgacctgtttctgtcagaaggagaactgcaaagctgccagcacctgttgatgcttatgttgaggtgcctaacaatgcgaaggtcacaagccaaacacccaaaagtcacagaagccactcaagcaggaggaatggtgctaaagatgaccagaaccggaaatgtaatgggactgatgatgttggtagcgagacgaatgctcagataactccaagtagccaatcaaagcacgtaggcaggaggaatggagctttaaaccacaagaacaactctggcaggttgatgcagcgtatgcaacctgaagcagctgagactgctattgattgtggtaatctcttgcctcgaaatgcaaatggacagatgcgacacaacagcgggcgcggtggagacatggatgaggaggaaaggatgatggacaagcttttgatgcactatagcaagaaaggttcggatctgaccaacaatgaaacacatacagatgctgcgcagaaggtttccttgcatcccacgggtagagctatctcgctaccacctgaatctgttggcccgagcaaagatgcgaaggttcctgctcgatgcacatcacttcagccggaaggtcctaggagtgcgcatgttcacccaaaaatgccagacttcgatgaattggctgctcgggtcaaggctctgaggaaggcttgaggtggcataacatgatctctggcttgtgtacacgttctttcagctgaagagttgatccttggttgacagttccctgcaagacacaaccacacagagtcgtgctttgatgtgcagttcctattagagattaaacagatttgtgtatgagtttactcttttttttgtctgttagacgttttttacagtgctcttgttataggttttacttcaaaccaggtgtttgtctagggtgtttgtctagaataggagcactggtttcagttaacacgatatatataatag

SEQ ID NO: 53491 - DNA, 732 bp, Zea Mays
cagatccatttcgtcgaatggaatactttctcagacaactagaaaccattggattttgcggtgtgcaaaacttcccaaccgtaggtctgtttgatgggaattttagacagaatttggaggaaactggaatggggtacagcatggaagtggagatgatttcaatggctcatcgcatgggtttccttactactccatatgctttcaatccggatgaagctgctgccatggccaaggcaggagctcatatcgtagttgcacatatgggtctgacaactgcagggtctatcggggcaatgacagctgccactttagatgatagtgttttacgtgttcaggccattgcggatgcggcatttggggttaatcctgatatcattgttctctgtcacggaggccccatatctggacccctagaagccgagttcgtattgaagaatactaaaagggttcatggattttacggtgcatcaagcatggaaagattaccagtagagcaagctatcacgaacaccatgagagagtacaaaagaatttccttaaaatgagaaccatcgtttacatgcgtgatttaagcctgctgttctttcgttacacttcgcagattctgtcatctctgcctctttatttgtcatatacattttcttaccaatgtacctttcttgttggaatataatcataataaatgttttctttgacgaggctgcgtaatgtcttaattattaccgtccattc

SEQ ID NO: 53492 - DNA, 1921 bp, Zea Mays
ctcaaatttacgtgctcttccacatatgattctaattggcaaggttcaagtgagcatagtggatgtctccacaactgaaaagacaacggcaaatgatttcaaagacatcatatttatccctagaaatacaattctttcatgtcatttgggtgttgaccaacataatcttccagataacagaggtgaagcaattgcactcatgtcaaaggctcttcagagcttccttaaaaaaagatatgacagtggtatgctggtgggtgctgttggtttaggaggcagtggaggaactgcactaattgctcctgctctgaggttgttgccacttggagtgcctaagcttattgtatctactgttgccagtggtcacactacaccttatgttgaaacatctgatttggtcttgtttccttcggttgttgacatctgtggaataaacagtgtcagtcgtgttatattatctaatgctgcagcagcttttgctggaatggtacatggaatcttgtcggcgtccaatgagtctgatgaaacgtcaacaaagccaactgttggtattactatgtttggtgttacaacaccatgtgtaaatgcggtcaaggatagactgaacaaagaaggttatgagacccttatattccatgccacaggtgtaggaggcaaagcaatggaagacctagttaggggtggttttatacagggcgtgttggatgtaacaacaacagaagttgcagaccatattgtagggggcatcatggcttgtgatgagaccaggtttgatgcaattatagagaataagatccctcttgttcttagtgttggagccttggatatggtaaactttggagctcgagatacaattcctcttgctttcgcagaccgaaatattcatgttcataatgagcagaaatattgcggaggacgcggtcaatattacataaactgaaggaacagatcagtgacggtactccagttattggagctggtgctggcacaggcatatctgcaaagttcgaagaagctggtggggttgatcttatagtgctgtacaactctggacggtttcgaatggctggaaggggctcactagctgggctcttgccctttggtgatgcaaatgacattgtacttcagatggccaacgaagtgttgcctgtggttaaaggagttcctgttcttgctggggtatgtgctacagatccatttcgtcgaatggaatactttctcagacaactagaaaccattggattttgcggtgtgcaaaacttcccaaccgtaggtctgtttgatgggaattttagacagaatttggaggaaactggaatggggtacagcatggaagtggagatgatttcaatggctcatcgcatgggtttccttactactccatatgctttcaatccggatgaagctgctgccatggccaaggcaggagctcatatcgtagttgcacatatgggtctgacaactgcagggtctatcggggcaatgacagctgccactttagatgatagtgttttacgtgttcaggccattgcggatgcggcatttggggttaatcctgatatcattgttctctgtcacggaggccccatatctggacccctagaagccgagttcgtattgaagaatactaaaagggttcatggattttacggtgcatcaagcatggaaagattaccagtagagcaagctatcacgaacaccatgagagagtacaaaagaatttccttaaaatgagaaccatcgtttacatgcgtgatttaagcctgctgttctttcgttacacttcgcagattctgtcatctctgcctctttatttgtcatatacattttcttaccaatgtacctttcttgttggaatataatcataataaatgttttctttgacgaggctgcgtaatgtcttaattattaccgtccattc

SEQ ID NO: 53493 - DNA, 3006 bp, Zea Mays
ctcaaccgtcattcctacaggctacagtcctacgtacagccatctggaccagagttctcaactactgccgccggccacctcctccgcccgccgccagcgtctccggctccgatcacctcccccgcccgcttacggccatctccccgcccacctacggccaccgccgcccgcgaaggcgtctccggatccggccacctcctccgcccagcgtgtttaccggacacgtctgccacccgtcaggccctgcccgacgctagggttgggcgacggcgtccaccggctgacgcccggggagatctcgcccgctctgctccatccaggtgcgaagtaatggaggtgctctgcatcggaacagcggataccaagtttgaggagctgcttttcctcgcggcgcaactccgctccgccctcgccgcctctggctccgactcgaaggaatggaacttggtcgaatagtaaggttgcaacttgcagtgcaggaactcaaatttacgtgctcttccacatatgattctaattggcaaggttcaagtgagcatagtggatgtctccacaactgaaaagacaacggcaaatgatttcaaagacatcatatttatccctagaaatacaattctttcatgtcatttgggtgttgaccaacataatcttccagataacagaggtgaagcaattgcactcatgtcaaaggctcttcagagcttccttaaaaaaagatatgacagtggtatgctggtgggtgctgttggtttaggaggcagtggaggaactgcactaattgctcctgctctgaggttgttgccacttggagtgcctaagcttattgtatctactgttgccagtggtcacactacaccttatgttgaaacatctgatttggtcttgtttccttcggttgttgacatctgtggaataaacagtgtcagtcgtgttatattatctaatgctgcagcagcttttgctggaatggtacatggaatcttgtcggcgtccaatgagtctgatgaaacgtcaacaaagccaactgttggtattactatgtttggtgttacaacaccatgtgtaaatgcggtcaaggatagactgaacaaagaaggttatgagacccttatattccatgccacaggtgtaggaggcaaagcaatggaagacctagttaggggtggttttatacagggcgtgttggatgtaacaacaacagaagttgcagaccatattgtagggggcatcatggcttgtgatgagaccaggtttgatgcaattatagagaataagatccctcttgttcttagtgttggagccttggatatggtaaactttggagctcgagatacaattcctcttgctttcgcagaccgaaatattcatgttcataatgagcaggtttcattgatgcgtacgactgtggaagagaacaagaaatttgctaggttcattgctgataaaataaacaaatcttcatccaaagttactgtttgccttccccagaagggcatatctgcaatagatgctccaggaatgccattctatgatccagaagctacatctacactgttgggtgaattaaacacccttatacagagaaccgatattcgagaggtgaagctgtttccttaccacatcaatgaccctgaattcgcaaatgcattggtagatgcattcttgagtatggatgtacaggcctctagttcagcccaacctaagcaagatcttaatattggaaaatcctgttcaggacagaaaatttcagatagttctattatatggagaactcctgtggattttccagatgcaaaaccaggagaactgcccctcattgtattaagaagaaaagtaaccaggccacgagggtctaaagaaggcccgatacaaaagaccccttacgggcgccagaaacacgcatacaggaaggaatccatctaggaaatcagaaaaacccacacactgccagggaagtccctaggactcaactaagggggctgccagaaatattgcggaggacgcggtcaatattacataaactgaaggaacagatcagtgacggtactccagttattggagctggtgctggcacaggcatatctgcaaagttcgaagaagctggtggggttgatcttatagtgctgtacaactctggacggtttcgaatggctggaaggggctcactagctgggctcttgccctttggtgatgcaaatgacattgtacttcagatggccaacgaagtgttgcctgtggttaaaggagttcctgttcttgctggggtatgtgctacagatccatttcgtcgaatggaatactttctcagacaactagaaaccattggattttgcggtgtgcaaaacttcccaaccgtaggtctgtttgatgggaattttagacagaatttggaggaaactggaatggggtacagcatggaagtggagatgatttcaatggctcatcgcatgggtttccttactactccatatgctttcaatccggatgaagctgctgccatggccaaggcaggagctcatatcgtagttgcacatatgggtctgacaactgcagggtctatcggggcaatgacagctgccactttagatgatagtgttttacgtgttcaggccattgcggatgcggcatttggggttaatcctgatatcattgttctctgtcacggaggccccatatctggacccctagaagccgagttcgtattgaagaatactaaaagggttcatggattttacggtgcatcaagcatggaaagattaccagtagagcaagctatcacgaacaccatgagagagtacaaaagaatttccttaaaatgagaaccatcgtttacatgcgtgatttaagcctgctgttctttcgttacacttcgcagattctgtcatctctgcctctttatttgtcatatacattttcttaccaatgtacctttcttgttggaatataatcataataaatgttttctttgacgaggctgcgtaatgtcttaattattaccgtccattc

SEQ ID NO: 53494 - DNA, 2568 bp, Zea Mays
ctgagtggtcgtgtccacctcaccgaatcaccgctcaaccgtcattcctacaggctacagtcctacgtacagccatctggaccagagttctcaactactgccgccggccacctcctccgcccgccgccagcgtctccggctccgatcacctcccccgcccgcttacggccatctccccgcccacctacggccaccgccgcccgcgaaggcgtctccggatccggccacctcctccgcccagcgtgtttaccggacacgtctgccacccgtcaggccctgcccgacgctagggttgggcgacggcgtccaccggctgacgcccggggagatctcgcccgctctgctccatccaggtgcgaagtaatggaggtgctctgcatcggaacagcggataccaagtttgaggagctgcttttcctcgcggcgcaactccgctccgccctcgccgcctctggctccgactcgaaggttcaagtgagcatagtggatgtctccacaactgaaaagacaacggcaaatgatttcaaagacatcatatttatccctagaaatacaattctttcatgtcatttgggtgttgaccaacataatcttccagataacagaggtgaagcaattgcactcatgtcaaaggctcttcagagcttccttaaaaaaagatatgacagtggtatgctggtgggtgctgttggtttaggaggcagtggaggaactgcactaattgctcctgctctgaggttgttgccacttggagtgcctaagcttattgtatctactgttgccagtggtcacactacaccttatgttgaaacatctgatttggtcttgtttccttcggttgttgacatctgtggaataaacagtgtcagtcgtgttatattatctaatgctgcagcagcttttgctggaatggtacatggaatcttgtcggcgtccaatgagtctgatgaaacgtcaacaaagccaactgttggtattactatgtttggtgttacaacaccatgtgtaaatgcggtcaaggatagactgaacaaagaaggttatgagacccttatattccatgccacaggtgtaggaggcaaagcaatggaagacctagttaggggtggttttatacagggcgtgttggatgtaacaacaacagaagttgcagaccatattgtagggggcatcatggcttgtgatgagaccaggtttgatgcaattatagagaataagatccctcttgttcttagtgttggagccttggatatggtaaactttggagctcgagatacaattcctcttgctttcgcagaccgaaatattcatgttcataatgagcaggtttcattgatgcgtacgactgtggaagagaacaagaaatttgctaggttcattgctgataaaataaacaaatcttcatccaaagttactgtttgccttccccagaagggcatatctgcaatagatgctccaggaatgccattctatgatccagaagctacatctacactgttgggtgaattaaacacccttatacagagaaccgatattcgagaggtgaagctgtttccttaccacatcaatgaccctgaattcgcaaatgcattggtagatgcattcttgagtatggatgtacaggcctctagttcagcccaacctaagcaagatcttaatattggaaaatcctgttcaggacagaaaatttcagatagttctattatatggagaactcctgtggattttccagatgcaaaaccagaaatattgcggaggacgcggtcaatattacataaactgaaggaacagatcagtgacggtactccagttattggagctggtgctggcacaggcatatctgcaaagttcgaagaagctggtggggttgatcttatagtgctgtacaactctggacggtttcgaatggctggaaggggctcactagctgggctcttgccctttggtgatgcaaatgacattgtacttcagatggccaacgaagtgttgcctgtggttaaaggagttcctgttcttgctggggtatgtgctacagatccatttcgtcgaatggaatactttctcagacaactagaaaccattggattttgcggtgtgcaaaacttcccaaccgtaggtctgtttgatgggaattttagacagaatttggaggaaactggaatggggtacaggccattgcggatgcggcatttggggttaatcctgatatcattgttctctgtcacggaggccccatatctggacccctagaagccgagttcgtattgaagaatactaaaagggttcatggattttacggtgcatcaagcatggaaagattaccagtagagcaagctatcacgaacaccatgagagagtacaaaagaatttccttaaaatgagaaccatcgtttacatgcgtgatttaagcctgctgttctttcgttacacttcgcagattctgtcatctctgcctctttatttgtcatatacattttcttaccaatgtacctttcttgttggaatataatcataataaatgttttctttgacgaggctgcgtaatgtcttaattattaccgtccattc

SEQ ID NO: 53495 - DNA, 2693 bp, Zea Mays
gctgagtggtcgtgtccacctcaccgaatcaccgctcaaccgtcattcctacaggctacagtcctacgtacagccatctggaccagagttctcaactactgccgccggccacctcctccgcccgccgccagcgtctccggctccgatcacctcccccgcccgcttacggccatctccccgcccacctacggccaccgccgcccgcgaaggcgtctccggatccggccacctcctccgcccagcgtgtttaccggacacgtctgccacccgtcaggccctgcccgacgctagggttgggcgacggcgtccaccggctgacgcccggggagatctcgcccgctctgctccatccaggtgcgaagtaatggaggtgctctgcatcggaacagcggataccaagtttgaggagctgcttttcctcgcggcgcaactccgctccgccctcgccgcctctggctccgactcgaaggttcaagtgagcatagtggatgtctccacaactgaaaagacaacggcaaatgatttcaaagacatcatatttatccctagaaatacaattctttcatgtcatttgggtgttgaccaacataatcttccagataacagaggtgaagcaattgcactcatgtcaaaggctcttcagagcttccttaaaaaaagatatgacagtggtatgctggtgggtgctgttggtttaggaggcagtggaggaactgcactaattgctcctgctctgaggttgttgccacttggagtgcctaagcttattgtatctactgttgccagtggtcacactacaccttatgttgaaacatctgatttggtcttgtttccttcggttgttgacatctgtggaataaacagtgtcagtcgtgttatattatctaatgctgcagcagcttttgctggaatggtacatggaatcttgtcggcgtccaatgagtctgatgaaacgtcaacaaagccaactgttggtattactatgtttggtgttacaacaccatgtgtaaatgcggtcaaggatagactgaacaaagaaggttatgagacccttatattccatgccacaggtgtaggaggcaaagcaatggaagacctagttaggggtggttttatacagggcgtgttggatgtaacaacaacagaagttgcagaccatattgtagggggcatcatggcttgtgatgagaccaggtttgatgcaattatagagaataagatccctcttgttcttagtgttggagccttggatatggtttcattgatgcgtacgactgtggaagagaacaagaaatttgctaggttcattgctgataaaataaacaaatcttcatccaaagttactgtttgccttccccagaagggcatatctgcaatagatgctccaggaatgccattctatgatccagaagctacatctacactgttgggtgaattaaacacccttatacagagaaccgatattcgagaggtgaagctgtttccttaccacatcaatgaccctgaattcgcaaatgcattggtagatgcattcttgagtatggatgtacaggcctctagttcagcccaacctaagcaagatcttaatattggaaaatcctgttcaggacagaaaatttcagatagttctattatatggagaactcctgtggattttccagatgcaaaaccagaaatattgcggaggacgcggtcaatattacataaactgaaggaacagatcagtgacggtactccagttattggagctggtgctggcacaggcatatctgcaaagttcgaagaagctggtggggttgatcttatagtgctgtacaactctggacggtttcgaatggctggaaggggctcactagctgggctcttgccctttggtgatgcaaatgacattgtacttcagatggccaacgaagtgttgcctgtggttaaaggagttcctgttcttgctggggtatgtgctacagatccatttcgtcgaatggaatactttctcagacaactagaaaccattggattttgcggtgtgcaaaacttcccaaccgtaggtctgtttgatgggaattttagacagaatttggaggaaactggaatggggtacagcatggaagtggagatgatttcaatggctcatcgcatgggtttccttactactccatatgctttcaatccggatgaagctgctgccatggccaaggcaggagctcatatcgtagttgcacatatgggtctgacaactgcagggtctatcggggcaatgacagctgccactttagatgatagtgttttacgtgttcaggccattgcggatgcggcatttggggttaatcctgatatcattgttctctgtcacggaggccccatatctggacccctagaagccgagttcgtattgaagaatactaaaagggttcatggattttacggtgcatcaagcatggaaagattaccagtagagcaagctatcacgaacaccatgagagagtacaaaagaatttccttaaaatgagaaccatcgtttacatgcgtgatttaagcctgctgttctttcgttacacttcgcagattctgtcatctctgcctctttatttgtcatatacattttcttaccaatgtacctttcttgttggaatataatcataataaatgttttctttgacgaggctgcgtaatgtcttaattattaccgtccattc

SEQ ID NO: 53496 - DNA, 1747 bp, Zea Mays
ggctacagtcctacgtacagccatctggaccagagttctcaactactgccgccggccacctcctccgcccgccgccagcgtctccggctccgatcacctcccccgcccgcttacggccatctccccgcccacctacggccaccgccgcccgcgaaggcgtctccggatccggccacctcctccgcccagcgtgtttaccggacacgtctgccacccgtcaggccctgcccgacgctagggttgggcgacggcgtccaccggctgacgcccggggagatctcgcccgctctgctccatccaggtgcgaagtaatggaggtgctctgcatcggaacagcggataccaagtttgaggagctgcttttcctcgcggcgcaactccgctccgccctcgccgcctctggctccgactcgaaggttcaagtgagcatagtggatgtctccacaactgaaaagacaacggcaaatgatttcaaagacatcatatttatccctagaaatacaattctttcatgtcatttgggtgttgaccaacataatcttccagataacagaggtgaagcaattgcactcatgtcaaaggctcttcagagcttccttaaaaaaagatatgacagtggtatgctggtgggtgctgttggtttaggaggcagtggaggaactgcactaattgctcctgctctgaggttgttgccacttggagtgcctaagcttattgtatctactgttgccagtggtcacactacaccttatgttgaaacatctgatttggtcttgtttccttcggttgttgacatctgtggaataaacagtgtcagtcgtgttatattatctaatgctgcagcagcttttgctggaatggtacatggaatcttgtcggcgtccaatgagtctgatgaaacgtcaacaaagccaactgttggtattactatgtttggtgttacaacaccatgtgtaaatgcggtcaaggatagactgaacaaagaaggttatgagacccttatattccatgccacaggtgtaggaggcaaagcaatggaagacctagttaggggtggttttatacagggcgtgttggatgtaacaacaacagaagttgcagaccatattgtagggggcatcatggcttgtgatgagaccaggtttgatgcaattatagagaataagatccctcttgttcttagtgttggagccttggatatggtaaactttggagctcgagatacaattcctcttgctttcgcagaccgaaatattcatgttcataatgagcaggtttcattgatgcgtacgactgtggaagagaacaagaaatttgctaggttcattgctgataaaataaacaaatcttcatccaaagttactgtttgccttccccagaagggcatatctgcaatagatgctccaggaatgccattctatgatccagaagctacatctacactgttgggtgaattaaacacccttatacagagaaccgatattcgagaggtgaagctgtttccttaccacatcaatgaccctgaattcgcaaatgcattggtagatgcattcttgagtatggatgtacaggcctctagttcagcccaacctaagcaagatcttaatattggaaaatcctgttcaggacagaaaatttcagatagttctattatatggagaactcctgtggattttccagatgcaaaaccaggagaactgcccctcattgtattaagaagaaaagtaaccaggccacgagggtctaa

SEQ ID NO: 53497 - DNA, 2109 bp, Zea Mays
cttgcatttggcttcttcgcggcttcagcagcgaccgcgtccccgcccccgtcgggcaccaacccagcccaacgctctcccccctgctcctccccttttcctctgcccaccaattgatagctcacctcacctccgcgcccgttgtttcgtgcaccgtacttcacctcccaccaacctctccccctcaaaaactatccacccctccacggctccacccctacccgccgacgagcgcgatcgattgattcggttcgagccgggcggaggaggagggagcgccgcggggcggggtgagcccaccagatccgactaccgcagcggctatgatgaagtcgctgctgccgcagagccagctgcggcgctcggcggcggcggccgcgcggtcgtcggcgggcggcgccgcgggggcagacggggctatgtccgacggcggcggcgcggggccgcgggcgcccgcctcctccaccttctggttcctgctccacgcgctctgctgcctcatctcgctcttcctcggcttccgcttctcgcgtctcctcttcttcctgctcttctccaccaccgcgctctaccgctccagcacctcctcctcctcggccgcggtccttcgcgccaccaccacgacaaccaccaccacgaccaccacgacgacgacgaccaacaccttcacgctctccttcgccgccgccaacactcccccttccacccccgctaaccgcaccgcgctggatgtggccgacaagggggcggcgtccgggaacccacagagtcacgtcgtggtggggaggcacgggattcggatccggccgtggccgcacccggaccccgtcgaggtgatgcgggcgcaccggatcatggagcgcgtgcaggaggaacagcgccgctggtacggcgtcaaggagccgaggcaggcggcaccaccaacgccacggcgtcaatgcttgcgcgctctggcctcactttcgttcacatccccttccctgaccgcatgccccacgactgggccgaccgccacgccactgagaaccggatgcgcctccacgccctacgcgtgatccgcgagaggaagatggatggcgtagttgttttcaccgacgacagcaatgttcatagcatggagctgttcgatgaggtgcagaaggtccagtggatgggtgctgtatccgtcggaatccttgcgcatactggcacggcagaccaactacggctcagcgaggaggacaagcagaatatgcctcttccagtccagggccctgcttgcaactcctcagggcatctgattggatggcacacgttcaactcattgcccttctctgggaagacggccacagttgttggtgaagcagcccctgttctgcccaggggtttggagtgggctggttttgtgttgaactcaaggatgctgtggaaggaggctgacggcaagcctgactgggtgaaggatcttgatgctgtgggcgagaatggcgaggagattgagaacccacttactctgttgaatgatccgtcctctgttgagccactgggcaactgtgggaagaaggtcctactgtggtggcttcgtgttgaagcacgggctgatagcaagtttcctgaagggtgggtaattgagccacctttggaagtcgttgtccctgcaaagcgcactccatggcctgaaacaaccaccgagctgccagccgagttattggatgacaagcaagagcaggaggataggcgcttgtcaagagccaacaaatcatctcggccccgaggcaccacgaagcggaagggcgaccctcaaggacaagataactgatgcagaacgtactggccttgtgatgtatatcttacaccctgcaaaaacacagtagcaagcatatcctgttaatctggcggtgtctgtttaatttttcttttcttttctgatgtttttgctcctgtggcgatggtccacgcttgggtatgttatctgtagagggcacatttttaaagtagtggttgtatcttttgtgttgaaatgtacaatgcattgggagctaaaaaaatggtggatgaatactggaagtctgtctatggttctgaagaaagtactcaactcttgcatgccggctgatggctgggtgcgca
